United States Patent Application Publication US 2021/0254056 A1 - sequence listing, part 8

SEQ ID NO: 14809 - protein, 229 aa, Homo sapiens
  MOD_RES (16)..(16): Selenocysteine
  MOD_RES (65)..(65): Selenocysteine
  MOD_RES (81)..(81): Selenocysteine
  MOD_RES (94)..(94): Selenocysteine
  MOD_RES (111)..(111): Selenocysteine
  MOD_RES (135)..(135): Selenocysteine
  MOD_RES (164)..(164): Selenocysteine
  MOD_RES (177)..(177): Selenocysteine
  MOD_RES (214)..(214): Selenocysteine
MVVVIVCLLNHYKVSXRSFINRPNQSRRREDGLPQEGCLWPSDSAAPRLGASEIMHAPRSRDRFXAPSFIQRDRFSRFQPXYPYVQHEIDLPPXISLSDGEEPPPYQGPCXLQLRDPEQQMELNRESVRAPPNRXIFDSDLIDIAMYSGGPCPPSSNSGISASXCSSNGRMEGPPPXYSEVMGHHPGASFLHHQRSNAHRGSRLQFQQNNAESXIVPIKGKDRKPGNLV

SEQ ID NO: 14810 - protein, 308 aa, Homo sapiens
  MOD_RES (36)..(36): Selenocysteine
  MOD_RES (38)..(38): Selenocysteine
  MOD_RES (41)..(41): Selenocysteine
  MOD_RES (56)..(56): Selenocysteine
  MOD_RES (77)..(77): Selenocysteine
  MOD_RES (89)..(89): Selenocysteine
  MOD_RES (100)..(100): Selenocysteine
  MOD_RES (104)..(104): Selenocysteine
  MOD_RES (120)..(120): Selenocysteine
  MOD_RES (149)..(149): Selenocysteine
  MOD_RES (158)..(158): Selenocysteine
  MOD_RES (160)..(160): Selenocysteine
  MOD_RES (200)..(200): Selenocysteine
  MOD_RES (209)..(209): Selenocysteine
  MOD_RES (218)..(218): Selenocysteine
  MOD_RES (225)..(225): Selenocysteine
  MOD_RES (230)..(231): Selenocysteine
  MOD_RES (267)..(267): Selenocysteine
  MOD_RES (274)..(274): Selenocysteine
  MOD_RES (277)..(277): Selenocysteine
  MOD_RES (300)..(300): Selenocysteine
MDALKSAGRALIRSPSLAKQSWGGGGRHRKLPENWXDXREXLLEGMLFSLKYLGMXLVEQPKGEELSAAAIKRIVAXAKASGKKLQKVXLKVSPRGIILXDNLXNQLIENVSIYRISYCXADKMHDKVFAYIAQSQHNQSLECHAFLCXKRKMAQAVXLXVAQAFKVAFEFWQVSKEEKEKRDKASQEGGDVLGARQDCXPSLKSLVAXGNLLDLEEXAKAPLSXVSANXXNMDEVPRPQALSGSSVVWELDDGLDEAFSRLAQSRXNPQVLDXGLXAQDMHYAQCLSPVDWDKPDSSGXEQDDLFSF

SEQ ID NO: 14811 - protein, 133 aa, Homo sapiens
  MOD_RES (10)..(10): Selenocysteine
  MOD_RES (70)..(70): Selenocysteine
  MOD_RES (117)..(117): Selenocysteine
  MOD_RES (124)..(124): Selenocysteine
MAEVARQAQXSQEPYHDKAREHPDDGKHPDGGLYNKGPSYSSYSGYIMMPNMNNDPYMSNGSLSPPIPRXACPDILQLLISLLFIPCLRVVLDRSPHLLAGKVSLYIPSRVDSGNPXHPHCQSXLPCPGFPII

SEQ ID NO: 14812 - protein, 145 aa, Homo sapiens
  MOD_RES (10)..(10): Selenocysteine
  MOD_RES (70)..(70): Selenocysteine
  MOD_RES (87)..(87): Selenocysteine
  MOD_RES (91)..(91): Selenocysteine
  MOD_RES (127)..(127): Selenocysteine
  MOD_RES (140)..(140): Selenocysteine
MAEVARQAQXSQEPYHDKAREHPDDGKHPDGGLYNKGPSYSSYSGYIMMPNMNNDPYMSNGSLSPPIPRXSNKVPVVQPSHAVHPLXPLIXYSDEHFSPGSHPSHIPSDVNSKQGMSRHPPAPDIPXFYPLSPGGVGQIXPPLGW

SEQ ID NO: 14813 - protein, 303 aa, Homo sapiens
  MOD_RES (10)..(10): Selenocysteine
  MOD_RES (70)..(70): Selenocysteine
  MOD_RES (87)..(87): Selenocysteine
  MOD_RES (91)..(91): Selenocysteine
  MOD_RES (127)..(127): Selenocysteine
  MOD_RES (140)..(140): Selenocysteine
  MOD_RES (159)..(160): Selenocysteine
  MOD_RES (169)..(169): Selenocysteine
  MOD_RES (179)..(179): Selenocysteine
  MOD_RES (226)..(226): Selenocysteine
  MOD_RES (294)..(294): Selenocysteine
  MOD_RES (299)..(299): Selenocysteine
MAEVARQAQXSQEPYHDKAREHPDDGKHPDGGLYNKGPSYSSYSGYIMMPNMNNDPYMSNGSLSPPIPRXSNKVPVVQPSHAVHPLXPLIXYSDEHFSPGSHPSHIPSDVNSKQGMSRHPPAPDIPXFYPLSPGGVGQIXPPLGWFSHHMIPGPPGPHXXGIPHPAIVXPQVKQEHPHXDSDLMHVKPQHEQRKEQEPKRPHIKKPLNAFMLYMKEMRANVVAECXLKESAAINQILGRRWHALSREEQAKYYELARKERQLHMQLYPGWSARDNYGKKKKRKREKLQESASGXGPRMXAAYI

SEQ ID NO: 14814 - protein, 173 aa, Homo sapiens
  MOD_RES (10)..(10): Selenocysteine
  MOD_RES (70)..(70): Selenocysteine
  MOD_RES (87)..(87): Selenocysteine
  MOD_RES (91)..(91): Selenocysteine
  MOD_RES (127)..(127): Selenocysteine
  MOD_RES (140)..(140): Selenocysteine
  MOD_RES (154)..(154): Selenocysteine
  MOD_RES (169)..(169): Selenocysteine
MAEVARQAQXSQEPYHDKAREHPDDGKHPDGGLYNKGPSYSSYSGYIMMPNMNNDPYMSNGSLSPPIPRXSNKVPVVQPSHAVHPLXPLIXYSDEHFSPGSHPSHIPSDVNSKQGMSRHPPAPDIPXFYPLSPGGVGQIXPPLGWQGQPVYPIXGGFRQPYPSSLSVDXSMSR

SEQ ID NO: 14815 - protein, 371 aa, Homo sapiens
  MOD_RES (20)..(20): Selenocysteine
  MOD_RES (78)..(78): Selenocysteine
  MOD_RES (138)..(138): Selenocysteine
  MOD_RES (155)..(155): Selenocysteine
  MOD_RES (159)..(159): Selenocysteine
  MOD_RES (195)..(195): Selenocysteine
  MOD_RES (208)..(208): Selenocysteine
  MOD_RES (227)..(228): Selenocysteine
  MOD_RES (237)..(237): Selenocysteine
  MOD_RES (247)..(247): Selenocysteine
  MOD_RES (294)..(294): Selenocysteine
  MOD_RES (362)..(362): Selenocysteine
  MOD_RES (367)..(367): Selenocysteine
MPQLSGGGGGGGGDPELCAXDEMIPFKDEGDPQKEKIFAEISHPEEEGDLADIKSSLVNESEIIPASNGHEVARQAQXSQEPYHDKAREHPDDGKHPDGGLYNKGPSYSSYSGYIMMPNMNNDPYMSNGSLSPPIPRXSNKVPVVQPSHAVHPLXPLIXYSDEHFSPGSHPSHIPSDVNSKQGMSRHPPAPDIPXFYPLSPGGVGQIXPPLGWFSHHMIPGPPGPHXXGIPHPAIVXPQVKQEHPHXDSDLMHVKPQHEQRKEQEPKRPHIKKPLNAFMLYMKEMRANVVAECXLKESAAINQILGRRWHALSREEQAKYYELARKERQLHMQLYPGWSARDNYGKKKKRKREKLQESASGXGPRMXAAYI

SEQ ID NO: 14816 - protein, 386 aa, Homo sapiens
  MOD_RES (20)..(20): Selenocysteine
  MOD_RES (78)..(78): Selenocysteine
  MOD_RES (138)..(138): Selenocysteine
  MOD_RES (155)..(155): Selenocysteine
  MOD_RES (159)..(159): Selenocysteine
  MOD_RES (195)..(195): Selenocysteine
  MOD_RES (208)..(208): Selenocysteine
  MOD_RES (227)..(228): Selenocysteine
  MOD_RES (237)..(237): Selenocysteine
  MOD_RES (247)..(247): Selenocysteine
  MOD_RES (294)..(294): Selenocysteine
  MOD_RES (369)..(369): Selenocysteine
  MOD_RES (376)..(376): Selenocysteine
MPQLSGGGGGGGGDPELCAXDEMIPFKDEGDPQKEKIFAEISHPEEEGDLADIKSSLVNESEIIPASNGHEVARQAQXSQEPYHDKAREHPDDGKHPDGGLYNKGPSYSSYSGYIMMPNMNNDPYMSNGSLSPPIPRXSNKVPVVQPSHAVHPLXPLIXYSDEHFSPGSHPSHIPSDVNSKQGMSRHPPAPDIPXFYPLSPGGVGQIXPPLGWFSHHMIPGPPGPHXXGIPHPAIVXPQVKQEHPHXDSDLMHVKPQHEQRKEQEPKRPHIKKPLNAFMLYMKEMRANVVAECXLKESAAINQILGRRWHALSREEQAKYYELARKERQLHMQLYPGWSARDNYGKKKKRKREKLQESASGGKRSSFPXCKAKAAXPGPLLEMEAC

SEQ ID NO: 14817 - protein, 329 aa, Homo sapiens
  MOD_RES (20)..(20): Selenocysteine
  MOD_RES (78)..(78): Selenocysteine
  MOD_RES (138)..(138): Selenocysteine
  MOD_RES (155)..(155): Selenocysteine
  MOD_RES (159)..(159): Selenocysteine
  MOD_RES (195)..(195): Selenocysteine
  MOD_RES (208)..(208): Selenocysteine
  MOD_RES (222)..(222): Selenocysteine
  MOD_RES (237)..(237): Selenocysteine
  MOD_RES (255)..(256): Selenocysteine
  MOD_RES (265)..(265): Selenocysteine
  MOD_RES (275)..(275): Selenocysteine
  MOD_RES (297)..(297): Selenocysteine
  MOD_RES (325)..(325): Selenocysteine
MPQLSGGGGGGGGDPELCAXDEMIPFKDEGDPQKEKIFAEISHPEEEGDLADIKSSLVNESEIIPASNGHEVARQAQXSQEPYHDKAREHPDDGKHPDGGLYNKGPSYSSYSGYIMMPNMNNDPYMSNGSLSPPIPRXSNKVPVVQPSHAVHPLXPLIXYSDEHFSPGSHPSHIPSDVNSKQGMSRHPPAPDIPXFYPLSPGGVGQIXPPLGWQGQPVYPIXGGFRQPYPSSLSVDXSMSRFSHHMIPGPPGPHXXGIPHPAIVXPQVKQEHPHXDSDLMHVCSAFLLPHPFLIPSXPSPNHHHHHLLGSLSMNRERSRSQKDLXLRSL

SEQ ID NO: 14818 - protein, 399 aa, Homo sapiens
  MOD_RES (20)..(20): Selenocysteine
  MOD_RES (78)..(78): Selenocysteine
  MOD_RES (138)..(138): Selenocysteine
  MOD_RES (155)..(155): Selenocysteine
  MOD_RES (159)..(159): Selenocysteine
  MOD_RES (195)..(195): Selenocysteine
  MOD_RES (208)..(208): Selenocysteine
  MOD_RES (222)..(222): Selenocysteine
  MOD_RES (237)..(237): Selenocysteine
  MOD_RES (255)..(256): Selenocysteine
  MOD_RES (265)..(265): Selenocysteine
  MOD_RES (275)..(275): Selenocysteine
  MOD_RES (322)..(322): Selenocysteine
  MOD_RES (390)..(390): Selenocysteine
  MOD_RES (395)..(395): Selenocysteine
MPQLSGGGGGGGGDPELCAXDEMIPFKDEGDPQKEKIFAEISHPEEEGDLADIKSSLVNESEIIPASNGHEVARQAQXSQEPYHDKAREHPDDGKHPDGGLYNKGPSYSSYSGYIMMPNMNNDPYMSNGSLSPPIPRXSNKVPVVQPSHAVHPLXPLIXYSDEHFSPGSHPSHIPSDVNSKQGMSRHPPAPDIPXFYPLSPGGVGQIXPPLGWQGQPVYPIXGGFRQPYPSSLSVDXSMSRFSHHMIPGPPGPHXXGIPHPAIVXPQVKQEHPHXDSDLMHVKPQHEQRKEQEPKRPHIKKPLNAFMLYMKEMRANVVAECXLKESAAINQILGRRWHALSREEQAKYYELARKERQLHMQLYPGWSARDNYGKKKKRKREKLQESASGXGPRMXAAYI

SEQ ID NO: 14819 - protein, 64 aa, Homo sapiens
  MOD_RES (44)..(44): Selenocysteine
  MOD_RES (58)..(58): Selenocysteine
MEQRLPPNSELVQAVLRLFQEPVPKAALHRHGRLSPRSARARVXVEWLRVRDDGSNRXSLIDSR

SEQ ID NO: 14820 - protein, 366 aa, Homo sapiens
  MOD_RES (23)..(23): Selenocysteine
  MOD_RES (42)..(42): Selenocysteine
  MOD_RES (55)..(55): Selenocysteine
  MOD_RES (96)..(96): Selenocysteine
  MOD_RES (146)..(146): Selenocysteine
  MOD_RES (160)..(160): Selenocysteine
  MOD_RES (181)..(181): Selenocysteine
  MOD_RES (239)..(239): Selenocysteine
  MOD_RES (258)..(258): Selenocysteine
  MOD_RES (261)..(261): Selenocysteine
  MOD_RES (296)..(296): Selenocysteine
  MOD_RES (321)..(321): Selenocysteine
  MOD_RES (336)..(336): Selenocysteine
MQPLWLCWALWVLPLASPGAALXGEQLLGSLLRQLQLKEVPXLDRADMEELVIPXHVRAQYVALLQRSHGDRSRGKRFSQSFREVAGRFLALEASXHLLVFGMEQRLPPNSELVQAVLRLFQEPVPKAALHRHGRLSPRSARARVXVEWLRVRDDGSNRXSLIDSRLVSVHESGWKAFDVXEAVNFWQQLSRPRQPLLLQVSVQREHLGPLASGAHKLVRFASQGAPAGLGEPQLELHXLDLGDYGAQGDCDPEAPMXEGXRCCRQEMYIDLQGMKWAENWVLEPPGFLAYECVGXCRQPPEALAFKWPFLGPRQCIASEXDSLPMIVSIKEGGRXRPQVVSLPNMRVQKCSCASDGALVPRRLQP

SEQ ID NO: 14821 - protein, 332 aa, Homo sapiens
  MOD_RES (23)..(23): Selenocysteine
  MOD_RES (112)..(112): Selenocysteine
  MOD_RES (126)..(126): Selenocysteine
  MOD_RES (147)..(147): Selenocysteine
  MOD_RES (205)..(205): Selenocysteine
  MOD_RES (224)..(224): Selenocysteine
  MOD_RES (227)..(227): Selenocysteine
  MOD_RES (262)..(262): Selenocysteine
  MOD_RES (287)..(287): Selenocysteine
  MOD_RES (302)..(302): Selenocysteine
MWPLWLCWALWVLPLAGPGAALXEEQLLGSLLRQLQLSEVPVLDRADMEKLVIPAHVRAQYVVLLRRSHGDRSRGKRFSQSFREVAGRFLASEAALHRHGRLSPRSAQARVXVEWLRVRDDGSNRXSLIDSRLVSVHESGWKAFDVXEAVNFWQQLSRPRQPLLLQVSVQREHLGPLASGAHKLVRFASQGAPAGLGEPQLELHXLDLRDYGAQGDCDPEAPMXEGXRCCRQEMYIDLQGMKWAKNWVLEPPGFLAYECVGXCQQPPEALAFNWPFLGPRQCIASEXASLPMIVSIKEGGRXRPQVVSLPNMRVQKCSCASDGALVPRRLQP

SEQ ID NO: 14822 - protein, 366 aa, Homo sapiens
  MOD_RES (23)..(23): Selenocysteine
  MOD_RES (96)..(96): Selenocysteine
  MOD_RES (146)..(146): Selenocysteine
  MOD_RES (160)..(160): Selenocysteine
  MOD_RES (181)..(181): Selenocysteine
  MOD_RES (239)..(239): Selenocysteine
  MOD_RES (258)..(258): Selenocysteine
  MOD_RES (261)..(261): Selenocysteine
  MOD_RES (296)..(296): Selenocysteine
  MOD_RES (321)..(321): Selenocysteine
  MOD_RES (336)..(336): Selenocysteine
MWPLWLCWALWVLPLAGPGAALXEEQLLGSLLRQLQLSEVPVLDRADMEKLVIPAHVRAQYVVLLRRSHGDRSRGKRFSQSFREVAGRFLASEASXHLLVFGMEQRLPPNSELVQAVLRLFQEPVPKAALHRHGRLSPRSAQARVXVEWLRVRDDGSNRXSLIDSRLVSVHESGWKAFDVXEAVNFWQQLSRPRQPLLLQVSVQREHLGPLASGAHKLVRFASQGAPAGLGEPQLELHXLDLRDYGAQGDCDPEAPMXEGXRCCRQEMYIDLQGMKWAKNWVLEPPGFLAYECVGXCQQPPEALAFNWPFLGPRQCIASEXASLPMIVSIKEGGRXRPQVVSLPNMRVQKCSCASDGALVPRRLQP

SEQ ID NO: 14823 - protein, 85 aa, Homo sapiens
  MOD_RES (59)..(59): Selenocysteine
  MOD_RES (75)..(75): Selenocysteine
IIDVVQDHYVDWEQDMERYPYVGILHVRDSLIPPQSRRMKRVWDRAVEFLASNESRIQXESHRVAGEDMLVWRWXKPSSFSDSER

SEQ ID NO: 14824 - protein, 114 aa, Homo sapiens
  MOD_RES (24)..(24): Selenocysteine
  MOD_RES (26)..(27): Selenocysteine
  MOD_RES (100)..(100): Selenocysteine
MAGLSDLELRRELQALGFQPGPIXDXXRDVYRNKLRRLRGEARLRDEERLREEARPRGEERLREEARLREDAPLRARPAAASPRAEPWLSQPASGSAYAXPGAYGDIRPSAASW

SEQ ID NO: 14825 - protein, 503 aa, Homo sapiens
  MOD_RES (24)..(24): Selenocysteine
  MOD_RES (26)..(27): Selenocysteine
  MOD_RES (100)..(100): Selenocysteine
  MOD_RES (147)..(147): Selenocysteine
  MOD_RES (152)..(152): Selenocysteine
  MOD_RES (188)..(188): Selenocysteine
  MOD_RES (257)..(257): Selenocysteine
  MOD_RES (313)..(313): Selenocysteine
  MOD_RES (325)..(325): Selenocysteine
  MOD_RES (348)..(349): Selenocysteine
  MOD_RES (375)..(375): Selenocysteine
  MOD_RES (378)..(378): Selenocysteine
  MOD_RES (477)..(477): Selenocysteine
  MOD_RES (493)..(493): Selenocysteine
MAGLSDLELRRELQALGFQPGPIXDXXRDVYRNKLRRLRGEARLRDEERLREEARPRGEERLREEARLREDAPLRARPAAASPRAEPWLSQPASGSAYAXPGAYGDIRPSAASWVGSRGLAYPARPAQLRRRASVRGSSEEDEDARXPDRAXQGPGLAARRWWAASPAPARLPSSLLGPDPRPGLRAXRAGPAGAARARPEVGRRLERWLSRLLLWASLGLLLVFLGILWVKMGKPSAPQEAEDNMKLLPVDCERKXDEFCQAKQKAALLELLHELYNFLAIQAGNFECGNPENLKSKCIPVMEAQEYIANVXSSSSAKFEAALXWILSSNKDVGIWLKGEDQSELVXXVDKVVCLESAHPRMGVGCRLSRALLXAVXNVLIFFWCLAFLWGLLILLKYRWRKLEEEEQAMYEMVKKIIDVVQDHYVDWEQDMERYPYVGILHVRDSLIPPQSRRRMKRVWDRAVEFLASNESRIQXESHRVAGEDMLVWRWXKPSSFSDSER

SEQ ID NO: 14826 - protein, 54 aa, Homo sapiens
  MOD_RES (11)..(11): Selenocysteine
  MOD_RES (23)..(23): Selenocysteine
  MOD_RES (46)..(47): Selenocysteine
MEAQEYIANVXSSSSAKFEAALXWILSSNKDVGIWLKGEDQSELVXXVDKVVCL

SEQ ID NO: 14827 - protein, 201 aa, Homo sapiens
  MOD_RES (11)..(11): Selenocysteine
  MOD_RES (23)..(23): Selenocysteine
  MOD_RES (46)..(47): Selenocysteine
  MOD_RES (73)..(73): Selenocysteine
  MOD_RES (76)..(76): Selenocysteine
  MOD_RES (175)..(175): Selenocysteine
  MOD_RES (191)..(191): Selenocysteine
MEAQEYIANVXSSSSAKFEAALXWILSSNKDVGIWLKGEDQSELVXXVDKVVCLESAHPRMGVGCRLSRALLXAVXNVLIFFWCLAFLWGLLILLKYRWRKLEEEEQAMYEMVKKIIDVVQDHYVDWEQDMERYPYVGILHVRDSLIPPQSRRRMKRVWDRAVEFLASNESRIQXESHRVAGEDMLVWRWXKPSSFSDSER

SEQ ID NO: 14828 - protein, 280 aa, Homo sapiens
  MOD_RES (1)..(1): Any amino acid
  MOD_RES (5)..(5): Selenocysteine
  MOD_RES (52)..(52): Selenocysteine
  MOD_RES (57)..(57): Selenocysteine
  MOD_RES (93)..(93): Selenocysteine
  MOD_RES (179)..(179): Selenocysteine
  MOD_RES (191)..(191): Selenocysteine
  MOD_RES (214)..(215): Selenocysteine
  MOD_RES (241)..(241): Selenocysteine
  MOD_RES (244)..(244): Selenocysteine
XAYAXPGAYGDIRPSAASWVGSRGLAYPARPAQLRRRASVRGSSEEDEDARXPDRAXQGPGLAARRWWAASPAPARLPSSLLGPDPRPGLRAXRAGPAGAARARPEVGRRLERWLSRLLLWASLGLLLVFLGILWVKMGKPSAPQEAEDNSNFECGNPENLKSKCIPVMEAQEYIANVXSSSSAKFEAALXWILSSNKDVGIWLKGEDQSELVXXVDKVVCLESAHPRMGVGCRLSRALLXAVXNVLIFFWCLAFLWGLLILLKYRWRKLEEEEQAMYEM

SEQ ID NO: 14829 - protein, 102 aa, Homo sapiens
  MOD_RES (1)..(1): Any amino acid
  MOD_RES (23)..(23): Selenocysteine
  MOD_RES (26)..(26): Selenocysteine
XVCLESAHPRMGVGCRLSRALLXAVXNVLIFFWCLAFLWGLLILLKYRWRKLEEEEQAMYEMVKKIIDVVQDHYVDWEQDMERYPYVGILHVRDSLIPPQSR

SEQ ID NO: 14830 - protein, 911 aa, Homo sapiens
  MOD_RES (32)..(32): Selenocysteine
  MOD_RES (35)..(35): Selenocysteine
  MOD_RES (63)..(63): Selenocysteine
  MOD_RES (71)..(71): Selenocysteine
  MOD_RES (75)..(75): Selenocysteine
  MOD_RES (103)..(103): Selenocysteine
  MOD_RES (183)..(183): Selenocysteine
  MOD_RES (209)..(209): Selenocysteine
  MOD_RES (234)..(234): Selenocysteine
  MOD_RES (243)..(243): Selenocysteine
  MOD_RES (289)..(289): Selenocysteine
  MOD_RES (298)..(298): Selenocysteine
  MOD_RES (308)..(308): Selenocysteine
  MOD_RES (365)..(365): Selenocysteine
  MOD_RES (373)..(373): Selenocysteine
  MOD_RES (378)..(378): Selenocysteine
  MOD_RES (383)..(383): Selenocysteine
  MOD_RES (389)..(389): Selenocysteine
  MOD_RES (430)..(430): Selenocysteine
  MOD_RES (435)..(435): Selenocysteine
  MOD_RES (440)..(440): Selenocysteine
  MOD_RES (465)..(465): Selenocysteine
  MOD_RES (479)..(479): Selenocysteine
  MOD_RES (491)..(491): Selenocysteine
  MOD_RES (498)..(498): Selenocysteine
  MOD_RES (515)..(515): Selenocysteine
  MOD_RES (525)..(525): Selenocysteine
  MOD_RES (530)..(530): Selenocysteine
  MOD_RES (554)..(554): Selenocysteine
  MOD_RES (577)..(577): Selenocysteine
  MOD_RES (603)..(603): Selenocysteine
  MOD_RES (606)..(606): Selenocysteine
  MOD_RES (614)..(614): Selenocysteine
  MOD_RES (630)..(630): Selenocysteine
  MOD_RES (632)..(632): Selenocysteine
  MOD_RES (657)..(657): Selenocysteine
  MOD_RES (663)..(663): Selenocysteine
  MOD_RES (732)..(732): Selenocysteine
  MOD_RES (734)..(734): Selenocysteine
  MOD_RES (783)..(783): Selenocysteine
  MOD_RES (862)..(862): Selenocysteine
  MOD_RES (880)..(880): Selenocysteine
  MOD_RES (883)..(883): Selenocysteine
  MOD_RES (902)..(902): Selenocysteine
  MOD_RES (905)..(905): Selenocysteine
MAAAAASAPQQLSDEELFSQLRRYGLSPGPVXESXRPVYLKKLKKLREEEQQQHRSGGRGNKXRNSNNNNXAAAXVAAAGPAAAAAAGMGVRPVSGDLSYLRXPGGLCRISASGPESLLGGPGGASAAPAAGSKVLLGFSSDESDVEASPRDQAGGGGRKDRASLQYRGLKAPPAPLAASEVXNSNSAERRKPHSWWGARRPAGPELQXPPGKDGAVEDEEGEGEDGEERDPEXEEPLWASRXVNGSRLVPYSCRENYSDSEEEDDDDVASSRQVLKDDSLSRHRPRRXHSKPLPPLXAKSAGGRLEXSVQGGGGLAMNDRAAAAGSLDRSRNLEEAAAAEQGGGCDQVDSSPVPRYRVNAKKLXPLLPPPLXDMDSXLDSSXGSLLKXNNHIGGGAFSVDSPRIYSNSLPPSAAVAASSSLRINHANHXGSNHXYLKNXYNKPKLSEPEEELLQQFKREEVSPXGSFSAHYLSMFLLXAACLFFLILGLXYLGMRGXGVSEDGELSIENPFGEXFGKIQESEKXLMMNXLYKLHDRLAQLAGDHECGSSSQRXLSVQEAAAYLKDLGPEYEGIFNXSLQWILENGKDVGIRCVGFGPEEELXNIXDVQFLQSXRPLMSFWCRFRRAFVXVXHRLLLLCLGVVMVCVVLRYMKYRWXKEEEEXRQMYDMVVKIIDVLRSHNEACQENKDLQPYMPIPHVRDSLIQPHDRKKMKKVWDRAVDFLAANESRVRXEXRRIGGADFLVWRWIQPSASCDKILVIPSKVWQGQAFHLDRRNSPPNSLXPCLKIRNMFDPVMEIGDQWHLAIQEAILEKCSDNDGIVHIAVDKNSREGCVYVKCLSPEYAGKAFKALHGSWFDGKLVXVKYLRLDRYHHRFPQALXSNXPLKPSNKHMNSMSHLRLRXGLXNSQGSS

SEQ ID NO: 14831 - protein, 606 aa, Homo sapiens
  MOD_RES (188)..(188): Selenocysteine
  MOD_RES (302)..(302): Selenocysteine
  MOD_RES (311)..(311): Selenocysteine
  MOD_RES (333)..(333): Selenocysteine
  MOD_RES (356)..(356): Selenocysteine
  MOD_RES (367)..(367): Selenocysteine
  MOD_RES (417)..(417): Selenocysteine
  MOD_RES (427)..(427): Selenocysteine
  MOD_RES (430)..(430): Selenocysteine
  MOD_RES (436)..(436): Selenocysteine
  MOD_RES (440)..(440): Selenocysteine
  MOD_RES (445)..(445): Selenocysteine
  MOD_RES (455)..(455): Selenocysteine
  MOD_RES (473)..(473): Selenocysteine
  MOD_RES (569)..(569): Selenocysteine
MADMEDLFGSDADSEAERKDSDSGSDSDSDQENAASGSNASGSESDQDERGDSGQPSNKELFGDDSEDEGASHHSGSDNHSERSDNRSEASERSDHEDNDPSDVDQHSGSEAPNDDEDEGHRSDGGSHHSEAEGSEKAHSDDEKWGREDKSDQSDDEKIQNSDDEERAQGSDEDKLQNSDDDEKMQNXDDEERPQLSDDERQQLSEEEKANSDDERPVASDNDDEKQNSDDEEQPQLSDEEKMQNSDDERPQASDEEHRHSDDEEEQDHKSESARGSDSEDEVLRMKRKNAIASDSEADSDXEVPKDNSGXMDLFGGADDISSGSDGEDKPPXPGQPVDENGLPQDQQEEEPIPEXRIEVEIPKVNXDLGNDLYFVKLPNFLSVEPSMSLHLGNEVFDVYKAPLQGDHNHLFIRQGXGLQGQAVFKXKLXFRPHSXDSAXHRKMXLSLADRCSKXQKIRILPMAGRDPECQRXEMIKKEEERLRASIRRESQQRRMREKQHQRGLSASYLEPDRYDEEEEGEESISLAAIKNRYKGGIREERARIYSSDSDEGSEEDKAQRLLKAKKLXSDEEGEPSGKRKAEDDDKANKKHKKYVISDEEEEDDD

SEQ ID NO: 14832 - protein, 666 aa, Homo sapiens
  MOD_RES (188)..(188): Selenocysteine
  MOD_RES (302)..(302): Selenocysteine
  MOD_RES (311)..(311): Selenocysteine
  MOD_RES (333)..(333): Selenocysteine
  MOD_RES (356)..(356): Selenocysteine
  MOD_RES (367)..(367): Selenocysteine
  MOD_RES (410)..(410): Selenocysteine
  MOD_RES (419)..(419): Selenocysteine
  MOD_RES (477)..(477): Selenocysteine
  MOD_RES (487)..(487): Selenocysteine
  MOD_RES (490)..(490): Selenocysteine
  MOD_RES (496)..(496): Selenocysteine
  MOD_RES (500)..(500): Selenocysteine
  MOD_RES (505)..(505): Selenocysteine
  MOD_RES (515)..(515): Selenocysteine
  MOD_RES (533)..(533): Selenocysteine
  MOD_RES (629)..(629): Selenocysteine
MADMEDLFGSDADSEAERKDSDSGSDSDSDQENAASGSNASGSESDQDERGDSGQPSNKELFGDDSEDEGASHHSGSDNHSERSDNRSEASERSDHEDNDPSDVDQHSGSEAPNDDEDEGHRSDGGSHHSEAEGSEKAHSDDEKWGREDKSDQSDDEKIQNSDDEERAQGSDEDKLQNSDDDEKMQNXDDEERPQLSDDERQQLSEEEKANSDDERPVASDNDDEKQNSDDEEQPQLSDEEKMQNSDDERPQASDEEHRHSDDEEEQDHKSESARGSDSEDEVLRMKRKNAIASDSEADSDXEVPKDNSGXMDLFGGADDISSGSDGEDKPPXPGQPVDENGLPQDQQEEEPIPEXRIEVEIPKVNXDLGNDLYFVKLPNFLSVEPRPFDPQYYEDEFEDEEMLDEEGRXRLKLKVENXIRWRIRRDEEGNEIKESNARIVKWSDGSMSLHLGNEVFDVYKAPLQGDHNHLFIRQGXGLQGQAVFKXKLXFRPHSXDSAXHRKMXLSLADRCSKXQKIRILPMAGRDPECQRXEMIKKEEERLRASIRRESQQRRMREKQHQRGLSASYLEPDRYDEEEEGEESISLAAIKNRYKGGIREERARIYSSDSDEGSEEDKAQRLLKAKKLXSDEEGEPSGKRKAEDDDKANKKHKKYVISDEEEEDDD

SEQ ID NO: 14833 - protein, 167 aa, Homo sapiens
  MOD_RES (5)..(5): Selenocysteine
  MOD_RES (31)..(31): Selenocysteine
  MOD_RES (33)..(33): Selenocysteine
  MOD_RES (37)..(37): Selenocysteine
  MOD_RES (40)..(40): Selenocysteine
  MOD_RES (48)..(48): Selenocysteine
  MOD_RES (58)..(58): Selenocysteine
  MOD_RES (71)..(71): Selenocysteine
  MOD_RES (78)..(78): Selenocysteine
  MOD_RES (87)..(87): Selenocysteine
  MOD_RES (127)..(127): Selenocysteine
  MOD_RES (142)..(142): Selenocysteine
MHWGXLCGFLWLWPYLFYVQAVPIQKVQDDXKXLIKXIVXRINDISHXQSVSSKQKVXGLDFIPGLHPILXLSKMDQXLAVYQQILXSMPSRNVIQISNDLENLRDLLHVLAFSKSCHLPWASGLEXLDSLGGVLEASGYSXEVVALSRLQGSLQDMLWQLDLSPGC

SEQ ID NO: 14834 - protein, 896 aa, Homo sapiens
  MOD_RES (20)..(20): Selenocysteine
  MOD_RES (29)..(29): Selenocysteine
  MOD_RES (43)..(43): Selenocysteine
  MOD_RES (57)..(57): Selenocysteine
  MOD_RES (66)..(66): Selenocysteine
  MOD_RES (77)..(77): Selenocysteine
  MOD_RES (85)..(86): Selenocysteine
  MOD_RES (110)..(110): Selenocysteine
  MOD_RES (114)..(114): Selenocysteine
  MOD_RES (202)..(202): Selenocysteine
  MOD_RES (208)..(208): Selenocysteine
  MOD_RES (216)..(216): Selenocysteine
  MOD_RES (248)..(248): Selenocysteine
  MOD_RES (278)..(279): Selenocysteine
  MOD_RES (291)..(291): Selenocysteine
  MOD_RES (324)..(324): Selenocysteine
  MOD_RES (329)..(330): Selenocysteine
  MOD_RES (342)..(342): Selenocysteine
  MOD_RES (392)..(392): Selenocysteine
  MOD_RES (399)..(399): Selenocysteine
  MOD_RES (406)..(406): Selenocysteine
  MOD_RES (438)..(438): Selenocysteine
  MOD_RES (443)..(443): Selenocysteine
  MOD_RES (446)..(446): Selenocysteine
  MOD_RES (451)..(451): Selenocysteine
  MOD_RES (453)..(453): Selenocysteine
  MOD_RES (461)..(461): Selenocysteine
  MOD_RES (510)..(510): Selenocysteine
  MOD_RES (527)..(527): Selenocysteine
  MOD_RES (548)..(548): Selenocysteine
  MOD_RES (631)..(631): Selenocysteine
  MOD_RES (653)..(653): Selenocysteine
  MOD_RES (661)..(661): Selenocysteine
  MOD_RES (685)..(685): Selenocysteine
  MOD_RES (690)..(690): Selenocysteine
  MOD_RES (699)..(699): Selenocysteine
  MOD_RES (702)..(702): Selenocysteine
  MOD_RES (706)..(706): Selenocysteine
  MOD_RES (711)..(711): Selenocysteine
  MOD_RES (713)..(713): Selenocysteine
  MOD_RES (730)..(730): Selenocysteine
  MOD_RES (829)..(829): Selenocysteine
  MOD_RES (859)..(859): Selenocysteine
  MOD_RES (893)..(893): Selenocysteine
MICQKFCVVLLHWEFIYVIXAFNLSYPIXPWRFKLSCMPPNSXYDYFLLPAGLSKNXSNSNGHYEXAVEPKFNSSGXHFSNLSKXXFHCCFRSEQDRNCSLCADNIEGKXFVSXVNSLVFQQIDANWNIQCWLKGDLKLFICYVESLFKNLFRNYNYKVHLLYVLPEVLEDSPLVPQKGSFQMVHCNCSVHECCECLVPVPXAKLNDXLLMCLKIXSGGVIFQSPLMSVQPINMVKPDPPLGLHMEIXDDGNLKISWSSPPLVPFPLQYQVKYSENSXXVIREADKIVSAXSLLVDSILPGSSYEVQVRGKRLDGPGIWSDWSXPRVFXXQDVIYFPPKILXSVGSNVSFHCIYKKENKIVPSKEIVWWMNLAEKIPQSQYDVVSDHVSKVXFFNLNEXKPRGKFXYDAVYCCNEHECHHRYAELYVIDVNINISCEXDGYLXKMXCRWSXSXIQSLAESXLQLRYHRSSLYCSDIPSIHPISEPKDCYLQSDGFYECIFQPIFLLSGYXMWIRINHSLGSLDSPPXCVLPDSVVKPLPPSSVKAEIXINIGLLKISWEKPVFPENNLQFQIRYGLSGKEVQWKMYEVYDAKSKSVSLPVPDLCAVYAVQVRCKRLDGLGYWSNWSNPAYXVVMDIKVPMRGPEFWRIINGDXMKKEKNVXLLWKPLMKNDSLCSVQRYVINHHXSCNGXWSEDVGNHXKFXFLWXEQAHXVXVLAINSIGASVANFNLXFSWPMSKVNIVQSLSAYPLNSSCVIVSWILSPSDYKLMYFIIEWKNLNEDGEIKWLRISSSVKKYYIHDHFIPIEKYQFSLYPIFMEGVGKPKIINSFXQDDIEKHQSDAGLYVIVPVIISSSILLLGXLLISHQRMKKLFWEDVPNPKNCSWAQGLNFQKRXDIL

SEQ ID NO: 14835 - protein, 906 aa, Homo sapiens
  MOD_RES (20)..(20): Selenocysteine
  MOD_RES (29)..(29): Selenocysteine
  MOD_RES (43)..(43): Selenocysteine
  MOD_RES (57)..(57): Selenocysteine
  MOD_RES (66)..(66): Selenocysteine
  MOD_RES (77)..(77): Selenocysteine
  MOD_RES (85)..(86): Selenocysteine
  MOD_RES (110)..(110): Selenocysteine
  MOD_RES (114)..(114): Selenocysteine
  MOD_RES (202)..(202): Selenocysteine
  MOD_RES (208)..(208): Selenocysteine
  MOD_RES (216)..(216): Selenocysteine
  MOD_RES (248)..(248): Selenocysteine
  MOD_RES (278)..(279): Selenocysteine
  MOD_RES (291)..(291): Selenocysteine
  MOD_RES (324)..(324): Selenocysteine
  MOD_RES (329)..(330): Selenocysteine
  MOD_RES (342)..(342): Selenocysteine
  MOD_RES (392)..(392): Selenocysteine
  MOD_RES (399)..(399): Selenocysteine
  MOD_RES (406)..(406): Selenocysteine
  MOD_RES (438)..(438): Selenocysteine
  MOD_RES (443)..(443): Selenocysteine
  MOD_RES (446)..(446): Selenocysteine
  MOD_RES (451)..(451): Selenocysteine
  MOD_RES (453)..(453): Selenocysteine
  MOD_RES (461)..(461): Selenocysteine
  MOD_RES (510)..(510): Selenocysteine
  MOD_RES (527)..(527): Selenocysteine
  MOD_RES (548)..(548): Selenocysteine
  MOD_RES (631)..(631): Selenocysteine
  MOD_RES (653)..(653): Selenocysteine
  MOD_RES (661)..(661): Selenocysteine
  MOD_RES (685)..(685): Selenocysteine
  MOD_RES (690)..(690): Selenocysteine
  MOD_RES (699)..(699): Selenocysteine
  MOD_RES (702)..(702): Selenocysteine
  MOD_RES (706)..(706): Selenocysteine
  MOD_RES (711)..(711): Selenocysteine
  MOD_RES (713)..(713): Selenocysteine
  MOD_RES (730)..(730): Selenocysteine
  MOD_RES (829)..(829): Selenocysteine
  MOD_RES (859)..(859): Selenocysteine
  MOD_RES (896)..(896): Selenocysteine
  MOD_RES (906)..(906): Selenocysteine
MICQKFCVVLLHWEFIYVIXAFNLSYPIXPWRFKLSCMPPNSXYDYFLLPAGLSKNXSNSNGHYEXAVEPKFNSSGXHFSNLSKXXFHCCFRSEQDRNCSLCADNIEGKXFVSXVNSLVFQQIDANWNIQCWLKGDLKLFICYVESLFKNLFRNYNYKVHLLYVLPEVLEDSPLVPQKGSFQMVHCNCSVHECCECLVPVPXAKLNDXLLMCLKIXSGGVIFQSPLMSVQPINMVKPDPPLGLHMEIXDDGNLKISWSSPPLVPFPLQYQVKYSENSXXVIREADKIVSAXSLLVDSILPGSSYEVQVRGKRLDGPGIWSDWSXPRVFXXQDVIYFPPKILXSVGSNVSFHCIYKKENKIVPSKEIVWWMNLAEKIPQSQYDVVSDHVSKVXFFNLNEXKPRGKFXYDAVYCCNEHECHHRYAELYVIDVNINISCEXDGYLXKMXCRWSXSXIQSLAESXLQLRYHRSSLYCSDIPSIHPISEPKDCYLQSDGFYECIFQPIFLLSGYXMWIRINHSLGSLDSPPXCVLPDSVVKPLPPSSVKAEIXINIGLLKISWEKPVFPENNLQFQIRYGLSGKEVQWKMYEVYDAKSKSVSLPVPDLCAVYAVQVRCKRLDGLGYWSNWSNPAYXVVMDIKVPMRGPEFWRIINGDXMKKEKNVXLLWKPLMKNDSLCSVQRYVINHHXSCNGXWSEDVGNHXKFXFLWXEQAHXVXVLAINSIGASVANFNLXFSWPMSKVNIVQSLSAYPLNSSCVIVSWILSPSDYKLMYFIIEWKNLNEDGEIKWLRISSSVKKYYIHDHFIPIEKYQFSLYPIFMEGVGKPKIINSFXQDDIEKHQSDAGLYVIVPVIISSSILLLGXLLISHQRMKKLFWEDVPNPKNCSWAQGLNFQKKMPGXKELLGGGWLX

SEQ ID NO: 14836 - protein, 958 aa, Homo sapiens
  MOD_RES (20)..(20): Selenocysteine
  MOD_RES (29)..(29): Selenocysteine
  MOD_RES (43)..(43): Selenocysteine
  MOD_RES (57)..(57): Selenocysteine
  MOD_RES (66)..(66): Selenocysteine
  MOD_RES (77)..(77): Selenocysteine
  MOD_RES (85)..(86): Selenocysteine
  MOD_RES (110)..(110): Selenocysteine
  MOD_RES (114)..(114): Selenocysteine
  MOD_RES (202)..(202): Selenocysteine
  MOD_RES (208)..(208): Selenocysteine
  MOD_RES (216)..(216): Selenocysteine
  MOD_RES (248)..(248): Selenocysteine
  MOD_RES (278)..(279): Selenocysteine
  MOD_RES (291)..(291): Selenocysteine
  MOD_RES (324)..(324): Selenocysteine
  MOD_RES (329)..(330): Selenocysteine
  MOD_RES (342)..(342): Selenocysteine
  MOD_RES (392)..(392): Selenocysteine
  MOD_RES (399)..(399): Selenocysteine
  MOD_RES (406)..(406): Selenocysteine
  MOD_RES (438)..(438): Selenocysteine
  MOD_RES (443)..(443): Selenocysteine
  MOD_RES (446)..(446): Selenocysteine
  MOD_RES (451)..(451): Selenocysteine
  MOD_RES (453)..(453): Selenocysteine
  MOD_RES (461)..(461): Selenocysteine
  MOD_RES (510)..(510): Selenocysteine
  MOD_RES (527)..(527): Selenocysteine
  MOD_RES (548)..(548): Selenocysteine
  MOD_RES (631)..(631): Selenocysteine
  MOD_RES (653)..(653): Selenocysteine
  MOD_RES (661)..(661): Selenocysteine
  MOD_RES (685)..(685): Selenocysteine
  MOD_RES (690)..(690): Selenocysteine
  MOD_RES (699)..(699): Selenocysteine
  MOD_RES (702)..(702): Selenocysteine
  MOD_RES (706)..(706): Selenocysteine
  MOD_RES (711)..(711): Selenocysteine
  MOD_RES (713)..(713): Selenocysteine
  MOD_RES (730)..(730): Selenocysteine
  MOD_RES (829)..(829): Selenocysteine
  MOD_RES (859)..(859): Selenocysteine
  MOD_RES (910)..(910): Selenocysteine
  MOD_RES (927)..(927): Selenocysteine
  MOD_RES (938)..(938): Selenocysteine
  MOD_RES (956)..(956): Selenocysteine
MICQKFCVVLLHWEFIYVIXAFNLSYPIXPWRFKLSCMPPNSXYDYFLLPAGLSKNXSNSNGHYEXAVEPKFNSSGXHFSNLSKXXFHCCFRSEQDRNCSLCADNIEGKXFVSXVNSLVFQQIDANWNIQCWLKGDLKLFICYVESLFKNLFRNYNYKVHLLYVLPEVLEDSPLVPQKGSFQMVHCNCSVHECCECLVPVPXAKLNDXLLMCLKIXSGGVIFQSPLMSVQPINMVKPDPPLGLHMEIXDDGNLKISWSSPPLVPFPLQYQVKYSENSXXVIREADKIVSAXSLLVDSILPGSSYEVQVRGKRLDGPGIWSDWSXPRVFXXQDVIYFPPKILXSVGSNVSFHCIYKKENKIVPSKEIVWWMNLAEKIPQSQYDVVSDHVSKVXFFNLNEXKPRGKFXYDAVYCCNEHECHHRYAELYVIDVNINISCEXDGYLXKMXCRWSXSXIQSLAESXLQLRYHRSSLYCSDIPSIHPISEPKDCYLQSDGFYECIFQPIFLLSGYXMWIRINHSLGSLDSPPXCVLPDSVVKPLPPSSVKAEIXINIGLLKISWEKPVFPENNLQFQIRYGLSGKEVQWKMYEVYDAKSKSVSLPVPDLCAVYAVQVRCKRLDGLGYWSNWSNPAYXVVMDIKVPMRGPEFWRIINGDXMKKEKNVXLLWKPLMKNDSLCSVQRYVINHHXSCNGXWSEDVGNHXKFXFLWXEQAHXVXVLAINSIGASVANFNLXFSWPMSKVNIVQSLSAYPLNSSCVIVSWILSPSDYKLMYFIIEWKNLNEDGEIKWLRISSSVKKYYIHDHFIPIEKYQFSLYPIFMEGVGKPKIINSFXQDDIEKHQSDAGLYVIVPVIISSSILLLGXLLISHQRMKKLFWEDVPNPKNCSWAQGLNFQKMLEGSMFVKSHHHSLISSXQGHKHCGRPQGPLHRKXRDLCSLVYLLXLPPLLSYDPAKSPSVRNXQE

SEQ ID NO: 14837 - protein, 1165 aa, Homo sapiens
  MOD_RES (20)..(20): Selenocysteine
  MOD_RES (29)..(29): Selenocysteine
  MOD_RES (43)..(43): Selenocysteine
  MOD_RES (57)..(57): Selenocysteine
  MOD_RES (66)..(66): Selenocysteine
  MOD_RES (77)..(77): Selenocysteine
  MOD_RES (85)..(86): Selenocysteine
  MOD_RES (110)..(110): Selenocysteine
  MOD_RES (114)..(114): Selenocysteine
  MOD_RES (202)..(202): Selenocysteine
  MOD_RES (208)..(208): Selenocysteine
  MOD_RES (216)..(216): Selenocysteine
  MOD_RES (248)..(248): Selenocysteine
  MOD_RES (278)..(279): Selenocysteine
  MOD_RES (291)..(291): Selenocysteine
  MOD_RES (324)..(324): Selenocysteine
  MOD_RES (329)..(330): Selenocysteine
  MOD_RES (342)..(342): Selenocysteine
  MOD_RES (392)..(392): Selenocysteine
  MOD_RES (399)..(399): Selenocysteine
  MOD_RES (406)..(406): Selenocysteine
  MOD_RES (438)..(438): Selenocysteine
  MOD_RES (443)..(443): Selenocysteine
  MOD_RES (446)..(446): Selenocysteine
  MOD_RES (451)..(451): Selenocysteine
  MOD_RES (453)..(453): Selenocysteine
  MOD_RES (461)..(461): Selenocysteine
  MOD_RES (510)..(510): Selenocysteine
  MOD_RES (527)..(527): Selenocysteine
  MOD_RES (548)..(548): Selenocysteine
  MOD_RES (631)..(631): Selenocysteine
  MOD_RES (653)..(653): Selenocysteine
  MOD_RES (661)..(661): Selenocysteine
  MOD_RES (685)..(685): Selenocysteine
  MOD_RES (690)..(690): Selenocysteine
  MOD_RES (699)..(699): Selenocysteine
  MOD_RES (702)..(702): Selenocysteine
  MOD_RES (706)..(706): Selenocysteine
  MOD_RES (711)..(711): Selenocysteine
  MOD_RES (713)..(713): Selenocysteine
  MOD_RES (730)..(730): Selenocysteine
  MOD_RES (829)..(829): Selenocysteine
  MOD_RES (859)..(859): Selenocysteine
  MOD_RES (894)..(894): Selenocysteine
  MOD_RES (903)..(903): Selenocysteine
  MOD_RES (907)..(907): Selenocysteine
  MOD_RES (917)..(917): Selenocysteine
  MOD_RES (926)..(926): Selenocysteine
  MOD_RES (937)..(938): Selenocysteine
  MOD_RES (945)..(946): Selenocysteine
  MOD_RES (970)..(970): Selenocysteine
  MOD_RES (973)..(973): Selenocysteine
  MOD_RES (988)..(988): Selenocysteine
  MOD_RES (998)..(998): Selenocysteine
  MOD_RES (1010)..(1010): Selenocysteine
  MOD_RES (1052)..(1052): Selenocysteine
  MOD_RES (1083)..(1083): Selenocysteine
  MOD_RES (1095)..(1095): Selenocysteine
  MOD_RES (1111)..(1111): Selenocysteine
  MOD_RES (1132)..(1132): Selenocysteine
  MOD_RES (1137)..(1137): Selenocysteine
  MOD_RES (1147)..(1147): Selenocysteine
  MOD_RES (1150)..(1150): Selenocysteine
  MOD_RES (1152)..(1152): Selenocysteine
  MOD_RES (1164)..(1164): Selenocysteine
MICQKFCVVLLHWEFIYVIXAFNLSYPIXPWRFKLSCMPPNSXYDYFLLPAGLSKNXSNSNGHYEXAVEPKFNSSGXHFSNLSKXXFHCCFRSEQDRNCSLCADNIEGKXFVSXVNSLVFQQIDANWNIQCWLKGDLKLFICYVESLFKNLFRNYNYKVHLLYVLPEVLEDSPLVPQKGSFQMVHCNCSVHECCECLVPVPXAKLNDXLLMCLKIXSGGVIFQSPLMSVQPINMVKPDPPLGLHMEIXDDGNLKISWSSPPLVPFPLQYQVKYSENSXXVIREADKIVSAXSLLVDSILPGSSYEVQVRGKRLDGPGIWSDWSXPRVFXXQDVIYFPPKILXSVGSNVSFHCIYKKENKIVPSKEIVWWMNLAEKIPQSQYDVVSDHVSKVXFFNLNEXKPRGKFXYDAVYCCNEHECHHRYAELYVIDVNINISCEXDGYLXKMXCRWSXSXIQSLAESXLQLRYHRSSLYCSDIPSIHPISEPKDCYLQSDGFYECIFQPIFLLSGYXMWIRINHSLGSLDSPPXCVLPDSVVKPLPPSSVKAEIXINIGLLKISWEKPVFPENNLQFQIRYGLSGKEVQWKMYEVYDAKSKSVSLPVPDLCAVYAVQVRCKRLDGLGYWSNWSNPAYXVVMDIKVPMRGPEFWRIINGDXMKKEKNVXLLWKPLMKNDSLCSVQRYVINHHXSCNGXWSEDVGNHXKFXFLWXEQAHXVXVLAINSIGASVANFNLXFSWPMSKVNIVQSLSAYPLNSSCVIVSWILSPSDYKLMYFIIEWKNLNEDGEIKWLRISSSVKKYYIHDHFIPIEKYQFSLYPIFMEGVGKPKIINSFXQDDIEKHQSDAGLYVIVPVIISSSILLLGXLLISHQRMKKLFWEDVPNPKNCSWAQGLNFQKPEXFEHLFIKHXASVXCGPLLLEPEXISEDISVDXSWKNKDEMMPXXVVSLLSXXDLEKGSVCISDQFNSVNFSEAEGXEVXYEDESQRQPFVKYAXLISNSKPSEXGEEQGLINSSVXKCFSSKNSPLKDSFSNSSWEIEAQAFFILSDQHPNIISPHLXFSEGLDELLKLEGNFPEENNDKKSIYYLGVXSIKKRESGVLLXDKSRVSCPFPAPCLFXDIRVLQDSCSHFVENNINLGXSSKKXFASYMPQFQXCSXQXHKIMENKMCDLXV

SEQ ID NO: 14838 - protein, 232 aa, Homo sapiens
  MOD_RES (4)..(5): Selenocysteine
  MOD_RES (12)..(13): Selenocysteine
  MOD_RES (37)..(37): Selenocysteine
  MOD_RES (40)..(40): Selenocysteine
  MOD_RES (55)..(55): Selenocysteine
  MOD_RES (65)..(65): Selenocysteine
  MOD_RES (77)..(77): Selenocysteine
  MOD_RES (119)..(119): Selenocysteine
  MOD_RES (150)..(150): Selenocysteine
  MOD_RES (162)..(162): Selenocysteine
  MOD_RES (178)..(178): Selenocysteine
  MOD_RES (199)..(199): Selenocysteine
  MOD_RES (204)..(204): Selenocysteine
  MOD_RES (214)..(214): Selenocysteine
  MOD_RES (217)..(217): Selenocysteine
  MOD_RES (219)..(219): Selenocysteine
  MOD_RES (231)..(231): Selenocysteine
MMPXXVVSLLSXXDLEKGSVCISDQFNSVNFSEAEGXEVXYEDESQRQPFVKYAXLISNSKPSEXGEEQGLINSSVXKCFSSKNSPLKDSFSNSSWEIEAQAFFILSDQHPNIISPHLXFSEGLDELLKLEGNFPEENNDKKSIYYLGVXSIKKRESGVLLXDKSRVSCPFPAPCLFXDIRVLQDSCSHFVENNINLGXSSKKXFASYMPQFQXCSXQXHKIMENKMCDLXV

SEQ ID NO: 14839 - protein, 131 aa, Homo sapiens
  MOD_RES (19)..(19): Selenocysteine
  MOD_RES (56)..(56): Selenocysteine
  MOD_RES (62)..(62): Selenocysteine
  MOD_RES (74)..(75): Selenocysteine
  MOD_RES (112)..(112): Selenocysteine
MAGVKALVALSFSGAIGLXFLMLGCALEDYGVYWPLFVLIFHAISPIPHFIAKRVXYDSDAXSSACRELAYFFXXGIVVSAFGFPVILARVAVIKWGACGLVLAGNAVIFLXIQGFFLIFGRGDDFSWEQW

SEQ ID NO: 14840 - protein, 140 aa, Homo sapiens
  MOD_RES (28)..(28): Selenocysteine
  MOD_RES (65)..(65): Selenocysteine
  MOD_RES (71)..(71): Selenocysteine
  MOD_RES (83)..(84): Selenocysteine
  MOD_RES (121)..(121): Selenocysteine
MRDGKGFLQGFLYFALVALSFSGAIGLXFLMLGCALEDYGVYWPLFVLIFHAISPIPHFIAKRVXYDSDAXSSACRELAYFFXXGIVVSAFGFPVILARVAVIKWGACGLVLAGNAVIFLXIQGFFLIFGRGDDFSWEQW

SEQ ID NO: 14841 - protein, 168 aa, Homo sapiens
  MOD_RES (7)..(7): Selenocysteine
  MOD_RES (43)..(43): Selenocysteine
  MOD_RES (53)..(54): Selenocysteine
  MOD_RES (61)..(61): Selenocysteine
  MOD_RES (66)..(67): Selenocysteine
  MOD_RES (128)..(128): Selenocysteine
  MOD_RES (147)..(147): Selenocysteine
MHPSLAXMGKLASKLQLDLSVVKIWFKNQRAKWKRQQRQQMQXRPSLGPANQXXSVKKEEXPSAIXXANIRPVSPGISDANDHDLREPSGIKNPGGASASARVSSWDSQSYDIEQICLGASNPPWASXLFEIDEFVKIYDLPGEDDXSSLNQYLFPVCLEYDQLQSSV

SEQ ID NO: 14842 - protein, 308 aa, Homo sapiens
  MOD_RES (5)..(5): Selenocysteine
  MOD_RES (12)..(12): Selenocysteine
  MOD_RES (42)..(42): Selenocysteine
  MOD_RES (46)..(46): Selenocysteine
  MOD_RES (60)..(60): Selenocysteine
  MOD_RES (74)..(74): Selenocysteine
  MOD_RES (78)..(78): Selenocysteine
  MOD_RES (89)..(89): Selenocysteine
  MOD_RES (95)..(95): Selenocysteine
  MOD_RES (149)..(149): Selenocysteine
  MOD_RES (183)..(183): Selenocysteine
  MOD_RES (210)..(210): Selenocysteine
  MOD_RES (221)..(221): Selenocysteine
  MOD_RES (252)..(252): Selenocysteine
  MOD_RES (260)..(260): Selenocysteine
  MOD_RES (299)..(299): Selenocysteine
  MOD_RES (305)..(305): Selenocysteine
MDEQXGRLRLDXYCMSAKQIWAWSKCSGRLWDEHMKWMEGWXDRWXDGWMDGWMDEWSPXPALRSYGGGLSQQXFIFXDGEDEALARHXGNVVIXNCSAAHSRQALSCKMAVEYDRFIESGRKWFCHVDDDNYVNLRALLRLLASYPHXRDVYVGKPSLDRPIQAMERVSENKVRPVHFWFAXGGAGFCISRGLALKMSPWASGGHFMNXAERIRLPDDCXIGYIVEALLGVPLIRSGLFHSHLENLQQVPXSELHEQVXLSYGMFENKRNAVHVKGPFSVEADPSRFRSIHCHLYPDXPWCPRXAIF

SEQ ID NO: 14843 - protein, 248 aa, Homo sapiens
  MOD_RES (14)..(14): Selenocysteine
  MOD_RES (18)..(18): Selenocysteine
  MOD_RES (29)..(29): Selenocysteine
  MOD_RES (35)..(35): Selenocysteine
  MOD_RES (89)..(89): Selenocysteine
  MOD_RES (123)..(123): Selenocysteine
  MOD_RES (150)..(150): Selenocysteine
  MOD_RES (161)..(161): Selenocysteine
  MOD_RES (192)..(192): Selenocysteine
  MOD_RES (200)..(200): Selenocysteine
  MOD_RES (239)..(239): Selenocysteine
  MOD_RES (245)..(245): Selenocysteine
MKGCLLKADFLLQXFIFXDGEDEALARHXGNVVIXNCSAAHSRQALSCKMAVEYDRFIESGRKWFCHVDDDNYVNLRALLRLLASYPHXRDVYVGKPSLDRPIQAMERVSENKVRPVHFWFAXGGAGFCISRGLALKMSPWASGGHFMNXAERIRLPDDCXIGYIVEALLGVPLIRSGLFHSHLENLQQVPXSELHEQVXLSYGMFENKRNAVHVKGPFSVEADPSRFRSIHCHLYPDXPWCPRXAIF

SEQ ID NO: 14844 - protein, 361 aa, Homo sapiens
  MOD_RES (25)..(25): Selenocysteine
  MOD_RES (82)..(82): Selenocysteine
  MOD_RES (121)..(122): Selenocysteine
  MOD_RES (136)..(136): Selenocysteine
  MOD_RES (145)..(145): Selenocysteine
  MOD_RES (149)..(149): Selenocysteine
  MOD_RES (160)..(160): Selenocysteine
  MOD_RES (166)..(166): Selenocysteine
  MOD_RES (220)..(220): Selenocysteine
  MOD_RES (254)..(254): Selenocysteine
  MOD_RES (281)..(281): Selenocysteine
  MOD_RES (292)..(292): Selenocysteine
  MOD_RES (323)..(323): Selenocysteine
  MOD_RES (331)..(331): Selenocysteine
MLKRCGRRLLLALAGALLACLLVLXADPPPPPLPAERGRRALRSLAGPAGAAPAPGLGAAAAAPGALVRDVHSLSEYFSLLXRARRDAGPPPGAAPRPADGHPRPLAEPLAPRDVFIAVKXXKKFHRARLDLLLEXWISRHKEMXFIFXDGEDEALARHXGNVVIXNCSAAHSRQALSCKMAVEYDRFIESGRKWFCHVDDDNYVNLRALLRLLASYPHXRDVYVGKPSLDRPIQAMERVSENKVRPVHFWFAXGGAGFCISRGLALKMSPWASGGHFMNXAERIRLPDDCXIGYIVEALLGVPLIRSGLFHSHLENLQQVPXSELHEQVXLSYGMFENKRNAVHVKGPFSVEADPSRWGN

SEQ ID NO: 14845 - protein, 379 aa, Homo sapiens
  MOD_RES (25)..(25): Selenocysteine
  MOD_RES (82)..(82): Selenocysteine
  MOD_RES (121)..(122): Selenocysteine
  MOD_RES (136)..(136): Selenocysteine
  MOD_RES (145)..(145): Selenocysteine
  MOD_RES (149)..(149): Selenocysteine
  MOD_RES (160)..(160): Selenocysteine
  MOD_RES (166)..(166): Selenocysteine
  MOD_RES (220)..(220): Selenocysteine
  MOD_RES (254)..(254): Selenocysteine
  MOD_RES (281)..(281): Selenocysteine
  MOD_RES (292)..(292): Selenocysteine
  MOD_RES (323)..(323): Selenocysteine
  MOD_RES (331)..(331): Selenocysteine
  MOD_RES (370)..(370): Selenocysteine
  MOD_RES (376)..(376): Selenocysteine
MLKRCGRRLLLALAGALLACLLVLXADPPPPPLPAERGRRALRSLAGPAGAAPAPGLGAAAAAPGALVRDVHSLSEYFSLLXRARRDAGPPPGAAPRPADGHPRPLAEPLAPRDVFIAVKXXKKFHRARLDLLLEXWISRHKEMXFIFXDGEDEALARHXGNVVIXNCSAAHSRQALSCKMAVEYDRFIESGRKWFCHVDDDNYVNLRALLRLLASYPHXRDVYVGKPSLDRPIQAMERVSENKVRPVHFWFAXGGAGFCISRGLALKMSPWASGGHFMNXAERIRLPDDCXIGYIVEALLGVPLIRSGLFHSHLENLQQVPXSELHEQVXLSYGMFENKRNAVHVKGPFSVEADPSRFRSIHCHLYPDXPWCPRXAIF

SEQ ID NO: 14846 - protein, 250 aa, Homo sapiens
  MOD_RES (2)..(2): Selenocysteine
  MOD_RES (16)..(16): Selenocysteine
  MOD_RES (20)..(20): Selenocysteine
  MOD_RES (31)..(31): Selenocysteine
  MOD_RES (37)..(37): Selenocysteine
  MOD_RES (91)..(91): Selenocysteine
  MOD_RES (125)..(125): Selenocysteine
  MOD_RES (152)..(152): Selenocysteine
  MOD_RES (163)..(163): Selenocysteine
  MOD_RES (194)..(194): Selenocysteine
  MOD_RES (202)..(202): Selenocysteine
  MOD_RES (241)..(241): Selenocysteine
  MOD_RES (247)..(247): Selenocysteine
MXPGRCCLAADIQVEXFIFXDGEDEALARHXGNVVIXNCSAAHSRQALSCKMAVEYDRFIESGRKWFCHVDDDNYVNLRALLRLLASYPHXRDVYVGKPSLDRPIQAMERVSENKVRPVHFWFAXGGAGFCISRGLALKMSPWASGGHFMNXAERIRLPDDCXIGYIVEALLGVPLIRSGLFHSHLENLQQVPXSELHEQVXLSYGMFENKRNAVHVKGPFSVEADPSRFRSIHCHLYPDXPWCPRXAIF

SEQ ID NO: 14847 - protein, 69 aa, Homo sapiens
  MOD_RES (19)..(19): Selenocysteine
  MOD_RES (21)..(21): Selenocysteine
  MOD_RES (27)..(27): Selenocysteine
  MOD_RES (57)..(57): Selenocysteine
MACASPWLGQRMPGGNNPXPXPSHPRXLRAVEALSSNPAGPGLVCAGSGRQQPESQXWRVPSSARRGGS

SEQ ID NO: 14848 - protein, 38 aa, Homo sapiens
MACGLVASNLNLKPGECLRVRGEVAPDAKSEFFQQASC

SEQ ID NO: 14849 - protein, 135 aa, Homo sapiens
  MOD_RES (58)..(58): Selenocysteine
  MOD_RES (71)..(71): Selenocysteine
  MOD_RES (91)..(91): Selenocysteine
  MOD_RES (98)..(98): Selenocysteine
MACGLVASNLNLKPGECLRVRGEVAPDAKSFVLNLGKDSNNLCLHFNPRFNAHGDANXIVCNSKDGGAWGXEQREAVFPFQPGSVAEVCIXFDQANLXVKLPDGYEFKFPNRLNLEAINYMAADGDFKIKCVAFD

SEQ ID NO: 14850 - protein, 327 aa, Homo sapiens
  MOD_RES (12)..(12): Selenocysteine
  MOD_RES (21)..(21): Selenocysteine
  MOD_RES (51)..(52): Selenocysteine
  MOD_RES (102)..(103): Selenocysteine
  MOD_RES (111)..(111): Selenocysteine
  MOD_RES (168)..(168): Selenocysteine
  MOD_RES (231)..(231): Selenocysteine
  MOD_RES (244)..(244): Selenocysteine
  MOD_RES (253)..(253): Selenocysteine
  MOD_RES (301)..(301): Selenocysteine
MSQPSGGRAPGXRIYSWSCPXVMSPGEKLDPIPDSFILQPPVFHPVVPYVXXIFGGLHAGKMVMLQGVVPLDAHRFQVDFQCGCSLCPRPDIAFHFNPRFHXXKPHVICNXLHGGRWQREARWPHLALRRGSSFLILFLFGNEEVKVSVNGQHFLHFRYRLPLSHVDXLGIFGDILVEAVGFLNINPFVEGSREYPAGHEVPCSHALPQGLSPGQVIIVRGLVLQEPKHFXVSLRDQAAHAPVXLRASFADRXLAWISRWGQKKLISAPFLFYPQRFFEVLLLFQEGGLKLALNGQGLGAXSMNQQALEQLRELRISGSVQLYCVHS

SEQ ID NO: 14851 - protein, 336 aa, Homo sapiens
  MOD_RES (12)..(12): Selenocysteine
  MOD_RES (21)..(21): Selenocysteine
  MOD_RES (51)..(52): Selenocysteine
  MOD_RES (102)..(103): Selenocysteine
  MOD_RES (111)..(111): Selenocysteine
  MOD_RES (168)..(168): Selenocysteine
  MOD_RES (240)..(240): Selenocysteine
  MOD_RES (253)..(253): Selenocysteine
  MOD_RES (262)..(262): Selenocysteine
  MOD_RES (310)..(310): Selenocysteine
MSQPSGGRAPGXRIYSWSCPXVMSPGEKLDPIPDSFILQPPVFHPVVPYVXXIFGGLHAGKMVMLQGVVPLDAHRFQVDFQCGCSLCPRPDIAFHFNPRFHXXKPHVICNXLHGGRWQREARWPHLALRRGSSFLILFLFGNEEVKVSVNGQHFLHFRYRLPLSHVDXLGIFGDILVEAVGFLNINPFVEGSREYPAGHPFLLMSPRLEVPCSHALPQGLSPGQVIIVRGLVLQEPKHFXVSLRDQAAHAPVXLRASFADRXLAWISRWGQKKLISAPFLFYPQRFFEVLLLFQEGGLKLALNGQGLGAXSMNQQALEQLRELRISGSVQLYCVHS

SEQ ID NO: 14852 - protein, 337 aa, Homo sapiens
  MOD_RES (12)..(12): Selenocysteine
  MOD_RES (21)..(21): Selenocysteine
  MOD_RES (51)..(52): Selenocysteine
  MOD_RES (103)..(104): Selenocysteine
  MOD_RES (112)..(112): Selenocysteine
  MOD_RES (169)..(169): Selenocysteine
  MOD_RES (241)..(241): Selenocysteine
  MOD_RES (254)..(254): Selenocysteine
  MOD_RES (263)..(263): Selenocysteine
  MOD_RES (311)..(311): Selenocysteine
MSQPSGGRAPGXRIYSWSCPXVMSPGEKLDPIPDSFILQPPVFHPVVPYVXXIFGGLHAGKMVMLQGVVPLDAHSRFQVDFQCGCSLCPRPDIAFHFNPRFHXXKPHVICNXLHGGRWQREARWPHLALRRGSSFLILFLFGNEEVKVSVNGQHFLHFRYRLPLSHVDXLGIFGDILVEAVGFLNINPFVEGSREYPAGHPFLLMSPRLEVPCSHALPQGLSPGQVIIVRGLVLQEPKHFXVSLRDQAAHAPVXLRASFADRXLAWISRWGQKKLISAPFLFYPQRFFEVLLLFQEGGLKLALNGQGLGAXSMNQQALEQLRELRISGSVQLYCVHS

SEQ ID NO: 14853 - protein, 266 aa, Homo sapiens
  MOD_RES (41)..(42): Selenocysteine
  MOD_RES (50)..(50): Selenocysteine
  MOD_RES (107)..(107): Selenocysteine
  MOD_RES (170)..(170): Selenocysteine
  MOD_RES (183)..(183): Selenocysteine
  MOD_RES (192)..(192): Selenocysteine
  MOD_RES (240)..(240): Selenocysteine
MVMLQGVVPLDAHRFQVDFQCGCSLCPRPDIAFHFNPRFHXXKPHVICNXLHGGRWQREARWPHLALRRGSSFLILFLFGNEEVKVSVNGQHFLHFRYRLPLSHVDXLGIFGDILVEAVGFLNINPFVEGSREYPAGHEVPCSHALPQGLSPGQVIIVRGLVLQEPKHFXVSLRDQAAHAPVXLRASFADRXLAWISRWGQKKLISAPFLFYPQRFFEVLLLFQEGGLKLALNGQGLGAXSMNQQALEQLRELRISGSVQLYCVHS

SEQ ID NO: 14854 - protein, 275 aa, Homo sapiens
  MOD_RES (41)..(42): Selenocysteine
  MOD_RES (50)..(50): Selenocysteine
  MOD_RES (107)..(107): Selenocysteine
  MOD_RES (179)..(179): Selenocysteine
  MOD_RES (192)..(192): Selenocysteine
  MOD_RES (201)..(201): Selenocysteine
  MOD_RES (249)..(249): Selenocysteine
MVMLQGVVPLDAHRFQVDFQCGCSLCPRPDIAFHFNPRFHXXKPHVICNXLHGGRWQREARWPHLALRRGSSFLILFLFGNEEVKVSVNGQHFLHFRYRLPLSHVDXLGIFGDILVEAVGFLNINPFVEGSREYPAGHPFLLMSPRLEVPCSHALPQGLSPGQVIIVRGLVLQEPKHFXVSLRDQAAHAPVXLRASFADRXLAWISRWGQKKLISAPFLFYPQRFFEVLLLFQEGGLKLALNGQGLGAXSMNQQALEQLRELRISGSVQLYCVHS

SEQ ID NO: 14855 - protein, 88 aa, Homo sapiens
MADNFSLHDALSGSGNPNPQGWPGAWGNQPAGAGGYPGASYPGAYPGQAPPGAYPGQAPPGAYPGAPGAYPGAPAPGVYPGPPSGPGA

SEQ ID NO: 14856 - protein, 250 aa, Homo sapiens
  MOD_RES (98)..(98): Selenocysteine
  MOD_RES (104)..(104): Selenocysteine
  MOD_RES (133)..(133): Selenocysteine
  MOD_RES (137)..(137): Selenocysteine
  MOD_RES (175)..(175): Selenocysteine
  MOD_RES (243)..(243): Selenocysteine
  MOD_RES (248)..(248): Selenocysteine
MADNFSLHDALSGSGNPNPQGWPGAWGNQPAGAGGYPGASYPGAYPGQAPPGAYPGQAPPGAYPGAPGAYPGAPAPGVYPGPPSGPGAYPSSGQPSAXGAYPAXGPYGAPAGPLIVPYNLPLPGGVVPRMLIXILGXVKPNANRIALDFQRGNDVAFHFNPRFNENNRRVIVCNXKLDNNWGREERQSVFPFESGKPFKIQVLVEPDHFKVAVNDAHLLQYNHRVKKLNEISKLGISGDIDLXSASYXMI

SEQ ID NO: 14857 - protein, 233 aa, Homo sapiens
  MOD_RES (98)..(98): Selenocysteine
  MOD_RES (104)..(104): Selenocysteine
  MOD_RES (133)..(133): Selenocysteine
  MOD_RES (137)..(137): Selenocysteine
  MOD_RES (175)..(175): Selenocysteine
  MOD_RES (209)..(209): Selenocysteine
  MOD_RES (216)..(218): Selenocysteine
MADNFSLHDALSGSGNPNPQGWPGAWGNQPAGAGGYPGASYPGAYPGQAPPGAYPGQAPPGAYPGAPGAYPGAPAPGVYPGPPSGPGAYPSSGQPSAXGAYPAXGPYGAPAGPLIVPYNLPLPGGVVPRMLIXILGXVKPNANRIALDFQRGNDVAFHFNPRFNENNRRVIVCNXKLDNNWGREERQSVFPFESGKPFKSLALSPGWSXVARSWLXXXSASWVQAMLLPQPPK

SEQ ID NO: 14858 - protein, 18 aa, Homo sapiens
  MOD_RES (2)..(2): Selenocysteine
  MOD_RES (16)..(16): Selenocysteine
MXPPRLFWVWLLVAGXQA

SEQ ID NO: 14859 - protein, 41 aa, Homo sapiens
  MOD_RES (2)..(2): Selenocysteine
  MOD_RES (16)..(16): Selenocysteine
MXPPRLFWVWLLVAGXQAPGIPSDDDLEVPGGSPGFRRERW

SEQ ID NO: 14860 - protein, 62 aa, Homo sapiens
  MOD_RES (2)..(2): Selenocysteine
  MOD_RES (16)..(16): Selenocysteine
MXPPRLFWVWLLVAGXQGELSPWEIPKAEVWKAGAPWGCSELQGDILPGARGPAVSQIFSPA

SEQ ID NO: 14861 - protein, 144 aa, Homo sapiens
  MOD_RES (2)..(2): Selenocysteine
  MOD_RES (16)..(16): Selenocysteine
  MOD_RES (30)..(30): Selenocysteine
  MOD_RES (32)..(32): Selenocysteine
  MOD_RES (60)..(60): Selenocysteine
  MOD_RES (63)..(63): Selenocysteine
  MOD_RES (66)..(66): Selenocysteine
  MOD_RES (68)..(68): Selenocysteine
  MOD_RES (109)..(109): Selenocysteine
  MOD_RES (113)..(113): Selenocysteine
  MOD_RES (130)..(130): Selenocysteine
MXPPRLFWVWLLVAGXQGSGPIMLDEVQCXGXEASLADCKSLGWLKSNCRHERDAGVVCXNEXRSXHXLDLSRELSEALGQIFDSQRGCDLSISVNVQGEDALGFCGHXVILXANLEAQALWKEPGSNVXMSVDAECVPMVRDL

SEQ ID NO: 14862 - protein, 48 aa, Homo sapiens
  MOD_RES (2)..(2): Selenocysteine
  MOD_RES (16)..(16): Selenocysteine
  MOD_RES (32)..(32): Selenocysteine
MXPPRLFWVWLLVAGXQGVNDGDMRLADGGAXNQGRVEIFYRGPWPDL

SEQ ID NO: 14863 - protein, 113 aa, Homo sapiens
  MOD_RES (2)..(2): Selenocysteine
  MOD_RES (16)..(16): Selenocysteine
  MOD_RES (32)..(32): Selenocysteine
  MOD_RES (47)..(47): Selenocysteine
  MOD_RES (56)..(56): Selenocysteine
  MOD_RES (71)..(71): Selenocysteine
  MOD_RES (88)..(88): Selenocysteine
MXPPRLFWVWLLVAGXQGVNDGDMRLADGGAXNQGRVEIFYRGQWGXVCDNLWDLXDASVVCRALGFENAXQALGRAAFGQGRACCLXGRLQVPGLAEEQLQARERRWCGLHQ

SEQ ID NO: 14864 - protein, 88 aa, Homo sapiens
  MOD_RES (2)..(2): Selenocysteine
  MOD_RES (16)..(16): Selenocysteine
  MOD_RES (32)..(32): Selenocysteine
  MOD_RES (47)..(47): Selenocysteine
  MOD_RES (56)..(56): Selenocysteine
  MOD_RES (71)..(71): Selenocysteine
MXPPRLFWVWLLVAGXQGVNDGDMRLADGGAXNQGRVEIFYRGQWGXVCDNLWDLXDASVVCRALGFENAXQALGRAAFGQGSGPIML

SEQ ID NO: 14865 - protein, 209 aa, Homo sapiens
  MOD_RES (2)..(2): Selenocysteine
  MOD_RES (16)..(16): Selenocysteine
  MOD_RES (32)..(32): Selenocysteine
  MOD_RES (47)..(47): Selenocysteine
  MOD_RES (56)..(56): Selenocysteine
  MOD_RES (71)..(71): Selenocysteine
  MOD_RES (94)..(94): Selenocysteine
  MOD_RES (96)..(96): Selenocysteine
  MOD_RES (124)..(124): Selenocysteine
  MOD_RES (127)..(127): Selenocysteine
  MOD_RES (130)..(130): Selenocysteine
  MOD_RES (132)..(132): Selenocysteine
  MOD_RES (173)..(173): Selenocysteine
  MOD_RES (177)..(177): Selenocysteine
  MOD_RES (194)..(194): Selenocysteine
MXPPRLFWVWLLVAGXQGVNDGDMRLADGGAXNQGRVEIFYRGQWGXVCDNLWDLXDASVVCRALGFENAXQALGRAAFGQGSGPIMLDEVQCXGXEASLADCKSLGWLKSNCRHERDAGVVCXNEXRSXHXLDLSRELSEALGQIFDSQRGCDLSISVNVQGEDALGFCGHXVILXANLEAQALWKEPGSNVXMSVDAECVPMVRDLL

SEQ ID NO: 14866 - protein, 210 aa, Homo sapiens
  MOD_RES (2)..(2): Selenocysteine
  MOD_RES (16)..(16): Selenocysteine
  MOD_RES (32)..(32): Selenocysteine
  MOD_RES (47)..(47): Selenocysteine
  MOD_RES (56)..(56): Selenocysteine
  MOD_RES (71)..(71): Selenocysteine
  MOD_RES (94)..(94): Selenocysteine
  MOD_RES (96)..(96): Selenocysteine
  MOD_RES (124)..(124): Selenocysteine
  MOD_RES (127)..(127): Selenocysteine
  MOD_RES (130)..(130): Selenocysteine
  MOD_RES (132)..(132): Selenocysteine
  MOD_RES (173)..(173): Selenocysteine
  MOD_RES (177)..(177): Selenocysteine
  MOD_RES (194)..(194): Selenocysteine
MXPPRLFWVWLLVAGXQGVNDGDMRLADGGAXNQGRVEIFYRGQWGXVCDNLWDLXDASVVCRALGFENAXQALGRAAFGQGSGPIMLDEVQCXGXEASLADCKSLGWLKSNCRHERDAGVVCXNEXRSXHXLDLSRELSEALGQIFDSQRGCDLSISVNVQGEDALGFCGHXVILXANLEAQALWKEPGSNVXMSVDAECVPMVRDLLR

SEQ ID NO: 14867 - protein, 259 aa, Homo sapiens
  MOD_RES (2)..(2): Selenocysteine
  MOD_RES (16)..(16): Selenocysteine
  MOD_RES (32)..(32): Selenocysteine
  MOD_RES (47)..(47): Selenocysteine
  MOD_RES (56)..(56): Selenocysteine
  MOD_RES (71)..(71): Selenocysteine
  MOD_RES (94)..(94): Selenocysteine
  MOD_RES (96)..(96): Selenocysteine
  MOD_RES (124)..(124): Selenocysteine
  MOD_RES (127)..(127): Selenocysteine
  MOD_RES (130)..(130): Selenocysteine
  MOD_RES (132)..(132): Selenocysteine
  MOD_RES (173)..(173): Selenocysteine
  MOD_RES (177)..(177): Selenocysteine
  MOD_RES (194)..(194): Selenocysteine
  MOD_RES (220)..(220): Selenocysteine
MXPPRLFWVWLLVAGXQGVNDGDMRLADGGAXNQGRVEIFYRGQWGXVCDNLWDLXDASVVCRALGFENAXQALGRAAFGQGSGPIMLDEVQCXGXEASLADCKSLGWLKSNCRHERDAGVVCXNEXRSXHXLDLSRELSEALGQIFDSQRGCDLSISVNVQGEDALGFCGHXVILXANLEAQALWKEPGSNVXMSVDAECVPMVRDLLRYFYSRRIDIXLSSVKCFHKLASAYGARQLQGYCASLFAILLPQDPSFQM

SEQ ID NO: 14868 - protein, 585 aa, Homo sapiens
  MOD_RES (2)..(2): Selenocysteine
  MOD_RES (16)..(16): Selenocysteine
  MOD_RES (32)..(32): Selenocysteine
  MOD_RES (47)..(47): Selenocysteine
  MOD_RES (56)..(56): Selenocysteine
  MOD_RES (71)..(71): Selenocysteine
  MOD_RES (94)..(94): Selenocysteine
  MOD_RES (96)..(96): Selenocysteine
  MOD_RES (124)..(124): Selenocysteine
  MOD_RES (127)..(127): Selenocysteine
  MOD_RES (130)..(130): Selenocysteine
  MOD_RES (132)..(132): Selenocysteine
  MOD_RES (173)..(173): Selenocysteine
  MOD_RES (177)..(177): Selenocysteine
  MOD_RES (194)..(194): Selenocysteine
  MOD_RES (220)..(220): Selenocysteine
  MOD_RES (270)..(270): Selenocysteine
  MOD_RES (291)..(291): Selenocysteine
  MOD_RES (301)..(301): Selenocysteine
  MOD_RES (327)..(327): Selenocysteine
  MOD_RES (377)..(377): Selenocysteine
  MOD_RES (385)..(385): Selenocysteine
  MOD_RES (400)..(400): Selenocysteine
  MOD_RES (403)..(403): Selenocysteine
  MOD_RES (410)..(410): Selenocysteine
  MOD_RES (413)..(413): Selenocysteine
  MOD_RES (419)..(419): Selenocysteine
  MOD_RES (463)..(463): Selenocysteine
  MOD_RES (485)..(485): Selenocysteine
  MOD_RES (507)..(507): Selenocysteine
  MOD_RES (515)..(515): Selenocysteine
  MOD_RES (535)..(535): Selenocysteine
  MOD_RES (550)..(550): Selenocysteine
  MOD_RES (556)..(556): Selenocysteine
  MOD_RES (571)..(571): Selenocysteine
  MOD_RES (579)..(579): Selenocysteine
MXPPRLFWVWLLVAGXQGVNDGDMRLADGGAXNQGRVEIFYRGQWGXVCDNLWDLXDASVVCRALGFENAXQALGRAAFGQGSGPIMLDEVQCXGXEASLADCKSLGWLKSNCRHERDAGVVCXNEXRSXHXLDLSRELSEALGQIFDSQRGCDLSISVNVQGEDALGFCGHXVILXANLEAQALWKEPGSNVXMSVDAECVPMVRDLLRYFYSRRIDIXLSSVKCFHKLASAYGARQLQGYCASLFAILLPQDPSFQMPLDLYAYAVAXGDALLEKLCLQFLAWNFEALXQAEAWPSVPXDLLQLLLPRSDLAVPSELALLKAVDXWSWGERASHEEVEGLVEKIRFPMMLPEELFELQFNLSLYWSHEALFQKKXLQALEFHXVPFQLLARYKGLNLXEDXYKPRIYXSPXWSAFVXDSSWSARKSQLVYQSRRGPLVKYSSDYFQAPSDYRYYPYQSFQXPQHPSFLFQDKRVSWSLVYLPXIQSCWNYGFSCSSDELPVLGLXKSGGSDRXIAYENKALMLCEGLFVADVXDFEGWKAAIPSALDXNSSKSXSSFPCPAGHFNGFRXVIRPFYLXNSSGVD

SEQ ID NO: 14869 - protein, 131 aa, Homo sapiens
  MOD_RES (2)..(2): Selenocysteine
  MOD_RES (16)..(16): Selenocysteine
  MOD_RES (32)..(32): Selenocysteine
  MOD_RES (47)..(47): Selenocysteine
  MOD_RES (56)..(56): Selenocysteine
  MOD_RES (71)..(71): Selenocysteine
  MOD_RES (94)..(94): Selenocysteine
  MOD_RES (96)..(96): Selenocysteine
  MOD_RES (124)..(124): Selenocysteine
MXPPRLFWVWLLVAGXQGVNDGDMRLADGGAXNQGRVEIFYRGQWGXVCDNLWDLXDASVVCRALGFENAXQALGRAAFGQGSGPIMLDEVQCXGXEASLADCKSLGWLKSNCRHERDAGVVCXNGAFQSE

SEQ ID NO: 14870 - protein, 205 aa, Homo sapiens
  MOD_RES (2)..(2): Selenocysteine
  MOD_RES (16)..(16): Selenocysteine
  MOD_RES (32)..(32): Selenocysteine
  MOD_RES (47)..(47): Selenocysteine
  MOD_RES (56)..(56): Selenocysteine
  MOD_RES (71)..(71): Selenocysteine
  MOD_RES (94)..(94): Selenocysteine
  MOD_RES (96)..(96): Selenocysteine
  MOD_RES (124)..(124): Selenocysteine
  MOD_RES (127)..(127): Selenocysteine
  MOD_RES (129)..(129): Selenocysteine
  MOD_RES (134)..(134): Selenocysteine
  MOD_RES (144)..(144): Selenocysteine
  MOD_RES (158)..(158): Selenocysteine
  MOD_RES (170)..(170): Selenocysteine
  MOD_RES (178)..(178): Selenocysteine
  MOD_RES (188)..(188): Selenocysteine
  MOD_RES (202)..(202): Selenocysteine
MXPPRLFWVWLLVAGXQGVNDGDMRLADGGAXNQGRVEIFYRGQWGXVCDNLWDLXDASVVCRALGFENAXQALGRAAFGQGSGPIMLDEVQCXGXEASLADCKSLGWLKSNCRHERDAGVVCXNGXSXPEGLXSPCRQSSASXSWPLPMGPGSCRAXAQASLPSSSPRXPRSRCPWXCMPMQWPQGXPCWRSSAYSSWPGXSRP

SEQ ID NO: 14871 - protein, 355 aa, Homo sapiens
  MOD_RES (20)..(20): Selenocysteine
  MOD_RES (32)..(32): Selenocysteine
  MOD_RES (36)..(36): Selenocysteine
  MOD_RES (43)..(43): Selenocysteine
  MOD_RES (51)..(51): Selenocysteine
  MOD_RES (76)..(76): Selenocysteine
  MOD_RES (89)..(89): Selenocysteine
  MOD_RES (133)..(133): Selenocysteine
  MOD_RES (152)..(152): Selenocysteine
  MOD_RES (161)..(161): Selenocysteine
  MOD_RES (193)..(193): Selenocysteine
  MOD_RES (195)..(195): Selenocysteine
  MOD_RES (199)..(199): Selenocysteine
  MOD_RES (210)..(210): Selenocysteine
  MOD_RES (229)..(230): Selenocysteine
  MOD_RES (246)..(246): Selenocysteine
  MOD_RES (281)..(281): Selenocysteine
  MOD_RES (338)..(338): Selenocysteine
  MOD_RES (351)..(351): Selenocysteine
  MOD_RES (355)..(355): Selenocysteine
MAFSGSQAPYLSPAVPFSGXIQGGLQDGLQIXVNGXVLSSSGXRFAVNFQXGFSGNDIAFHFNPRFEDGGYVVCNXRQNGSWGPEERKXHMPFQKGMPFDLCFLVQSSDFKVMVNGILFVQYFHRVPFHRVDXISVNGSVQLSYISFQNPRXVPVQPAFSXVPFSQPVCFPPRPRGRRQKPPGVWPANPAPIXQXVIHXVQSAPGQMFSXPAIPPMMYPHPAYPMPFIXXILGGLYPSKSILLSGXVLPSAQRFHINLCSGNHIAFHLNPRFDENAVVRNXQIDNSWGSEERSLPRKMPFVRGQSFSVWILCEAHCLKVAVDGQHLFEYYHRLRNLPXINRLEVGGDIQLXHVQX

SEQ ID NO: 14872 - protein, 175 aa, Homo sapiens
  MOD_RES (20)..(20): Selenocysteine
  MOD_RES (32)..(32): Selenocysteine
  MOD_RES (36)..(36): Selenocysteine
  MOD_RES (43)..(43): Selenocysteine
  MOD_RES (51)..(51): Selenocysteine
  MOD_RES (76)..(76): Selenocysteine
  MOD_RES (89)..(89): Selenocysteine
  MOD_RES (133)..(133): Selenocysteine
  MOD_RES (154)..(155): Selenocysteine
  MOD_RES (171)..(171): Selenocysteine
MAFSGSQAPYLSPAVPFSGXIQGGLQDGLQIXVNGXVLSSSGXRFAVNFQXGFSGNDIAFHFNPRFEDGGYVVCNXRQNGSWGPEERKXHMPFQKGMPFDLCFLVQSSDFKVMVNGILFVQYFHRVPFHRVDXISVNGSVQLSYISFQPMPFIXXILGGLYPSKSILLSGXVLPS

SEQ ID NO: 14873 - protein, 246 aa, Homo sapiens
  MOD_RES (20)..(20): Selenocysteine
  MOD_RES (32)..(32): Selenocysteine
  MOD_RES (36)..(36): Selenocysteine
  MOD_RES (43)..(43): Selenocysteine
  MOD_RES (51)..(51): Selenocysteine
  MOD_RES (76)..(76): Selenocysteine
  MOD_RES (89)..(89): Selenocysteine
  MOD_RES (133)..(133): Selenocysteine
  MOD_RES (161)..(161): Selenocysteine
  MOD_RES (163)..(163): Selenocysteine
  MOD_RES (167)..(167): Selenocysteine
  MOD_RES (178)..(178): Selenocysteine
  MOD_RES (197)..(198): Selenocysteine
  MOD_RES (214)..(214): Selenocysteine
  MOD_RES (229)..(229): Selenocysteine
  MOD_RES (239)..(239): Selenocysteine
  MOD_RES (243)..(244): Selenocysteine
MAFSGSQAPYLSPAVPFSGXIQGGLQDGLQIXVNGXVLSSSGXRFAVNFQXGFSGNDIAFHFNPRFEDGGYVVCNXRQNGSWGPEERKXHMPFQKGMPFDLCFLVQSSDFKVMVNGILFVQYFHRVPFHRVDXISVNGSVQLSYISFQPPGVWPANPAPIXQXVIHXVQSAPGQMFSXPAIPPMMYPHPAYPMPFIXXILGGLYPSKSILLSGXVLPSAQRCGSCVKLXASRWPWMVSXCLNXXIA

SEQ ID NO: 14874 - protein, 323 aa, Homo sapiens
  MOD_RES (20)..(20): Selenocysteine
  MOD_RES (32)..(32): Selenocysteine
  MOD_RES (36)..(36): Selenocysteine
  MOD_RES (43)..(43): Selenocysteine
  MOD_RES (51)..(51): Selenocysteine
  MOD_RES (76)..(76): Selenocysteine
  MOD_RES (89)..(89): Selenocysteine
  MOD_RES (133)..(133): Selenocysteine
  MOD_RES (161)..(161): Selenocysteine
  MOD_RES (163)..(163): Selenocysteine
  MOD_RES (167)..(167): Selenocysteine
  MOD_RES (178)..(178): Selenocysteine
  MOD_RES (197)..(198): Selenocysteine
  MOD_RES (214)..(214): Selenocysteine
  MOD_RES (249)..(249): Selenocysteine
  MOD_RES (306)..(306): Selenocysteine
  MOD_RES (319)..(319): Selenocysteine
  MOD_RES (323)..(323): Selenocysteine
MAFSGSQAPYLSPAVPFSGXIQGGLQDGLQIXVNGXVLSSSGXRFAVNFQXGFSGNDIAFHFNPRFEDGGYVVCNXRQNGSWGPEERKXHMPFQKGMPFDLCFLVQSSDFKVMVNGILFVQYFHRVPFHRVDXISVNGSVQLSYISFQPPGVWPANPAPIXQXVIHXVQSAPGQMFSXPAIPPMMYPHPAYPMPFIXXILGGLYPSKSILLSGXVLPSAQRFHINLCSGNHIAFHLNPRFDENAVVRNXQIDNSWGSEERSLPRKMPFVRGQSFSVWILCEAHCLKVAVDGQHLFEYYHRLRNLPXINRLEVGGDIQLXHVQX

SEQ ID NO: 14875 - protein, 75 aa, Homo sapiens
  MOD_RES (20)..(20): Selenocysteine
  MOD_RES (32)..(32): Selenocysteine
  MOD_RES (36)..(36): Selenocysteine
  MOD_RES (43)..(43): Selenocysteine
  MOD_RES (66)..(66): Selenocysteine
MAFSGSQAPYLSPAVPFSGXIQGGLQDGLQIXVNGXVLSSSGXRWRVRGVQHEAERKLGARGEEDXHAFPEGDAL

SEQ ID NO: 14876 - protein, 115 aa, Homo sapiens
  MOD_RES (43)..(43): Selenocysteine
  MOD_RES (62)..(62): Selenocysteine
  MOD_RES (71)..(71): Selenocysteine
  MOD_RES (103)..(103): Selenocysteine
  MOD_RES (105)..(105): Selenocysteine
  MOD_RES (109)..(109): Selenocysteine
MPFQKGMPFDLCFLVQSSDFKVMVNGILFVQYFHRVPFHRVDXISVNGSVQLSYISFQNPRXVPVQPAFSXVPFSQPVCFPPRPRGRRQKPPGVWPANPAPIXQXVIHXVQSAPG

SEQ ID NO: 14877 - protein, 125 aa, Homo sapiens
  MOD_RES (8)..(8): Selenocysteine
  MOD_RES (28)..(28): Selenocysteine
  MOD_RES (30)..(30): Selenocysteine
  MOD_RES (34)..(34): Selenocysteine
  MOD_RES (45)..(45): Selenocysteine
  MOD_RES (64)..(65): Selenocysteine
  MOD_RES (81)..(81): Selenocysteine
  MOD_RES (116)..(116): Selenocysteine
PVQPAFSXVPFSQPVCFPPRPRGRRQKXQXVIHXVQSAPGQMFSXPAIPPMMYPHPAYPMPFIXXILGGLYPSKSILLSGXVLPSAQRFHINLCSGNHIAFHLNPRFDENAVVRNXQIDNSWGSE

SEQ ID NO: 14878 - protein, 137 aa, Homo sapiens
  MOD_RES (1)..(1): Any amino acid
  MOD_RES (36)..(36): Selenocysteine
  MOD_RES (52)..(52): Selenocysteine
  MOD_RES (54)..(54): Selenocysteine
  MOD_RES (58)..(58): Selenocysteine
  MOD_RES (69)..(69): Selenocysteine
  MOD_RES (88)..(89): Selenocysteine
  MOD_RES (105)..(105): Selenocysteine
  MOD_RES (120)..(120): Selenocysteine
  MOD_RES (130)..(130): Selenocysteine
  MOD_RES (134)..(135): Selenocysteine
XFDLCFLVQSSDFKVMVNGILFVQYFHRVPFHRVDXISVNGSVQLSYISFQXQXVIHXVQSAPGQMFSXPAIPPMMYPHPAYPMPFIXXILGGLYPSKSILLSGXVLPSAQRCGSCVKLXASRWPWMVSXCLNXXIA

SEQ ID NO: 14879 - protein, 19 aa, Homo sapiens
MVWKVAVFLSVALGIGAVP

SEQ ID NO: 14880 - protein, 57 aa, Homo sapiens
MVWKVAVFLSVALGIGAVPIDDPEDGGKHWVVIVAGSNGWYNYRHQADACHAYQIIH

SEQ ID NO: 14881 - protein, 58 aa, Homo sapiens
MVWKVAVFLSVALGIGAVPIDDPEDGGKHWVVIVAGSNGWYNYRHQADACHAYQIIHR

SEQ ID NO: 14882 - protein, 135 aa, Homo sapiens
  MOD_RES (73)..(73): Selenocysteine
  MOD_RES (84)..(84): Selenocysteine
  MOD_RES (95)..(95): Selenocysteine
  MOD_RES (100)..(100): Selenocysteine
MVWKVAVFLSVALGIGAVPIDDPEDGGKHWVVIVAGSNGWYNYRHQADACHAYQIIHRNGIPDEQIVVMINPXPGIVINRPNGXDVYQGVPKDYXGEDVXPQNFLAVLRGDAEAVKGIGSGKVLKSGPQDHVFIY

SEQ ID NO: 14883 - protein, 78 aa, Homo sapiens
MVWKVAVFLSVALGIGAVPIDDPEDGGKHWVVIVAGSNGWYNYRHQADACHAYQIIHRNGIPDEQIVVMMYDDIAYSE

SEQ ID NO: 14884 - protein, 223 aa, Homo sapiens
  MOD_RES (82)..(82): Selenocysteine
  MOD_RES (93)..(93): Selenocysteine
  MOD_RES (104)..(104): Selenocysteine
  MOD_RES (109)..(109): Selenocysteine
  MOD_RES (146)..(146): Selenocysteine
  MOD_RES (151)..(151): Selenocysteine
  MOD_RES (169)..(169): Selenocysteine
MVWKVAVFLSVALGIGAVPIDDPEDGGKHWVVIVAGSNGWYNYRHQADACHAYQIIHRNGIPDEQIVVMMYDDIAYSEDNPXPGIVINRPNGXDVYQGVPKDYXGEDVXPQNFLAVLRGDAEAVKGIGSGKVLKSGPQDHVFIYFXDHGSXGILVFPNEDLHVKDLNEXIHYMYKHKMYRKMVFYIEACESGSMMNHLPDNINGRWLGRRPRPGLASRLLRHR

SEQ ID NO: 14885 - protein, 372 aa, Homo sapiens
  MOD_RES (82)..(82): Selenocysteine
  MOD_RES (93)..(93): Selenocysteine
  MOD_RES (104)..(104): Selenocysteine
  MOD_RES (109)..(109): Selenocysteine
  MOD_RES (146)..(146): Selenocysteine
  MOD_RES (151)..(151): Selenocysteine
  MOD_RES (169)..(169): Selenocysteine
  MOD_RES (207)..(208): Selenocysteine
  MOD_RES (227)..(227): Selenocysteine
  MOD_RES (247)..(247): Selenocysteine
  MOD_RES (250)..(250): Selenocysteine
  MOD_RES (262)..(262): Selenocysteine
  MOD_RES (264)..(264): Selenocysteine
  MOD_RES (274)..(274): Selenocysteine
  MOD_RES (277)..(277): Selenocysteine
  MOD_RES (300)..(300): Selenocysteine
  MOD_RES (305)..(305): Selenocysteine
  MOD_RES (313)..(313): Selenocysteine
  MOD_RES (322)..(322): Selenocysteine
  MOD_RES (332)..(332): Selenocysteine
  MOD_RES (370)..(370): Selenocysteine
MVWKVAVFLSVALGIGAVPIDDPEDGGKHWVVIVAGSNGWYNYRHQADACHAYQIIHRNGIPDEQIVVMMYDDIAYSEDNPXPGIVINRPNGXDVYQGVPKDYXGEDVXPQNFLAVLRGDAEAVKGIGSGKVLKSGPQDHVFIYFXDHGSXGILVFPNEDLHVKDLNEXIHYMYKHKMYRKMVFYIEACESGSMMNHLPDNINVYAXXAANPRESSYACYYDEKRSXYLGDWYSVNWMEDSDVEDLXKEXLHKQYHLVKSHXNXSHVMQYGNKXISXMKVMQFQGMKRKASSPVPLPPVXHLDLXPSPDVPLXIMKRKLMNXNDLEESRQLXEEIQRHLDDKIVHGPRVPWSLLKSCLLEAFPSVSAPPXVC

SEQ ID NO: 14886 - protein, 376 aa, Homo sapiens
  MOD_RES (82)..(82): Selenocysteine
  MOD_RES (93)..(93): Selenocysteine
  MOD_RES (104)..(104): Selenocysteine
  MOD_RES (109)..(109): Selenocysteine
  MOD_RES (146)..(146): Selenocysteine
  MOD_RES (151)..(151): Selenocysteine
  MOD_RES (169)..(169): Selenocysteine
  MOD_RES (207)..(208): Selenocysteine
  MOD_RES (227)..(227): Selenocysteine
  MOD_RES (247)..(247): Selenocysteine
  MOD_RES (250)..(250): Selenocysteine
  MOD_RES (262)..(262): Selenocysteine
  MOD_RES (264)..(264): Selenocysteine
  MOD_RES (274)..(274): Selenocysteine
  MOD_RES (277)..(277): Selenocysteine
  MOD_RES (300)..(300): Selenocysteine
  MOD_RES (305)..(305): Selenocysteine
  MOD_RES (313)..(313): Selenocysteine
  MOD_RES (322)..(322): Selenocysteine
  MOD_RES (332)..(332): Selenocysteine
MVWKVAVFLSVALGIGAVPIDDPEDGGKHWVVIVAGSNGWYNYRHQADACHAYQIIHRNGIPDEQIVVMMYDDIAYSEDNPXPGIVINRPNGXDVYQGVPKDYXGEDVXPQNFLAVLRGDAEAVKGIGSGKVLKSGPQDHVFIYFXDHGSXGILVFPNEDLHVKDLNEXIHYMYKHKMYRKMVFYIEACESGSMMNHLPDNINVYAXXAANPRESSYACYYDEKRSXYLGDWYSVNWMEDSDVEDLXKEXLHKQYHLVKSHXNXSHVMQYGNKXISXMKVMQFQGMKRKASSPVPLPPVXHLDLXPSPDVPLXIMKRKLMNXNDLEESRQLXEEIQRHLDYEYALRHLYVLVNLCEKPYPLHRIKLSMDHVCLGHY

SEQ ID NO: 14887 - protein, 433 aa, Homo sapiens
  MOD_RES (82)..(82): Selenocysteine
  MOD_RES (93)..(93): Selenocysteine
  MOD_RES (104)..(104): Selenocysteine
  MOD_RES (109)..(109): Selenocysteine
  MOD_RES (146)..(146): Selenocysteine
  MOD_RES (151)..(151): Selenocysteine
  MOD_RES (169)..(169): Selenocysteine
  MOD_RES (207)..(208): Selenocysteine
  MOD_RES (227)..(227): Selenocysteine
  MOD_RES (247)..(247): Selenocysteine
  MOD_RES (250)..(250): Selenocysteine
  MOD_RES (262)..(262): Selenocysteine
  MOD_RES (264)..(264): Selenocysteine
  MOD_RES (274)..(274): Selenocysteine
  MOD_RES (277)..(277): Selenocysteine
  MOD_RES (300)..(300): Selenocysteine
  MOD_RES (305)..(305): Selenocysteine
  MOD_RES (313)..(313): Selenocysteine
  MOD_RES (322)..(322): Selenocysteine
  MOD_RES (332)..(332): Selenocysteine
  MOD_RES (374)..(374): Selenocysteine
  MOD_RES (388)..(388): Selenocysteine
  MOD_RES (397)..(397): Selenocysteine
MVWKVAVFLSVALGIGAVPIDDPEDGGKHWVVIVAGSNGWYNYRHQADACHAYQIIHRNGIPDEQIVVMMYDDIAYSEDNPXPGIVINRPNGXDVYQGVPKDYXGEDVXPQNFLAVLRGDAEAVKGIGSGKVLKSGPQDHVFIYFXDHGSXGILVFPNEDLHVKDLNEXIHYMYKHKMYRKMVFYIEACESGSMMNHLPDNINVYAXXAANPRESSYACYYDEKRSXYLGDWYSVNWMEDSDVEDLXKEXLHKQYHLVKSHXNXSHVMQYGNKXISXMKVMQFQGMKRKASSPVPLPPVXHLDLXPSPDVPLXIMKRKLMNXNDLEESRQLXEEIQRHLDARHLIEKSVRKIVSLLAASEAEVEQLLSERAPLXGHSCYPEALLHFRXHCFNWHSPXYEYALRHLYVLVNLCEKPYPLHRIKLSMDHVCLGHY

SEQ ID NO: 14888 - protein, 117 aa, Homo sapiens
  MOD_RES (82)..(82): Selenocysteine
  MOD_RES (93)..(93): Selenocysteine
  MOD_RES (104)..(104): Selenocysteine
MVWKVAVFLSVALGIGAVPIDDPEDGGKHWVVIVAGSNGWYNYRHQADACHAYQIIHRNGIPDEQIVVMMYDDIAYSEDNPXPGIVINRPNGXDVYQGVPKDYXGEWPPGSRVHLLH

SEQ ID NO: 14889 - protein, 48 aa, Homo sapiens
MVWKVAVFLSVALGIGAVPIDDPEDGGKHWVVIVAGSNGWYNYRHQEL

SEQ ID NO: 14890 - protein, 91 aa, Homo sapiens
  MOD_RES (1)..(1): Any amino acid
  MOD_RES (3)..(3): Selenocysteine
  MOD_RES (14)..(14): Selenocysteine
  MOD_RES (25)..(25): Selenocysteine
  MOD_RES (30)..(30): Selenocysteine
  MOD_RES (68)..(68): Selenocysteine
XPXPGIVINRPNGXDVYQGVPKDYXGEDVXPQNFLAVLRGGVRSLRCSGPPGEPPLQGSLQDLLHKMXCSLLPASPVFSEKLQIRVGKALY

SEQ ID NO: 14891 - protein, 951 aa, Homo sapiens
  MOD_RES (49)..(49): Selenocysteine
  MOD_RES (59)..(59): Selenocysteine
  MOD_RES (70)..(70): Selenocysteine
  MOD_RES (111)..(111): Selenocysteine
  MOD_RES (119)..(119): Selenocysteine
  MOD_RES (142)..(142): Selenocysteine
  MOD_RES (166)..(166): Selenocysteine
  MOD_RES (178)..(178): Selenocysteine
  MOD_RES (183)..(183): Selenocysteine
  MOD_RES (198)..(198): Selenocysteine
  MOD_RES (229)..(229): Selenocysteine
  MOD_RES (276)..(276): Selenocysteine
  MOD_RES (316)..(316): Selenocysteine
  MOD_RES (318)..(318): Selenocysteine
  MOD_RES (325)..(325): Selenocysteine
  MOD_RES (327)..(327): Selenocysteine
  MOD_RES (329)..(329): Selenocysteine
  MOD_RES (347)..(347): Selenocysteine
  MOD_RES (384)..(384): Selenocysteine
  MOD_RES (411)..(411): Selenocysteine
  MOD_RES (416)..(416): Selenocysteine
  MOD_RES (426)..(426): Selenocysteine
  MOD_RES (430)..(430): Selenocysteine
  MOD_RES (484)..(484): Selenocysteine
  MOD_RES (500)..(500): Selenocysteine
  MOD_RES (507)..(507): Selenocysteine
  MOD_RES (509)..(509): Selenocysteine
  MOD_RES (523)..(523): Selenocysteine
  MOD_RES (526)..(526): Selenocysteine
  MOD_RES (544)..(544): Selenocysteine
  MOD_RES (562)..(563): Selenocysteine
  MOD_RES (568)..(568): Selenocysteine
  MOD_RES (591)..(591): Selenocysteine
  MOD_RES (595)..(595): Selenocysteine
  MOD_RES (614)..(614): Selenocysteine
  MOD_RES (640)..(640): Selenocysteine
  MOD_RES (674)..(674): Selenocysteine
  MOD_RES (698)..(698): Selenocysteine
  MOD_RES (701)..(701): Selenocysteine
  MOD_RES (707)..(707): Selenocysteine
  MOD_RES (709)..(709): Selenocysteine
  MOD_RES (726)..(726): Selenocysteine
  MOD_RES (755)..(755): Selenocysteine
  MOD_RES (773)..(773): Selenocysteine
  MOD_RES (786)..(786): Selenocysteine
  MOD_RES (820)..(820): Selenocysteine
  MOD_RES (856)..(856): Selenocysteine
  MOD_RES (867)..(867): Selenocysteine
  MOD_RES (901)..(901): Selenocysteine
MPGPLGLLCFLALGLLGSAGPSGAAPPLCAAPCSCDGDRRVDCSGKGLXAVPEGLSAFXQALDISMNNIXQLPEDAFKNFPFLEELQLAGNDLSFIHPKALSGLKELKVLXLQNNQLKXVPSEAIRGLSALQSLRLDANHIXSVPEDSFEGLVQLRHLWLDDNSLXEVPVHPLSNLPXLQALXLALNKISSIPDFAFXNLSSLVVLHLHNNKIRSLSQHCFDGLDNLEXLDLNYNNLGEFPQAIKALPSLKELGFHSNSISVIPDGAFDGNPLLRXIHLYDNPLSFVGNSAFHNLSDLHSLVIRGASMVQQFPNLXGXVHLESLXLXGXKISSIPNNLCQEQKMLRXLDLSYNNIRDLPSFNGCHALEEISLQRNQIYQIKEGXFQGLISLRILDLSRNLIHEIHSRAFAXLGPIXNLDVSFNELXSFPXEGLNGLNQLKLVGNFKLKEALAAKDFVNLRSLSVPYAYQCCAFWGCDSYANLNXEDNSLQDHSVAQEKGXADAANVXSXLENEEHSQIIIHCXPSXGAFKPCEYLLGSWMIRLXVWFIFLVALFFNLLVILXXFASCXSLPSSKLFIGLISVSNLFMGIYXGILXFLDAVSWGRFAEFGIWWEXGSGCKVAGFLAVFSSESAIFLLMLAXVERSLSAKDIMKNGKSNHLKQFRVAALLAFLGAXVAGCFPLFHRGEYSASPLCLPFPXGEXPSLGFXVXLVLLNSLAFLLMAVIYXKLYCNLEKEDLSENSQSSMIKHVAWLIFXNCIFFCPVAFFSFAPLIXAISISPEIMKSVXLIFFPLPACLNPVLYVFFNPKFKEDWKLLKRRVXKKSGSVSVSISSQGGCLEQDFYYDCGMYSHLQGNLXVCDCCESFLLXKPVSCKHLIKSHSCPALAVASCQRPEGYWSDCGXQSAHSDYADEEDSFVSDSSDQVQACGRACFYQSRGFPLVRYAYNLPRVKD

SEQ ID NO: 14892 - protein, 158 aa, Homo sapiens
  MOD_RES (49)..(49): Selenocysteine
  MOD_RES (59)..(59): Selenocysteine
  MOD_RES (70)..(70): Selenocysteine
  MOD_RES (94)..(94): Selenocysteine
  MOD_RES (118)..(118): Selenocysteine
  MOD_RES (130)..(130): Selenocysteine
  MOD_RES (135)..(135): Selenocysteine
  MOD_RES (150)..(150): Selenocysteine
MPGPLGLLCFLALGLLGSAGPSGAAPPLCAAPCSCDGDRRVDCSGKGLXAVPEGLSAFXQALDISMNNIXQLPEDAFKNFPFLEELRLDANHIXSVPEDSFEGLVQLRHLWLDDNSLXEVPVHPLSNLPXLQALXLALNKISSIPDFAFXNLSSLVVL

SEQ ID NO: 14893 - protein, 927 aa, Homo sapiens
  MOD_RES (49)..(49): Selenocysteine
  MOD_RES (59)..(59): Selenocysteine
  MOD_RES (87)..(87): Selenocysteine
  MOD_RES (95)..(95): Selenocysteine
  MOD_RES (118)..(118): Selenocysteine
  MOD_RES (142)..(142): Selenocysteine
  MOD_RES (154)..(154): Selenocysteine
  MOD_RES (159)..(159): Selenocysteine
  MOD_RES (174)..(174): Selenocysteine
  MOD_RES (205)..(205): Selenocysteine
  MOD_RES (252)..(252): Selenocysteine
  MOD_RES (292)..(292): Selenocysteine
  MOD_RES (294)..(294): Selenocysteine
  MOD_RES (301)..(301): Selenocysteine
  MOD_RES (303)..(303): Selenocysteine
  MOD_RES (305)..(305): Selenocysteine
  MOD_RES (323)..(323): Selenocysteine
  MOD_RES (360)..(360): Selenocysteine
  MOD_RES (387)..(387): Selenocysteine
  MOD_RES (392)..(392): Selenocysteine
  MOD_RES (402)..(402): Selenocysteine
  MOD_RES (406)..(406): Selenocysteine
  MOD_RES (460)..(460): Selenocysteine
  MOD_RES (476)..(476): Selenocysteine
  MOD_RES (483)..(483): Selenocysteine
  MOD_RES (485)..(485): Selenocysteine
  MOD_RES (499)..(499): Selenocysteine
  MOD_RES (502)..(502): Selenocysteine
  MOD_RES (520)..(520): Selenocysteine
  MOD_RES (538)..(539): Selenocysteine
  MOD_RES (544)..(544): Selenocysteine
  MOD_RES (567)..(567): Selenocysteine
  MOD_RES (571)..(571): Selenocysteine
  MOD_RES (590)..(590): Selenocysteine
  MOD_RES (616)..(616): Selenocysteine
  MOD_RES (650)..(650): Selenocysteine
  MOD_RES (674)..(674): Selenocysteine
  MOD_RES (677)..(677): Selenocysteine
  MOD_RES (683)..(683): Selenocysteine
  MOD_RES (685)..(685): Selenocysteine
  MOD_RES (702)..(702): Selenocysteine
  MOD_RES (731)..(731): Selenocysteine
  MOD_RES (749)..(749): Selenocysteine
  MOD_RES (762)..(762): Selenocysteine
  MOD_RES (796)..(796): Selenocysteine
  MOD_RES (832)..(832): Selenocysteine
  MOD_RES (843)..(843): Selenocysteine
  MOD_RES (877)..(877): Selenocysteine
MPGPLGLLCFLALGLLGSAGPSGAAPPLCAAPCSCDGDRRVDCSGKGLXAVPEGLSAFXQALQLAGNDLSFIHPKALSGLKELKVLXLQNNQLKXVPSEAIRGLSALQSLRLDANHIXSVPEDSFEGLVQLRHLWLDDNSLXEVPVHPLSNLPXLQALXLALNKISSIPDFAFXNLSSLVVLHLHNNKIRSLSQHCFDGLDNLEXLDLNYNNLGEFPQAIKALPSLKELGFHSNSISVIPDGAFDGNPLLRXIHLYDNPLSFVGNSAFHNLSDLHSLVIRGASMVQQFPNLXGXVHLESLXLXGXKISSIPNNLCQEQKMLRXLDLSYNNIRDLPSFNGCHALEEISLQRNQIYQIKEGXFQGLISLRILDLSRNLIHEIHSRAFAXLGPIXNLDVSFNELXSFPXEGLNGLNQLKLVGNFKLKEALAAKDFVNLRSLSVPYAYQCCAFWGCDSYANLNXEDNSLQDHSVAQEKGXADAANVXSXLENEEHSQIIIHCXPSXGAFKPCEYLLGSWMIRLXVWFIFLVALFFNLLVILXXFASCXSLPSSKLFIGLISVSNLFMGIYXGILXFLDAVSWGRFAEFGIWWEXGSGCKVAGFLAVFSSESAIFLLMLAXVERSLSAKDIMKNGKSNHLKQFRVAALLAFLGAXVAGCFPLFHRGEYSASPLCLPFPXGEXPSLGFXVXLVLLNSLAFLLMAVIYXKLYCNLEKEDLSENSQSSMIKHVAWLIFXNCIFFCPVAFFSFAPLIXAISISPEIMKSVXLIFFPLPACLNPVLYVFFNPKFKEDWKLLKRRVXKKSGSVSVSISSQGGCLEQDFYYDCGMYSHLQGNLXVCDCCESFLLXKPVSCKHLIKSHSCPALAVASCQRPEGYWSDCGXQSAHSDYADEEDSFVSDSSDQVQACGRACFYQSRGFPLVRYAYNLPRVKD

SEQ ID NO: 14894 - protein, 835 aa, Homo sapiens
  MOD_RES (3)..(3): Selenocysteine
  MOD_RES (20)..(20): Selenocysteine
  MOD_RES (36)..(36): Selenocysteine
  MOD_RES (68)..(68): Selenocysteine
  MOD_RES (103)..(103): Selenocysteine
  MOD_RES (111)..(111): Selenocysteine
  MOD_RES (131)..(131): Selenocysteine
  MOD_RES (166)..(166): Selenocysteine
  MOD_RES (179)..(179): Selenocysteine
  MOD_RES (183)..(183): Selenocysteine
  MOD_RES (213)..(213): Selenocysteine
  MOD_RES (237)..(237): Selenocysteine
  MOD_RES (239)..(239): Selenocysteine
  MOD_RES (247)..(247): Selenocysteine
  MOD_RES (253)..(253): Selenocysteine
  MOD_RES (255)..(255): Selenocysteine
  MOD_RES (262)..(262): Selenocysteine
  MOD_RES (264)..(264): Selenocysteine
  MOD_RES (274)..(274): Selenocysteine
  MOD_RES (321)..(321): Selenocysteine
  MOD_RES (348)..(348): Selenocysteine
  MOD_RES (368)..(368): Selenocysteine
  MOD_RES (374)..(374): Selenocysteine
  MOD_RES (379)..(379): Selenocysteine
  MOD_RES (494)..(494): Selenocysteine
  MOD_RES (501)..(501): Selenocysteine
  MOD_RES (507)..(507): Selenocysteine
  MOD_RES (509)..(509): Selenocysteine
  MOD_RES (534)..(534): Selenocysteine
  MOD_RES (548)..(548): Selenocysteine
  MOD_RES (584)..(584): Selenocysteine
  MOD_RES (602)..(602): Selenocysteine
  MOD_RES (622)..(622): Selenocysteine
  MOD_RES (650)..(650): Selenocysteine
  MOD_RES (669)..(669): Selenocysteine
  MOD_RES (673)..(673): Selenocysteine
  MOD_RES (702)..(702): Selenocysteine
  MOD_RES (722)..(722): Selenocysteine
  MOD_RES (766)..(766): Selenocysteine
  MOD_RES (770)..(770): Selenocysteine
  MOD_RES (793)..(793): Selenocysteine
  MOD_RES (798)..(798): Selenocysteine
  MOD_RES (800)..(800): Selenocysteine
  MOD_RES (805)..(805): Selenocysteine
  MOD_RES (821)..(821): Selenocysteine
MDXSRLGVLLSLPVLLQLAXGGSSPRSGVLLRGCPXHCHCEPDGRMLLRVDCSDLGLSELPSNLSVFXSYLDLSMNNISQLLPNPLPSLRFLEELRLAGNALXYIPKGAFXGLYSLKVLMLQNNQLRHVPXEALQNLRSLQSLHLHNNRIHSLGKKCFDGLHSLEXLDLNYNNLDEFPXAIRXLSNLKELGFHSNNIRSIPEKAFVGNPSLIXIHFYDNPIQFVGRSAFQHLPELRXLXLNGASQIXEFPDLXGXANLESLXLXGAQISSLPQXVCNQLPNLQVLDLSYNLLEDLPSFSVCQKLQKIDLRHNEIYEIKVDXFQQLLSLRSLNLAWNKIAIIHPNAFSXLPSLIKLDLSSNLLSSFPIXGLHGLXHLKLXGNHALQSLISSENFPELKVIEMPYAYQCCAFGVCENAYKISNQWNKGDNSSMDDLHKKDAGMFQAQDERDLEDFLLDFEEDLKALHSVQCSPSPGPFKPCEHLLDGWLIRIGVWXIAVLALXCNALVXSXVFRSPLYISPIKLLIGVIAAVNMLXGVSSAVLAGVDAFXFGSFARHGAWWENGVGCHVIGFLSIFASESSVFLLXLAALERGFSVKYSAKFEXKAPFSSLKVIILLCALLALXMAAVPLLGGSKYGASPLCLPLPFGEPSXMGYMVALILLNSLCFLMMXIAYXKLYCNLDKGDLENIWDCSMVKHIALLLFXNCILNCPVAFLSFSSLINLXFISPEVIKFILLVVVPLPACLNPLLYILFNPHFKEDLVSLRKQXYVWXRSKHPSLMSINSDDVEKQSCDSXQALVXFXSSSIXYDLPPSSVPSPAYPVXESCHLSSVAFVPCL

SEQ ID NO: 14895 - protein, 883 aa, Homo sapiens
  MOD_RES (3)..(3): Selenocysteine
  MOD_RES (20)..(20): Selenocysteine
  MOD_RES (36)..(36): Selenocysteine
  MOD_RES (68)..(68): Selenocysteine
  MOD_RES (103)..(103): Selenocysteine
  MOD_RES (111)..(111): Selenocysteine
  MOD_RES (131)..(131): Selenocysteine
  MOD_RES (175)..(175): Selenocysteine
  MOD_RES (192)..(192): Selenocysteine
  MOD_RES (238)..(238): Selenocysteine
  MOD_RES (251)..(251): Selenocysteine
  MOD_RES (255)..(255): Selenocysteine
  MOD_RES (285)..(285): Selenocysteine
  MOD_RES (287)..(287): Selenocysteine
  MOD_RES (295)..(295): Selenocysteine
  MOD_RES (301)..(301): Selenocysteine
  MOD_RES (303)..(303): Selenocysteine
  MOD_RES (310)..(310): Selenocysteine
  MOD_RES (312)..(312): Selenocysteine
  MOD_RES (322)..(322): Selenocysteine
  MOD_RES (369)..(369): Selenocysteine
  MOD_RES (396)..(396): Selenocysteine
  MOD_RES (416)..(416): Selenocysteine
  MOD_RES (422)..(422): Selenocysteine
  MOD_RES (427)..(427): Selenocysteine
  MOD_RES (542)..(542): Selenocysteine
  MOD_RES (549)..(549): Selenocysteine
  MOD_RES (555)..(555): Selenocysteine
  MOD_RES (557)..(557): Selenocysteine
  MOD_RES (582)..(582): Selenocysteine
  MOD_RES (596)..(596): Selenocysteine
  MOD_RES (632)..(632): Selenocysteine
  MOD_RES (650)..(650): Selenocysteine
  MOD_RES (670)..(670): Selenocysteine
  MOD_RES (698)..(698): Selenocysteine
  MOD_RES (717)..(717): Selenocysteine
  MOD_RES (721)..(721): Selenocysteine
  MOD_RES (750)..(750): Selenocysteine
  MOD_RES (770)..(770): Selenocysteine
  MOD_RES (814)..(814): Selenocysteine
  MOD_RES (818)..(818): Selenocysteine
  MOD_RES (841)..(841): Selenocysteine
  MOD_RES (846)..(846): Selenocysteine
  MOD_RES (848)..(848): Selenocysteine
  MOD_RES (853)..(853): Selenocysteine
  MOD_RES (869)..(869): Selenocysteine
MDXSRLGVLLSLPVLLQLAXGGSSPRSGVLLRGCPXHCHCEPDGRMLLRVDCSDLGLSELPSNLSVFXSYLDLSMNNISQLLPNPLPSLRFLEELRLAGNALXYIPKGAFXGLYSLKVLMLQNNQLRHVPXEALQNLRSLQSLRLDANHISYVPPSCFSGLHSLRHLWLDDNALXEIPVQAFRSLSALQAMXLALNKIHHIPDYAFGNLSSLVVLHLHNNRIHSLGKKCFDGLHSLEXLDLNYNNLDEFPXAIRXLSNLKELHFYDNPIQFVGRSAFQHLPELRXLXLNGASQIXEFPDLXGXANLESLXLXGAQISSLPQXVCNQLPNLQVLDLSYNLLEDLPSFSVCQKLQKIDLRHNEIYEIKVDXFQQLLSLRSLNLAWNKIAIIHPNAFSXLPSLIKLDLSSNLLSSFPIXGLHGLXHLKLXGNHALQSLISSENFPELKVIEMPYAYQCCAFGVCENAYKISNQWNKGDNSSMDDLHKKDAGMFQAQDERDLEDFLLDFEEDLKALHSVQCSPSPGPFKPCEHLLDGWLIRIGVWXIAVLALXCNALVXSXVFRSPLYISPIKLLIGVIAAVNMLXGVSSAVLAGVDAFXFGSFARHGAWWENGVGCHVIGFLSIFASESSVFLLXLAALERGFSVKYSAKFEXKAPFSSLKVIILLCALLALXMAAVPLLGGSKYGASPLCLPLPFGEPSXMGYMVALILLNSLCFLMMXIAYXKLYCNLDKGDLENIWDCSMVKHIALLLFXNCILNCPVAFLSFSSLINLXFISPEVIKFILLVVVPLPACLNPLLYILFNPHFKEDLVSLRKQXYVWXRSKHPSLMSINSDDVEKQSCDSXQALVXFXSSSIXYDLPPSSVPSPAYPVXESCHLSSVAFVPCL

SEQ ID NO: 14896 - protein, 907 aa, Homo sapiens
  MOD_RES (3)..(3): Selenocysteine
  MOD_RES (20)..(20): Selenocysteine
  MOD_RES (36)..(36): Selenocysteine
  MOD_RES (68)..(68): Selenocysteine
  MOD_RES (103)..(103): Selenocysteine
  MOD_RES (111)..(111): Selenocysteine
  MOD_RES (131)..(131): Selenocysteine
  MOD_RES (175)..(175): Selenocysteine
  MOD_RES (192)..(192): Selenocysteine
  MOD_RES (238)..(238): Selenocysteine
  MOD_RES (251)..(251): Selenocysteine
  MOD_RES (255)..(255): Selenocysteine
  MOD_RES (285)..(285): Selenocysteine
  MOD_RES (309)..(309): Selenocysteine
  MOD_RES (311)..(311): Selenocysteine
  MOD_RES (319)..(319): Selenocysteine
  MOD_RES (325)..(325): Selenocysteine
  MOD_RES (327)..(327): Selenocysteine
  MOD_RES (334)..(334): Selenocysteine
  MOD_RES (336)..(336): Selenocysteine
  MOD_RES (346)..(346): Selenocysteine
  MOD_RES (393)..(393): Selenocysteine
  MOD_RES (420)..(420): Selenocysteine
  MOD_RES (440)..(440): Selenocysteine
  MOD_RES (446)..(446): Selenocysteine
  MOD_RES (451)..(451): Selenocysteine
  MOD_RES (566)..(566): Selenocysteine
  MOD_RES (573)..(573): Selenocysteine
  MOD_RES (579)..(579): Selenocysteine
  MOD_RES (581)..(581): Selenocysteine
  MOD_RES (606)..(606): Selenocysteine
  MOD_RES (620)..(620): Selenocysteine
  MOD_RES (656)..(656): Selenocysteine
  MOD_RES (674)..(674): Selenocysteine
  MOD_RES (694)..(694): Selenocysteine
  MOD_RES (722)..(722): Selenocysteine
  MOD_RES (741)..(741): Selenocysteine
  MOD_RES (745)..(745): Selenocysteine
  MOD_RES (774)..(774): Selenocysteine
  MOD_RES (794)..(794): Selenocysteine
  MOD_RES (838)..(838): Selenocysteine
  MOD_RES (842)..(842): Selenocysteine
  MOD_RES (865)..(865): Selenocysteine
  MOD_RES (870)..(870): Selenocysteine
  MOD_RES (872)..(872): Selenocysteine
  MOD_RES (877)..(877): Selenocysteine
  MOD_RES (893)..(893): Selenocysteine
MDXSRLGVLLSLPVLLQLAXGGSSPRSGVLLRGCPXHCHCEPDGRMLLRVDCSDLGLSELPSNLSVFXSYLDLSMNNISQLLPNPLPSLRFLEELRLAGNALXYIPKGAFXGLYSLKVLMLQNNQLRHVPXEALQNLRSLQSLRLDANHISYVPPSCFSGLHSLRHLWLDDNALXEIPVQAFRSLSALQAMXLALNKIHHIPDYAFGNLSSLVVLHLHNNRIHSLGKKCFDGLHSLEXLDLNYNNLDEFPXAIRXLSNLKELGFHSNNIRSIPEKAFVGNPSLIXIHFYDNPIQFVGRSAFQHLPELRXLXLNGASQIXEFPDLXGXANLESLXLXGAQISSLPQXVCNQLPNLQVLDLSYNLLEDLPSFSVCQKLQKIDLRHNEIYEIKVDXFQQLLSLRSLNLAWNKIAIIHPNAFSXLPSLIKLDLSSNLLSSFPIXGLHGLXHLKLXGNHALQSLISSENFPELKVIEMPYAYQCCAFGVCENAYKISNQWNKGDNSSMDDLHKKDAGMFQAQDERDLEDFLLDFEEDLKALHSVQCSPSPGPFKPCEHLLDGWLIRIGVWXIAVLALXCNALVXSXVFRSPLYISPIKLLIGVIAAVNMLXGVSSAVLAGVDAFXFGSFARHGAWWENGVGCHVIGFLSIFASESSVFLLXLAALERGFSVKYSAKFEXKAPFSSLKVIILLCALLALXMAAVPLLGGSKYGASPLCLPLPFGEPSXMGYMVALILLNSLCFLMMXIAYXKLYCNLDKGDLENIWDCSMVKHIALLLFXNCILNCPVAFLSFSSLINLXFISPEVIKFILLVVVPLPACLNPLLYILFNPHFKEDLVSLRKQXYVWXRSKHPSLMSINSDDVEKQSCDSXQALVXFXSSSIXYDLPPSSVPSPAYPVXESCHLSSVAFVPCL

SEQ ID NO: 14897 - protein, 348 aa, Homo sapiens
  MOD_RES (7)..(7): Selenocysteine
  MOD_RES (27)..(27): Selenocysteine
  MOD_RES (123)..(123): Selenocysteine
  MOD_RES (140)..(140): Selenocysteine
  MOD_RES (158)..(158): Selenocysteine
  MOD_RES (175)..(175): Selenocysteine
  MOD_RES (186)..(186): Selenocysteine
  MOD_RES (203)..(203): Selenocysteine
  MOD_RES (233)..(233): Selenocysteine
  MOD_RES (257)..(257): Selenocysteine
  MOD_RES (275)..(276): Selenocysteine
  MOD_RES (282)..(282): Selenocysteine
  MOD_RES (284)..(284): Selenocysteine
MGRPRLXLVCQVSIIISARDLSMNNLXELQPGLFHHLRFLEELRLSGNHLSHIPGQAFSGLYSLKILMLQNNQLGGIPAEALWELPSLQSLRLDANLISLVPERSFEGLSSLRHLWLDDNALXEIPVRALNNLPALQAMXLALNRISHIPDYAFQNLXSLVVLHLHNNRIQHLGXHSFEGLHNLEXLDLNYNKLQEFPVAIRXLGRLQELGFHNNNIKAIPEKAFMGNPLLQXIHFYDNPIQFVGRSAFQYLPKLHXLSLNGAMDIQEFPDLKGXXSLEILXLXRAGIRLLPSGMCQQLPRLRVLELSHNQIEELPSLHRCQKLEEMRSGGLYFLPPSARGAWSGARV

SEQ ID NO: 14898 - protein, 915 aa, Homo sapiens
  MOD_RES (7)..(7): Selenocysteine
  MOD_RES (27)..(27): Selenocysteine
  MOD_RES (123)..(123): Selenocysteine
  MOD_RES (140)..(140): Selenocysteine
  MOD_RES (158)..(158): Selenocysteine
  MOD_RES (175)..(175): Selenocysteine
  MOD_RES (186)..(186): Selenocysteine
  MOD_RES (203)..(203): Selenocysteine
  MOD_RES (233)..(233): Selenocysteine
  MOD_RES (257)..(257): Selenocysteine
  MOD_RES (275)..(276): Selenocysteine
  MOD_RES (282)..(282): Selenocysteine
  MOD_RES (284)..(284): Selenocysteine
  MOD_RES (341)..(341): Selenocysteine
  MOD_RES (368)..(368): Selenocysteine
  MOD_RES (378)..(378): Selenocysteine
  MOD_RES (383)..(384): Selenocysteine
  MOD_RES (496)..(496): Selenocysteine
  MOD_RES (533)..(533): Selenocysteine
  MOD_RES (557)..(557): Selenocysteine
  MOD_RES (559)..(559): Selenocysteine
  MOD_RES (573)..(573): Selenocysteine
  MOD_RES (586)..(586): Selenocysteine
  MOD_RES (593)..(593): Selenocysteine
  MOD_RES (609)..(609): Selenocysteine
  MOD_RES (681)..(681): Selenocysteine
  MOD_RES (752)..(752): Selenocysteine
  MOD_RES (815)..(815): Selenocysteine
  MOD_RES (841)..(841): Selenocysteine
  MOD_RES (848)..(848): Selenocysteine
  MOD_RES (892)..(892): Selenocysteine
MGRPRLXLVCQVSIIISARDLSMNNLXELQPGLFHHLRFLEELRLSGNHLSHIPGQAFSGLYSLKILMLQNNQLGGIPAEALWELPSLQSLRLDANLISLVPERSFEGLSSLRHLWLDDNALXEIPVRALNNLPALQAMXLALNRISHIPDYAFQNLXSLVVLHLHNNRIQHLGXHSFEGLHNLEXLDLNYNKLQEFPVAIRXLGRLQELGFHNNNIKAIPEKAFMGNPLLQXIHFYDNPIQFVGRSAFQYLPKLHXLSLNGAMDIQEFPDLKGXXSLEILXLXRAGIRLLPSGMCQQLPRLRVLELSHNQIEELPSLHRCQKLEEIGLQHNRIWEIGADXFSQLSSLQALDLSWNAIRSIHPEAFSXLHSLVKLDLXDNQLXXLPLAGLGGLMHLKLKGNLALSQAFSKDSFPKLRILEVPYAYQCCPYGMCASFFKASGQWEAEDLHLDDEESSKRPLGLLARQAENHYDQDLDELQLEMEDSKPHPSVQCSPXPGPFKPCEYLFESWGIRLAVWAIVLLSVLCNGLVLLXVFAGGPVPLPPVKFVVGAIAGANXLXGISCGLLASVDALXFGQFSEYGARWEXGLGCRAXGFLAVLGSEASVLLLXLAAVQCSVSVSCVRAYGKSPSLGSVRAGVLGCLALAGLAAALPLASVGEYGASPLCLPYAPPEGQPAALGFXVALVMMNSFCFLVVAGAYIKLYCDLPRGDFEAVWDCAMVRHVAWLIFADGLLYCPVAFLSFASMLGLFPVXPEAVKSVLLVVLPLPACLNPLLYLLFNPHFRDDLRRLRPRAGDSGPLAYAAAGELEKSSCDSXQALVAFSDVDLILEASEAGRPPGLEXYGFPSVXLISCQQPGAPRLEGSHCVEPEGNHFGNPQPSMDGELLLRAEGSXPAGGGLSGGGGFQPSGLAFASHV

SEQ ID NO: 14899 - protein, 232 aa, Homo sapiens
  MOD_RES (5)..(5): Selenocysteine
  MOD_RES (101)..(101): Selenocysteine
  MOD_RES (118)..(118): Selenocysteine
  MOD_RES (136)..(136): Selenocysteine
  MOD_RES (157)..(157): Selenocysteine
  MOD_RES (181)..(182): Selenocysteine
  MOD_RES (188)..(188): Selenocysteine
  MOD_RES (190)..(190): Selenocysteine
MNNLXELQPGLFHHLRFLEELRLSGNHLSHIPGQAFSGLYSLKILMLQNNQLGGIPAEALWELPSLQSLRLDANLISLVPERSFEGLSSLRHLWLDDNALXEIPVRALNNLPALQAMXLALNRISHIPDYAFQNLXSLVVLDLNYNKLQEFPVAIRXLGRLQELSLNGAMDIQEFPDLKGXXSLEILXLXRAGIRLLPSGMCQQLPRLRVLELSHNQIEELPSLHRCQKLEE

SEQ ID NO: 14900 - protein, 967 aa, Homo sapiens
  MOD_RES (33)..(33): Selenocysteine
  MOD_RES (68)..(68): Selenocysteine
  MOD_RES (79)..(79): Selenocysteine
  MOD_RES (175)..(175): Selenocysteine
  MOD_RES (192)..(192): Selenocysteine
  MOD_RES (210)..(210): Selenocysteine
  MOD_RES (227)..(227): Selenocysteine
  MOD_RES (238)..(238): Selenocysteine
  MOD_RES (255)..(255): Selenocysteine
  MOD_RES (285)..(285): Selenocysteine
  MOD_RES (309)..(309): Selenocysteine
  MOD_RES (327)..(328): Selenocysteine
  MOD_RES (334)..(334): Selenocysteine
  MOD_RES (336)..(336): Selenocysteine
  MOD_RES (393)..(393): Selenocysteine
  MOD_RES (420)..(420): Selenocysteine
  MOD_RES (430)..(430): Selenocysteine
  MOD_RES (435)..(436): Selenocysteine
  MOD_RES (548)..(548): Selenocysteine
  MOD_RES (585)..(585): Selenocysteine
  MOD_RES (609)..(609): Selenocysteine
  MOD_RES (611)..(611): Selenocysteine
  MOD_RES (625)..(625): Selenocysteine
  MOD_RES (638)..(638): Selenocysteine
  MOD_RES (645)..(645): Selenocysteine
  MOD_RES (661)..(661): Selenocysteine
  MOD_RES (733)..(733): Selenocysteine
  MOD_RES (804)..(804): Selenocysteine
  MOD_RES (867)..(867): Selenocysteine
  MOD_RES (893)..(893): Selenocysteine
  MOD_RES (900)..(900): Selenocysteine
  MOD_RES (944)..(944): Selenocysteine
MPSPPGLRALWLCAALCASRRAGGAPQPGPGPXACPAPCHCQEDGIMLSADCSELGLSAVPGDLDPLXAYLDLSMNNLXELQPGLFHHLRFLEELRLSGNHLSHIPGQAFSGLYSLKILMLQNNQLGGIPAEALWELPSLQSLRLDANLISLVPERSFEGLSSLRHLWLDDNALXEIPVRALNNLPALQAMXLALNRISHIPDYAFQNLXSLVVLHLHNNRIQHLGXHSFEGLHNLEXLDLNYNKLQEFPVAIRXLGRLQELGFHNNNIKAIPEKAFMGNPLLQXIHFYDNPIQFVGRSAFQYLPKLHXLSLNGAMDIQEFPDLKGXXSLEILXLXRAGIRLLPSGMCQQLPRLRVLELSHNQIEELPSLHRCQKLEEIGLQHNRIWEIGADXFSQLSSLQALDLSWNAIRSIHPEAFSXLHSLVKLDLXDNQLXXLPLAGLGGLMHLKLKGNLALSQAFSKDSFPKLRILEVPYAYQCCPYGMCASFFKASGQWEAEDLHLDDEESSKRPLGLLARQAENHYDQDLDELQLEMEDSKPHPSVQCSPXPGPFKPCEYLFESWGIRLAVWAIVLLSVLCNGLVLLXVFAGGPVPLPPVKFVVGAIAGANXLXGISCGLLASVDALXFGQFSEYGARWEXGLGCRAXGFLAVLGSEASVLLLXLAAVQCSVSVSCVRAYGKSPSLGSVRAGVLGCLALAGLAAALPLASVGEYGASPLCLPYAPPEGQPAALGFXVALVMMNSFCFLVVAGAYIKLYCDLPRGDFEAVWDCAMVRHVAWLIFADGLLYCPVAFLSFASMLGLFPVXPEAVKSVLLVVLPLPACLNPLLYLLFNPHFRDDLRRLRPRAGDSGPLAYAAAGELEKSSCDSXQALVAFSDVDLILEASEAGRPPGLEXYGFPSVXLISCQQPGAPRLEGSHCVEPEGNHFGNPQPSMDGELLLRAEGSXPAGGGLSGGGGFQPSGLAFASHV

SEQ ID NO: 14901 - protein, 828 aa, Homo sapiens
  MOD_RES (36)..(36): Selenocysteine
  MOD_RES (116)..(116): Selenocysteine
  MOD_RES (146)..(146): Selenocysteine
  MOD_RES (170)..(170): Selenocysteine
  MOD_RES (188)..(189): Selenocysteine
  MOD_RES (195)..(195): Selenocysteine
  MOD_RES (197)..(197): Selenocysteine
  MOD_RES (254)..(254): Selenocysteine
  MOD_RES (281)..(281): Selenocysteine
  MOD_RES (291)..(291): Selenocysteine
  MOD_RES (296)..(297): Selenocysteine
  MOD_RES (409)..(409): Selenocysteine
  MOD_RES (446)..(446): Selenocysteine
  MOD_RES (470)..(470): Selenocysteine
  MOD_RES (472)..(472): Selenocysteine
  MOD_RES (486)..(486): Selenocysteine
  MOD_RES (499)..(499): Selenocysteine
  MOD_RES (506)..(506): Selenocysteine
  MOD_RES (522)..(522): Selenocysteine
  MOD_RES (594)..(594): Selenocysteine
  MOD_RES (665)..(665): Selenocysteine
  MOD_RES (728)..(728): Selenocysteine
  MOD_RES (754)..(754): Selenocysteine
  MOD_RES (761)..(761): Selenocysteine
  MOD_RES (805)..(805): Selenocysteine
MRLEGEGRSARAGQNLSRAGSARRGAPRDLSMNNLXELQPGLFHHLRFLEELRLSGNHLSHIPGQAFSGLYSLKILMLQNNQLGGIPAEALWELPSLQSLDLNYNKLQEFPVAIRXLGRLQELGFHNNNIKAIPEKAFMGNPLLQXIHFYDNPIQFVGRSAFQYLPKLHXLSLNGAMDIQEFPDLKGXXSLEILXLXRAGIRLLPSGMCQQLPRLRVLELSHNQIEELPSLHRCQKLEEIGLQHNRIWEIGADXFSQLSSLQALDLSWNAIRSIHPEAFSXLHSLVKLDLXDNQLXXLPLAGLGGLMHLKLKGNLALSQAFSKDSFPKLRILEVPYAYQCCPYGMCASFFKASGQWEAEDLHLDDEESSKRPLGLLARQAENHYDQDLDELQLEMEDSKPHPSVQCSPXPGPFKPCEYLFESWGIRLAVWAIVLLSVLCNGLVLLXVFAGGPVPLPPVKFVVGAIAGANXLXGISCGLLASVDALXFGQFSEYGARWEXGLGCRAXGFLAVLGSEASVLLLXLAAVQCSVSVSCVRAYGKSPSLGSVRAGVLGCLALAGLAAALPLASVGEYGASPLCLPYAPPEGQPAALGFXVALVMMNSFCFLVVAGAYIKLYCDLPRGDFEAVWDCAMVRHVAWLIFADGLLYCPVAFLSFASMLGLFPVXPEAVKSVLLVVLPLPACLNPLLYLLFNPHFRDDLRRLRPRAGDSGPLAYAAAGELEKSSCDSXQALVAFSDVDLILEASEAGRPPGLEXYGFPSVXLISCQQPGAPRLEGSHCVEPEGNHFGNPQPSMDGELLLRAEGSXPAGGGLSGGGGFQPSGLAFASHV

SEQ ID NO: 14902 - protein, 141 aa, Homo sapiens
  MOD_RES (48)..(48): Selenocysteine
  MOD_RES (51)..(52): Selenocysteine
  MOD_RES (60)..(60): Selenocysteine
  MOD_RES (78)..(78): Selenocysteine
  MOD_RES (117)..(117): Selenocysteine
  MOD_RES (129)..(129): Selenocysteine
MEMLQGLLLLLLLSMGGAWASREPLRPWCHPINAILAVEKEGCPVCIXVNXXICAGYCPXMMRVLQAVLPPLPQVVCXYRDVRFESIRLPGCPRGVDPVVSFPVALSCRCGPCRRSXSDCGGPKDHPLXCDHPQLSGLLFL

SEQ ID NO: 14903 - protein, 325 aa, Homo sapiens
  MOD_RES (48)..(48): Selenocysteine
  MOD_RES (52)..(52): Selenocysteine
  MOD_RES (108)..(108): Selenocysteine
  MOD_RES (133)..(133): Selenocysteine
  MOD_RES (142)..(142): Selenocysteine
  MOD_RES (162)..(163): Selenocysteine
  MOD_RES (178)..(178): Selenocysteine
  MOD_RES (197)..(198): Selenocysteine
  MOD_RES (200)..(200): Selenocysteine
  MOD_RES (222)..(222): Selenocysteine
  MOD_RES (226)..(226): Selenocysteine
  MOD_RES (232)..(232): Selenocysteine
  MOD_RES (251)..(251): Selenocysteine
  MOD_RES (264)..(264): Selenocysteine
  MOD_RES (272)..(272): Selenocysteine
  MOD_RES (274)..(274): Selenocysteine
  MOD_RES (287)..(287): Selenocysteine
  MOD_RES (307)..(307): Selenocysteine
  MOD_RES (315)..(315): Selenocysteine
MKQRFSALQLLKLLLLLQPPLPRALREALCPEPCNCVPDGALRCPGPXAGLXRLSLAYLPVKVIPSQAFRGLNEVIKIEISQIDSLERIEANAFDNLLNLSEILIQNXKNLRYIEPGAFINLPRLKYLSICNXGIRKFPDVXKVFSSESNFILEICDNLHIXXIPGNAFQGMNNESVXLKLYGNGFEEVQSHAFNGXXLXSLELKENVHLEKMHNGAFRGAXGPKXLDISSXKLQALPSYGLESIQRLIAXSSYSLKKLPSREXFVNLLEAXLXYPSHCCAFRNLPXKEQNFSHSISENFSKQCESXVRKVNNKXLSKPRINGYQ

SEQ ID NO: 14904 - protein, 329 aa, Homo sapiens
  MOD_RES (48)..(48): Selenocysteine
  MOD_RES (52)..(52): Selenocysteine
  MOD_RES (108)..(108): Selenocysteine
  MOD_RES (133)..(133): Selenocysteine
  MOD_RES (142)..(142): Selenocysteine
  MOD_RES (162)..(163): Selenocysteine
  MOD_RES (178)..(178): Selenocysteine
  MOD_RES (197)..(198): Selenocysteine
  MOD_RES (200)..(200): Selenocysteine
  MOD_RES (222)..(222): Selenocysteine
  MOD_RES (226)..(226): Selenocysteine
  MOD_RES (232)..(232): Selenocysteine
  MOD_RES (251)..(251): Selenocysteine
  MOD_RES (264)..(264): Selenocysteine
  MOD_RES (272)..(272): Selenocysteine
  MOD_RES (274)..(274): Selenocysteine
  MOD_RES (287)..(287): Selenocysteine
  MOD_RES (307)..(307): Selenocysteine
  MOD_RES (315)..(315): Selenocysteine
MKQRFSALQLLKLLLLLQPPLPRALREALCPEPCNCVPDGALRCPGPXAGLXRLSLAYLPVKVIPSQAFRGLNEVIKIEISQIDSLERIEANAFDNLLNLSEILIQNXKNLRYIEPGAFINLPRLKYLSICNXGIRKFPDVXKVFSSESNFILEICDNLHIXXIPGNAFQGMNNESVXLKLYGNGFEEVQSHAFNGXXLXSLELKENVHLEKMHNGAFRGAXGPKXLDISSXKLQALPSYGLESIQRLIAXSSYSLKKLPSREXFVNLLEAXLXYPSHCCAFRNLPXKEQNFSHSISENFSKQCESXVRKVNNKXLLLHGALSAAHSLS

SEQ ID NO: 14905 - protein, 672 aa, Homo sapiens
  MOD_RES (48)..(48): Selenocysteine
  MOD_RES (52)..(52): Selenocysteine
  MOD_RES (108)..(108): Selenocysteine
  MOD_RES (133)..(133): Selenocysteine
  MOD_RES (142)..(142): Selenocysteine
  MOD_RES (162)..(163): Selenocysteine
  MOD_RES (178)..(178): Selenocysteine
  MOD_RES (197)..(198): Selenocysteine
  MOD_RES (200)..(200): Selenocysteine
  MOD_RES (222)..(222): Selenocysteine
  MOD_RES (226)..(226): Selenocysteine
  MOD_RES (232)..(232): Selenocysteine
  MOD_RES (251)..(251): Selenocysteine
  MOD_RES (264)..(264): Selenocysteine
  MOD_RES (272)..(272): Selenocysteine
  MOD_RES (274)..(274): Selenocysteine
  MOD_RES (287)..(287): Selenocysteine
  MOD_RES (313)..(313): Selenocysteine
  MOD_RES (352)..(352): Selenocysteine
  MOD_RES (359)..(359): Selenocysteine
  MOD_RES (365)..(365): Selenocysteine
  MOD_RES (395)..(395): Selenocysteine
  MOD_RES (408)..(408): Selenocysteine
  MOD_RES (414)..(414): Selenocysteine
  MOD_RES (419)..(419): Selenocysteine
  MOD_RES (429)..(429): Selenocysteine
  MOD_RES (431)..(431): Selenocysteine
  MOD_RES (434)..(434): Selenocysteine
  MOD_RES (440)..(440): Selenocysteine
  MOD_RES (442)..(442): Selenocysteine
  MOD_RES (494)..(495): Selenocysteine
  MOD_RES (503)..(503): Selenocysteine
  MOD_RES (534)..(534): Selenocysteine
  MOD_RES (538)..(538): Selenocysteine
  MOD_RES (550)..(550): Selenocysteine
  MOD_RES (553)..(553): Selenocysteine
  MOD_RES (573)..(573): Selenocysteine
  MOD_RES (575)..(575): Selenocysteine
  MOD_RES (600)..(600): Selenocysteine
  MOD_RES (602)..(602): Selenocysteine
  MOD_RES (633)..(633): Selenocysteine
  MOD_RES (641)..(641): Selenocysteine
  MOD_RES (650)..(650): Selenocysteine
  MOD_RES (655)..(655): Selenocysteine
  MOD_RES (661)..(661): Selenocysteine
  MOD_RES (667)..(667): Selenocysteine
  MOD_RES (670)..(670): Selenocysteine
MKQRFSALQLLKLLLLLQPPLPRALREALCPEPCNCVPDGALRCPGPXAGLXRLSLAYLPVKVIPSQAFRGLNEVIKIEISQIDSLERIEANAFDNLLNLSEILIQNXKNLRYIEPGAFINLPRLKYLSICNXGIRKFPDVXKVFSSESNFILEICDNLHIXXIPGNAFQGMNNESVXLKLYGNGFEEVQSHAFNGXXLXSLELKENVHLEKMHNGAFRGAXGPKXLDISSXKLQALPSYGLESIQRLIAXSSYSLKKLPSREXFVNLLEAXLXYPSHCCAFRNLPXKDYSSMLAESELSGWDYEYGFCLPKXPRCAPEPDAFNPCEDIMGYDFLRVLIWLINILAIMGNMXVLFVLLXSRYKLXVPRFLMCNLSFADFCMGLYLLLIASVDSQXKGQYYNHAIDWQXGSGCSXAGFFXVFASELSVYXLXVIXLERWHXIXYAIHLDQKLRLRHAILIMLGGWLFSSLIAMLPLVGVSNYMKVSICFPMDVEXXLSQVYILXILILNVVAFFIICACYIKIYFAVRNPELMAXNKDXKIAKKMAILIFXDFXCMAPISFFAISAAFKVPLIXVXNSKVLLVLFYPINSCANPFLYAIFXKXFQRDFFLLLSKFGCCKRRAELYRRKDFSAYXSNCKNGFXGSNKPSQSXLKLSXLHCQGXALLDKXRYXEC

SEQ ID NO: 14906 - protein, 699 aa, Homo sapiens
  MOD_RES (48)..(48): Selenocysteine
  MOD_RES (52)..(52): Selenocysteine
  MOD_RES (108)..(108): Selenocysteine
  MOD_RES (133)..(133): Selenocysteine
  MOD_RES (142)..(142): Selenocysteine
  MOD_RES (162)..(163): Selenocysteine
  MOD_RES (178)..(178): Selenocysteine
  MOD_RES (197)..(198): Selenocysteine
  MOD_RES (200)..(200): Selenocysteine
  MOD_RES (222)..(222): Selenocysteine
  MOD_RES (226)..(226): Selenocysteine
  MOD_RES (232)..(232): Selenocysteine
  MOD_RES (251)..(251): Selenocysteine
  MOD_RES (264)..(264): Selenocysteine
  MOD_RES (272)..(272): Selenocysteine
  MOD_RES (274)..(274): Selenocysteine
  MOD_RES (287)..(287): Selenocysteine
  MOD_RES (307)..(307): Selenocysteine
  MOD_RES (315)..(315): Selenocysteine
  MOD_RES (340)..(340): Selenocysteine
  MOD_RES (379)..(379): Selenocysteine
  MOD_RES (386)..(386): Selenocysteine
  MOD_RES (392)..(392): Selenocysteine
  MOD_RES (422)..(422): Selenocysteine
  MOD_RES (435)..(435): Selenocysteine
  MOD_RES (441)..(441): Selenocysteine
  MOD_RES (446)..(446): Selenocysteine
  MOD_RES (456)..(456): Selenocysteine
  MOD_RES (458)..(458): Selenocysteine
  MOD_RES (461)..(461): Selenocysteine
  MOD_RES (467)..(467): Selenocysteine
  MOD_RES (469)..(469): Selenocysteine
  MOD_RES (521)..(522): Selenocysteine
  MOD_RES (530)..(530): Selenocysteine
  MOD_RES (561)..(561): Selenocysteine
  MOD_RES (565)..(565): Selenocysteine
  MOD_RES (577)..(577): Selenocysteine
  MOD_RES (580)..(580): Selenocysteine
  MOD_RES (600)..(600): Selenocysteine
  MOD_RES (602)..(602): Selenocysteine
  MOD_RES (627)..(627): Selenocysteine
  MOD_RES (629)..(629): Selenocysteine
  MOD_RES (660)..(660): Selenocysteine
  MOD_RES (668)..(668): Selenocysteine
  MOD_RES (677)..(677): Selenocysteine
  MOD_RES (682)..(682): Selenocysteine
  MOD_RES (688)..(688): Selenocysteine
  MOD_RES (694)..(694): Selenocysteine
  MOD_RES (697)..(697): Selenocysteine
MKQRFSALQLLKLLLLLQPPLPRALREALCPEPCNCVPDGALRCPGPXAGLXRLSLAYLPVKVIPSQAFRGLNEVIKIEISQIDSLERIEANAFDNLLNLSEILIQNXKNLRYIEPGAFINLPRLKYLSICNXGIRKFPDVXKVFSSESNFILEICDNLHIXXIPGNAFQGMNNESVXLKLYGNGFEEVQSHAFNGXXLXSLELKENVHLEKMHNGAFRGAXGPKXLDISSXKLQALPSYGLESIQRLIAXSSYSLKKLPSREXFVNLLEAXLXYPSHCCAFRNLPXKEQNFSHSISENFSKQCESXVRKVNNKXLYSSMLAESELSGWDYEYGFCLPKXPRCAPEPDAFNPCEDIMGYDFLRVLIWLINILAIMGNMXVLFVLLXSRYKLXVPRFLMCNLSFADFCMGLYLLLIASVDSQXKGQYYNHAIDWQXGSGCSXAGFFXVFASELSVYXLXVIXLERWHXIXYAIHLDQKLRLRHAILIMLGGWLFSSLIAMLPLVGVSNYMKVSICFPMDVEXXLSQVYILXILILNVVAFFIICACYIKIYFAVRNPELMAXNKDXKIAKKMAILIFXDFXCMAPISFFAISAAFKVPLIXVXNSKVLLVLFYPINSCANPFLYAIFXKXFQRDFFLLLSKFGCCKRRAELYRRKDFSAYXSNCKNGFXGSNKPSQSXLKLSXLHCQGXALLDKXRYXEC

SEQ ID NO: 14907 - protein, 175 aa, Homo sapiens
  MOD_RES (14)..(14): Selenocysteine
  MOD_RES (18)..(18): Selenocysteine
  MOD_RES (74)..(74): Selenocysteine
  MOD_RES (99)..(99): Selenocysteine
  MOD_RES (108)..(108): Selenocysteine
  MOD_RES (128)..(129): Selenocysteine
  MOD_RES (144)..(144): Selenocysteine
  MOD_RES (158)..(158): Selenocysteine
NCVPDGALRCPGPXAGLXRLSLAYLPVKVIPSQAFRGLNEVIKIEISQIDSLERIEANAFDNLLNLSEILIQNXKNLRYIEPGAFINLPRLKYLSICNXGIRKFPDVXKVFSSESNFILEICDNLHIXXIPGNAFQGMNNESVXLPWQNCDEAIKELXLKEKRENMDWNDSEMKR

SEQ ID NO: 14908 - protein, 406 aa, Homo sapiens
  MOD_RES (39)..(39): Selenocysteine
  MOD_RES (61)..(61): Selenocysteine
  MOD_RES (90)..(90): Selenocysteine
  MOD_RES (100)..(100): Selenocysteine
  MOD_RES (134)..(135): Selenocysteine
  MOD_RES (185)..(186): Selenocysteine
  MOD_RES (194)..(194): Selenocysteine
  MOD_RES (202)..(202): Selenocysteine
  MOD_RES (206)..(206): Selenocysteine
  MOD_RES (217)..(217): Selenocysteine
  MOD_RES (307)..(307): Selenocysteine
  MOD_RES (322)..(322): Selenocysteine
  MOD_RES (344)..(344): Selenocysteine
MVHCAGCKRPILDRFLLNVLDRAWHVKCVQCCECKCNLXEKCFSREGKLYCKNDFFRCFGXKCAGCAQGISPSDLVRRARSKVFHLNCFXCMMCNKQLSXGEELYIIDENKFVCKEDYLSNSSVAKENSLHSAXXGSDPSLSPDSQDPSQDDAKDSESANVSDKEAGSNENDDQNLGAKRRGPRXXIKAKQLEXLKAAFAAXPKPXRHIREQLAQEXGLNMRVIQVWFQNRRSKERRMKQLSALGARRHAFFRSPRRMRPLVDRLEPGELIPNGPFSFYGDYQSEYYGPGGNYDFFPQGPPSSQAQXPVDLPFVPSSGPSGXPLGGLEHPLPGHHPSSEAQRFXDILAHPPGDSPSPEPSLPGPLHSMSAEVFGPSPPFSSLSVNGGASYGNHLSHPPEMNEAAVW

SEQ ID NO: 14909 - protein, 141 aa, Homo sapiens
  MOD_RES (1)..(1): Any amino acid
  MOD_RES (27)..(27): Selenocysteine
  MOD_RES (56)..(56): Selenocysteine
  MOD_RES (75)..(75): Selenocysteine
  MOD_RES (77)..(77): Selenocysteine
  MOD_RES (79)..(79): Selenocysteine
  MOD_RES (85)..(85): Selenocysteine
  MOD_RES (107)..(107): Selenocysteine
XRPLVDRLEPGELIPNGPFSFYGASRXILLLGRPDGKGGHEIGSKSASRWDWDPRXGCRRAELGLPKGNADLSPXPXWXRIRRQXPRACAPGRRAAKRRPGQPRVRXAVGDARSRGEGGREHSRVKEVKRPRALPGQPGGF

SEQ ID NO: 14910 - protein, 406 aa, Homo sapiens
  MOD_RES (38)..(38): Selenocysteine
  MOD_RES (40)..(41): Selenocysteine
  MOD_RES (92)..(92): Selenocysteine
  MOD_RES (142)..(142): Selenocysteine
  MOD_RES (144)..(145): Selenocysteine
  MOD_RES (151)..(152): Selenocysteine
  MOD_RES (219)..(219): Selenocysteine
  MOD_RES (266)..(266): Selenocysteine
  MOD_RES (271)..(271): Selenocysteine
  MOD_RES (280)..(280): Selenocysteine
  MOD_RES (303)..(303): Selenocysteine
  MOD_RES (306)..(306): Selenocysteine
  MOD_RES (331)..(331): Selenocysteine
  MOD_RES (337)..(337): Selenocysteine
  MOD_RES (343)..(343): Selenocysteine
  MOD_RES (345)..(345): Selenocysteine
  MOD_RES (363)..(363): Selenocysteine
  MOD_RES (365)..(366): Selenocysteine
  MOD_RES (368)..(368): Selenocysteine
  MOD_RES (371)..(371): Selenocysteine
  MOD_RES (374)..(374): Selenocysteine
  MOD_RES (377)..(377): Selenocysteine
  MOD_RES (379)..(379): Selenocysteine
  MOD_RES (383)..(383): Selenocysteine
  MOD_RES (400)..(401): Selenocysteine
  MOD_RES (403)..(403): Selenocysteine
MLFHSLSGPEVHGVIDEMDRRAKSEAPAISSAIDRGDXEXXMPSISSDRAALCAGCGGKISDRYYLLAVDKQWHMRCLKCCECKLNLESELXCFSKDGSIYCKEDYYRRFSVQRCARCHLGISASEMVMRARDLVYHLNCFXCXXCNKMLXXGDHFGMKDSLVYCRLHFEALLQGEYPAHFNHADVAAAAAAAAAAKSAGLGAAGANPLGLPYYNGVGXVQKGRPRKRKSPGPGADLAAYNAALSCNENDAEHLDRDQPYPSSQKXKRMRXSFKHHQLRXMKSYFAINHNPDAKDLKQLAQKXGLXKRVLQVWFQNARAKFRRNLLRQENXGVDKSXDAALQXGXPSGPASELSNASLSPSSXPXXLXDLXSPXLPXVXSVLXSVPGNLEGHEPHSPSQXXLXNLF

SEQ ID NO: 14911 - protein, 147 aa, Homo sapiens
  MOD_RES (51)..(51): Selenocysteine
  MOD_RES (101)..(101): Selenocysteine
  MOD_RES (103)..(104): Selenocysteine
  MOD_RES (110)..(111): Selenocysteine
MPSISSDRAALCAGCGGKISDRYYLLAVDKQWHMRCLKCCECKLNLESELXCFSKDGSIYCKEDYYRRFSVQRCARCHLGISASEMVMRARDLVYHLNCFXCXXCNKMLXXGDHFGMKDSLVYCRLHFEALLQGEYPAHFNHADVAA

SEQ ID NO: 14912 - protein, 412 aa, Homo sapiens
  MOD_RES (1)..(1): Any amino acid
  MOD_RES (36)..(36): Selenocysteine
  MOD_RES (38)..(39): Selenocysteine
  MOD_RES (90)..(90): Selenocysteine
  MOD_RES (148)..(148): Selenocysteine
  MOD_RES (150)..(151): Selenocysteine
  MOD_RES (157)..(158): Selenocysteine
  MOD_RES (225)..(225): Selenocysteine
  MOD_RES (272)..(272): Selenocysteine
  MOD_RES (277)..(277): Selenocysteine
  MOD_RES (286)..(286): Selenocysteine
  MOD_RES (309)..(309): Selenocysteine
  MOD_RES (312)..(312): Selenocysteine
  MOD_RES (337)..(337): Selenocysteine
  MOD_RES (343)..(343): Selenocysteine
  MOD_RES (349)..(349): Selenocysteine
  MOD_RES (351)..(351): Selenocysteine
  MOD_RES (369)..(369): Selenocysteine
  MOD_RES (371)..(372): Selenocysteine
  MOD_RES (374)..(374): Selenocysteine
  MOD_RES (377)..(377): Selenocysteine
  MOD_RES (380)..(380): Selenocysteine
  MOD_RES (383)..(383): Selenocysteine
  MOD_RES (385)..(385): Selenocysteine
  MOD_RES (389)..(389): Selenocysteine
  MOD_RES (406)..(407): Selenocysteine
  MOD_RES (409)..(409): Selenocysteine
XHSLSGPEVHGVIDEMDRRAKSEAPAISSAIDRGDXEXXMPSISSDRAALCAGCGGKISDRYYLLAVDKQWHMRCLKCCECKLNLESELXCFSKDGSIYCKEDYYSPSLHGPYRRFSVQRCARCHLGISASEMVMRARDLVYHLNCFXCXXCNKMLXXGDHFGMKDSLVYCRLHFEALLQGEYPAHFNHADVAAAAAAAAAAKSAGLGAAGANPLGLPYYNGVGXVQKGRPRKRKSPGPGADLAAYNAALSCNENDAEHLDRDQPYPSSQKXKRMRXSFKHHQLRXMKSYFAINHNPDAKDLKQLAQKXGLXKRVLQVWFQNARAKFRRNLLRQENXGVDKSXDAALQXGXPSGPASELSNASLSPSSXPXXLXDLXSPXLPXVXSVLXSVPGNLEGHEPHSPSQXXLXNLF

SEQ ID NO: 14913 - protein, 115 aa, Homo sapiens
  MOD_RES (1)..(1): Any amino acid
  MOD_RES (20)..(20): Selenocysteine
  MOD_RES (67)..(67): Selenocysteine
  MOD_RES (72)..(72): Selenocysteine
  MOD_RES (81)..(81): Selenocysteine
  MOD_RES (104)..(104): Selenocysteine
  MOD_RES (107)..(107): Selenocysteine
XLGAAGANPLGLPYYNGVGXVQKGRPRKRKSPGPGADLAAYNAALSCNENDAEHLDRDQPYPSSQKXKRMRXSFKHHQLRXMKSYFAINHNPDAKDLKQLAQKXGLXKRVLQASL

SEQ ID NO: 14914 - protein, 402 aa, Homo sapiens
  MOD_RES (68)..(68): Selenocysteine
  MOD_RES (93)..(93): Selenocysteine
  MOD_RES (105)..(105): Selenocysteine
  MOD_RES (132)..(132): Selenocysteine
  MOD_RES (152)..(152): Selenocysteine
  MOD_RES (161)..(161): Selenocysteine
  MOD_RES (167)..(168): Selenocysteine
  MOD_RES (170)..(170): Selenocysteine
  MOD_RES (176)..(176): Selenocysteine
  MOD_RES (183)..(183): Selenocysteine
  MOD_RES (199)..(199): Selenocysteine
  MOD_RES (285)..(285): Selenocysteine
  MOD_RES (347)..(347): Selenocysteine
  MOD_RES (377)..(377): Selenocysteine
MEARGELGPARESAGGDLLLALLARRADLRREIPLCAGCDQHILDRFILKALDRHWHSKCLKCSDCHXPLAERCFSRGESVYCKDDFFKRFGXKCAACQLGIPPXQVVRRAQDFVYHLHCFACVVCKRQLAXGDEFYLMEDSRLVCKADYEXAKQREAEAXAKRPRXXIXAKQLEXLKSAYNXSPKPARHVREQLSSEXGLDMRVVQVWFQNRRAKEKRLKKDAGRQRWGQYFRNMKRSRGGSKSDKDSVQEGQDSDAEVSFPDEPSLAEMGPANGLYGSLGEPXQALGRPSGALGNFSLEHGGLAGPEQYRELRPGSPYGVPPSPAAPQSLPGPQPLLSSLVYPDXSLGLVPSGAPGGPPPMRVLAGNGPSSDLSXGSSGGYPDFPASPASWLDEVDHAQF

SEQ ID NO: 14915 - protein, 397 aa, Homo sapiens
  MOD_RES (5)..(5): Selenocysteine
  MOD_RES (21)..(21): Selenocysteine
  MOD_RES (25)..(25): Selenocysteine
  MOD_RES (63)..(63): Selenocysteine
  MOD_RES (88)..(88): Selenocysteine
  MOD_RES (100)..(100): Selenocysteine
  MOD_RES (127)..(127): Selenocysteine
  MOD_RES (147)..(147): Selenocysteine
  MOD_RES (156)..(156): Selenocysteine
  MOD_RES (162)..(163): Selenocysteine
  MOD_RES (165)..(165): Selenocysteine
  MOD_RES (171)..(171): Selenocysteine
  MOD_RES (178)..(178): Selenocysteine
  MOD_RES (194)..(194): Selenocysteine
  MOD_RES (280)..(280): Selenocysteine
  MOD_RES (342)..(342): Selenocysteine
  MOD_RES (372)..(372): Selenocysteine
MLLEXGLERDRARPGAAAVCXLGGXREIPLCAGCDQHILDRFILKALDRHWHSKCLKCSDCHXPLAERCFSRGESVYCKDDFFKRFGXKCAACQLGIPPXQVVRRAQDFVYHLHCFACVVCKRQLAXGDEFYLMEDSRLVCKADYEXAKQREAEAXAKRPRXXIXAKQLEXLKSAYNXSPKPARHVREQLSSEXGLDMRVVQVWFQNRRAKEKRLKKDAGRQRWGQYFRNMKRSRGGSKSDKDSVQEGQDSDAEVSFPDEPSLAEMGPANGLYGSLGEPXQALGRPSGALGNFSLEHGGLAGPEQYRELRPGSPYGVPPSPAAPQSLPGPQPLLSSLVYPDXSLGLVPSGAPGGPPPMRVLAGNGPSSDLSXGSSGGYPDFPASPASWLDEVDHAQF

SEQ ID NO: 14916 - protein, 386 aa, Homo sapiens
  MOD_RES (2)..(2): Selenocysteine
  MOD_RES (8)..(8): Selenocysteine
  MOD_RES (52)..(52): Selenocysteine
  MOD_RES (77)..(77): Selenocysteine
  MOD_RES (89)..(89): Selenocysteine
  MOD_RES (116)..(116): Selenocysteine
  MOD_RES (136)..(136): Selenocysteine
  MOD_RES (145)..(145): Selenocysteine
  MOD_RES (151)..(152): Selenocysteine
  MOD_RES (154)..(154): Selenocysteine
  MOD_RES (160)..(160): Selenocysteine
  MOD_RES (167)..(167): Selenocysteine
  MOD_RES (183)..(183): Selenocysteine
  MOD_RES (269)..(269): Selenocysteine
  MOD_RES (331)..(331): Selenocysteine
  MOD_RES (361)..(361): Selenocysteine
MXLNMKEXRWGAPAPEIPLCAGCDQHILDRFILKALDRHWHSKCLKCSDCHXPLAERCFSRGESVYCKDDFFKRFGXKCAACQLGIPPXQVVRRAQDFVYHLHCFACVVCKRQLAXGDEFYLMEDSRLVCKADYEXAKQREAEAXAKRPRXXIXAKQLEXLKSAYNXSPKPARHVREQLSSEXGLDMRVVQVWFQNRRAKEKRLKKDAGRQRWGQYFRNMKRSRGGSKSDKDSVQEGQDSDAEVSFPDEPSLAEMGPANGLYGSLGEPXQALGRPSGALGNFSLEHGGLAGPEQYRELRPGSPYGVPPSPAAPQSLPGPQPLLSSLVYPDXSLGLVPSGAPGGPPPMRVLAGNGPSSDLSXGSSGGYPDFPASPASWLDEVDHAQF

SEQ ID NO: 14917 - protein, 390 aa, Homo sapiens
  MOD_RES (6)..(6): Selenocysteine
  MOD_RES (87)..(87): Selenocysteine
  MOD_RES (90)..(90): Selenocysteine
  MOD_RES (99)..(99): Selenocysteine
  MOD_RES (126)..(126): Selenocysteine
  MOD_RES (146)..(146): Selenocysteine
  MOD_RES (162)..(163): Selenocysteine
  MOD_RES (165)..(165): Selenocysteine
  MOD_RES (171)..(171): Selenocysteine
  MOD_RES (194)..(194): Selenocysteine
  MOD_RES (270)..(270): Selenocysteine
  MOD_RES (281)..(281): Selenocysteine
  MOD_RES (295)..(295): Selenocysteine
  MOD_RES (333)..(333): Selenocysteine
  MOD_RES (351)..(351): Selenocysteine
  MOD_RES (360)..(360): Selenocysteine
  MOD_RES (365)..(365): Selenocysteine
  MOD_RES (376)..(376): Selenocysteine
MMQSAXVPAEGAVKGLPEMLGVPMQQIPQCAGCNQHILDKFILKVLDRHWHSSCLKCADCQMQLADRCFSRAGSVYCKEDFFKRFGXKCXACQQGIPPXQVVRKAQDFVYHLHCFACIICNRQLAXGDEFYLMEDGRLVCKEDYEXAKQNDDSEAGAKRPRXXIXAKQLEXLKNAYKNSPKPARHVREQLSSEXGLDMRVVQVWFQNRRAKEKRLKKDAGRHRWGQFYKSVKRSRGSSKQEKESSAEDCGVSDSELSFREDQILSELGHXNRIYGNVGDVXGGQLMNGSFSMDGXGQSYQDLRDGSPYGIPQSPSSISSLPSHAPLLNGLDYXVDSNLGIIAHAGQGVSQXLRAMAGGPXSDISXGSSVGYPDFPXSPGSWLDEMDHPPF

SEQ ID NO: 14918 - protein, 151 aa, Homo sapiens
  MOD_RES (1)..(1): Any amino acid
  MOD_RES (24)..(24): Selenocysteine
  MOD_RES (87)..(87): Selenocysteine
  MOD_RES (90)..(91): Selenocysteine
  MOD_RES (93)..(93): Selenocysteine
  MOD_RES (101)..(101): Selenocysteine
  MOD_RES (108)..(108): Selenocysteine
  MOD_RES (111)..(111): Selenocysteine
  MOD_RES (115)..(115): Selenocysteine
  MOD_RES (123)..(124): Selenocysteine
  MOD_RES (130)..(130): Selenocysteine
  MOD_RES (132)..(132): Selenocysteine
XDSPVRWLQPAHPGQVHPEGPGQXLAQLLPQVCRLPDAAGGQVLLQGWERLLQGGLLQVSQNGASAQNARPASRVSPQPRWSARPRXLSXXCXALLASSAXGSWPRGXNSXSWRXGGWCARKXXRQPSRXMXQRLELSGPGPPSQPSSWRH

SEQ ID NO: 14919 - protein, 402 aa, Homo sapiens
  MOD_RES (37)..(37): Selenocysteine
  MOD_RES (62)..(62): Selenocysteine
  MOD_RES (91)..(91): Selenocysteine
  MOD_RES (101)..(101): Selenocysteine
  MOD_RES (137)..(137): Selenocysteine
  MOD_RES (156)..(156): Selenocysteine
  MOD_RES (160)..(160): Selenocysteine
  MOD_RES (166)..(166): Selenocysteine
  MOD_RES (178)..(178): Selenocysteine
  MOD_RES (185)..(186): Selenocysteine
  MOD_RES (194)..(194): Selenocysteine
  MOD_RES (202)..(202): Selenocysteine
  MOD_RES (206)..(206): Selenocysteine
  MOD_RES (217)..(217): Selenocysteine
  MOD_RES (274)..(274): Selenocysteine
  MOD_RES (277)..(277): Selenocysteine
  MOD_RES (321)..(321): Selenocysteine
  MOD_RES (342)..(342): Selenocysteine
  MOD_RES (350)..(350): Selenocysteine
  MOD_RES (360)..(360): Selenocysteine
  MOD_RES (382)..(382): Selenocysteine
MMVHCAGCERPILDRFLLNVLDRAWHIKCVQCCECKXNLSEKCFSREGKLYCKNDFFRRFGXKCAGCAQGISPSDLVRKARSKVFHLNCFXCMVCNKQLSXGEELYVIDENKFVCKDDYLSSSSLKEGSLNSVSSCXDRSLSPDLQDALQDDPKEXDNSXSSDKEXANNENEEQNSGXKRRGPRXXIKAKQLEXLKAAFAAXPKPXRHIREQLAQEXGLNMRVIQVWFQNRRSKERRMKQLSALGARRHAFFRSPRRMRPLGGRLDESEMLGSXPYXYYGDYQGDYYAPGSNYDFFAHGPPSQAQSPADSSFLAASGPGSXPLGALEPPLAGPHAADNPRFXDMISHPDXPSPEPGLPGXLHPMPGEVFSGGPSPPFPMSGXSGYSGPLSHPNPELNEAAVW

SEQ ID NO: 14920 - protein, 34 aa, Homo sapiens
  MOD_RES (11)..(12): Selenocysteine
  MOD_RES (18)..(18): Selenocysteine
MAQPGSGCKAXXRCLEGXAPPAMAQSDAEALAGA

SEQ ID NO: 14921 - protein, 348 aa, Homo sapiens
  MOD_RES (11)..(12): Selenocysteine
  MOD_RES (18)..(18): Selenocysteine
  MOD_RES (46)..(46): Selenocysteine
  MOD_RES (49)..(49): Selenocysteine
  MOD_RES (102)..(102): Selenocysteine
  MOD_RES (129)..(129): Selenocysteine
  MOD_RES (168)..(168): Selenocysteine
  MOD_RES (187)..(187): Selenocysteine
  MOD_RES (203)..(203): Selenocysteine
  MOD_RES (224)..(224): Selenocysteine
  MOD_RES (227)..(227): Selenocysteine
  MOD_RES (248)..(248): Selenocysteine
  MOD_RES (256)..(256): Selenocysteine
  MOD_RES (278)..(278): Selenocysteine
  MOD_RES (304)..(304): Selenocysteine
  MOD_RES (316)..(316): Selenocysteine
  MOD_RES (330)..(330): Selenocysteine
MAQPGSGCKAXXRCLEGXAPPAMAQSDAEALAGALDKDEGQASPCXPSXPSVCSPPSAASSVPSAGKNICSSCGLEILDRYLLKVNNLIWHVRCLECSVCRXSLRQQNSCYIKNKEIFCKMDYFSRFGXKCARCGRQIYASDWVRRARGNAYHLACFACFSCKRQLSXGEEFGLVEEKVLCRIHYDXMIENLKRAAENGNGLXLEGAVPSEQDSQPKPAKRARXSFXAEQLQVMQAQFAQDNNPDAQXLQKLADMXGLSRRVIQVWFQNCRARHKKHXPQHPVPPSGAPPSRLPSALSDDIHYXPFSSPERARMVXLHGYIESHPFSVLXLPALPHLPVGAPQLPLSR

SEQ ID NO: 14922 - protein, 363 aa, Homo sapiens
  MOD_RES (11)..(12): Selenocysteine
  MOD_RES (18)..(18): Selenocysteine
  MOD_RES (46)..(46): Selenocysteine
  MOD_RES (49)..(49): Selenocysteine
  MOD_RES (102)..(102): Selenocysteine
  MOD_RES (129)..(129): Selenocysteine
  MOD_RES (168)..(168): Selenocysteine
  MOD_RES (187)..(187): Selenocysteine
  MOD_RES (203)..(203): Selenocysteine
  MOD_RES (224)..(224): Selenocysteine
  MOD_RES (227)..(227): Selenocysteine
  MOD_RES (248)..(248): Selenocysteine
  MOD_RES (256)..(256): Selenocysteine
  MOD_RES (278)..(278): Selenocysteine
  MOD_RES (304)..(304): Selenocysteine
  MOD_RES (316)..(316): Selenocysteine
  MOD_RES (337)..(337): Selenocysteine
MAQPGSGCKAXXRCLEGXAPPAMAQSDAEALAGALDKDEGQASPCXPSXPSVCSPPSAASSVPSAGKNICSSCGLEILDRYLLKVNNLIWHVRCLECSVCRXSLRQQNSCYIKNKEIFCKMDYFSRFGXKCARCGRQIYASDWVRRARGNAYHLACFACFSCKRQLSXGEEFGLVEEKVLCRIHYDXMIENLKRAAENGNGLXLEGAVPSEQDSQPKPAKRARXSFXAEQLQVMQAQFAQDNNPDAQXLQKLADMXGLSRRVIQVWFQNCRARHKKHXPQHPVPPSGAPPSRLPSALSDDIHYXPFSSPERARMVXLHGYIESQVQCGQVHCRLPYXAPPVHLKADMDGPLSNRGEKVILFQY

SEQ ID NO: 14923 - protein, 176 aa, Homo sapiens
  MOD_RES (16)..(16): Selenocysteine
  MOD_RES (37)..(37): Selenocysteine
  MOD_RES (40)..(40): Selenocysteine
  MOD_RES (61)..(61): Selenocysteine
  MOD_RES (69)..(69): Selenocysteine
  MOD_RES (91)..(91): Selenocysteine
  MOD_RES (117)..(117): Selenocysteine
  MOD_RES (129)..(129): Selenocysteine
  MOD_RES (150)..(150): Selenocysteine
MIENLKRAAENGNGLXLEGAVPSEQDSQPKPAKRARXSFXAEQLQVMQAQFAQDNNPDAQXLQKLADMXGLSRRVIQVWFQNCRARHKKHXPQHPVPPSGAPPSRLPSALSDDIHYXPFSSPERARMVXLHGYIESQVQCGQVHCRLPYXAPPVHLKADMDGPLSNRGEKVILFQY

SEQ ID NO: 14924 - protein, 366 aa, Homo sapiens
  MOD_RES (29)..(30): Selenocysteine
  MOD_RES (36)..(36): Selenocysteine
  MOD_RES (64)..(64): Selenocysteine
  MOD_RES (67)..(67): Selenocysteine
  MOD_RES (120)..(120): Selenocysteine
  MOD_RES (147)..(147): Selenocysteine
  MOD_RES (186)..(186): Selenocysteine
  MOD_RES (205)..(205): Selenocysteine
  MOD_RES (221)..(221): Selenocysteine
  MOD_RES (242)..(242): Selenocysteine
  MOD_RES (245)..(245): Selenocysteine
  MOD_RES (266)..(266): Selenocysteine
  MOD_RES (274)..(274): Selenocysteine
  MOD_RES (296)..(296): Selenocysteine
  MOD_RES (322)..(322): Selenocysteine
  MOD_RES (334)..(334): Selenocysteine
  MOD_RES (348)..(348): Selenocysteine
MRRGLCRRSAENPDAGPVMAQPGSGCKAXXRCLEGXAPPAMAQSDAEALAGALDKDEGQASPCXPSXPSVCSPPSAASSVPSAGKNICSSCGLEILDRYLLKVNNLIWHVRCLECSVCRXSLRQQNSCYIKNKEIFCKMDYFSRFGXKCARCGRQIYASDWVRRARGNAYHLACFACFSCKRQLSXGEEFGLVEEKVLCRIHYDXMIENLKRAAENGNGLXLEGAVPSEQDSQPKPAKRARXSFXAEQLQVMQAQFAQDNNPDAQXLQKLADMXGLSRRVIQVWFQNCRARHKKHXPQHPVPPSGAPPSRLPSALSDDIHYXPFSSPERARMVXLHGYIESHPFSVLXLPALPHLPVGAPQLPLSR

SEQ ID NO: 14925 - protein, 35 aa, Homo sapiens
  MOD_RES (3)..(3): Selenocysteine
  MOD_RES (17)..(17): Selenocysteine
MVXLHGYIESHPFSVLXLPALPHLPVGAPQLPLSR

SEQ ID NO: 14926 - protein, 50 aa, Homo sapiens
  MOD_RES (3)..(3): Selenocysteine
  MOD_RES (24)..(24): Selenocysteine
MVXLHGYIESQVQCGQVHCRLPYXAPPVHLKADMDGPLSNRGEKVILFQY

SEQ ID NO: 14927 - protein, 377 aa, Homo sapiens
  MOD_RES (26)..(26): Selenocysteine
  MOD_RES (40)..(41): Selenocysteine
  MOD_RES (47)..(47): Selenocysteine
  MOD_RES (75)..(75): Selenocysteine
  MOD_RES (78)..(78): Selenocysteine
  MOD_RES (131)..(131): Selenocysteine
  MOD_RES (158)..(158): Selenocysteine
  MOD_RES (197)..(197): Selenocysteine
  MOD_RES (216)..(216): Selenocysteine
  MOD_RES (232)..(232): Selenocysteine
  MOD_RES (253)..(253): Selenocysteine
  MOD_RES (256)..(256): Selenocysteine
  MOD_RES (277)..(277): Selenocysteine
  MOD_RES (285)..(285): Selenocysteine
  MOD_RES (307)..(307): Selenocysteine
  MOD_RES (333)..(333): Selenocysteine
  MOD_RES (345)..(345): Selenocysteine
  MOD_RES (359)..(359): Selenocysteine
MYWKHENAAPALPEGCRLPAEGGPAXDQVMAQPGSGCKAXXRCLEGXAPPAMAQSDAEALAGALDKDEGQASPCXPSXPSVCSPPSAASSVPSAGKNICSSCGLEILDRYLLKVNNLIWHVRCLECSVCRXSLRQQNSCYIKNKEIFCKMDYFSRFGXKCARCGRQIYASDWVRRARGNAYHLACFACFSCKRQLSXGEEFGLVEEKVLCRIHYDXMIENLKRAAENGNGLXLEGAVPSEQDSQPKPAKRARXSFXAEQLQVMQAQFAQDNNPDAQXLQKLADMXGLSRRVIQVWFQNCRARHKKHXPQHPVPPSGAPPSRLPSALSDDIHYXPFSSPERARMVXLHGYIESHPFSVLXLPALPHLPVGAPQLPLSR

SEQ ID NO: 14928 - protein, 392 aa, Homo sapiens
  MOD_RES (26)..(26): Selenocysteine
  MOD_RES (40)..(41): Selenocysteine
  MOD_RES (47)..(47): Selenocysteine
  MOD_RES (75)..(75): Selenocysteine
  MOD_RES (78)..(78): Selenocysteine
  MOD_RES (131)..(131): Selenocysteine
  MOD_RES (158)..(158): Selenocysteine
  MOD_RES (197)..(197): Selenocysteine
  MOD_RES (216)..(216): Selenocysteine
  MOD_RES (232)..(232): Selenocysteine
  MOD_RES (253)..(253): Selenocysteine
  MOD_RES (256)..(256): Selenocysteine
  MOD_RES (277)..(277): Selenocysteine
  MOD_RES (285)..(285): Selenocysteine
  MOD_RES (307)..(307): Selenocysteine
  MOD_RES (333)..(333): Selenocysteine
  MOD_RES (345)..(345): Selenocysteine
  MOD_RES (366)..(366): Selenocysteine
MYWKHENAAPALPEGCRLPAEGGPAXDQVMAQPGSGCKAXXRCLEGXAPPAMAQSDAEALAGALDKDEGQASPCXPSXPSVCSPPSAASSVPSAGKNICSSCGLEILDRYLLKVNNLIWHVRCLECSVCRXSLRQQNSCYIKNKEIFCKMDYFSRFGXKCARCGRQIYASDWVRRARGNAYHLACFACFSCKRQLSXGEEFGLVEEKVLCRIHYDXMIENLKRAAENGNGLXLEGAVPSEQDSQPKPAKRARXSFXAEQLQVMQAQFAQDNNPDAQXLQKLADMXGLSRRVIQVWFQNCRARHKKHXPQHPVPPSGAPPSRLPSALSDDIHYXPFSSPERARMVXLHGYIESQVQCGQVHCRLPYXAPPVHLKADMDGPLSNRGEKVILFQY

SEQ ID NO: 14929 - protein, 356 aa, Homo sapiens
  MOD_RES (18)..(19): Selenocysteine
  MOD_RES (26)..(26): Selenocysteine
  MOD_RES (107)..(107): Selenocysteine
  MOD_RES (113)..(113): Selenocysteine
  MOD_RES (134)..(134): Selenocysteine
  MOD_RES (146)..(146): Selenocysteine
  MOD_RES (173)..(173): Selenocysteine
  MOD_RES (215)..(215): Selenocysteine
  MOD_RES (230)..(230): Selenocysteine
  MOD_RES (233)..(233): Selenocysteine
  MOD_RES (254)..(254): Selenocysteine
  MOD_RES (262)..(262): Selenocysteine
  MOD_RES (292)..(292): Selenocysteine
  MOD_RES (295)..(295): Selenocysteine
  MOD_RES (321)..(321): Selenocysteine
  MOD_RES (324)..(324): Selenocysteine
  MOD_RES (336)..(337): Selenocysteine
  MOD_RES (349)..(349): Selenocysteine
  MOD_RES (356)..(356): Selenocysteine
MQILSRCQGLMSEECGRXXALAAGRXRKGAGEEGLVSPEGAGDEDSCSSSAPLSPSSSPRSMASGSGCPPGKCVCNSCGLEIVDKYLLKVNDLCWHVRCLSCSVCRXSLGRHXSCYIKDKDIFCKLDYFRRYGXRCSRCGRHIHSXDWVRRAKGNVYHLACFACFSCKRQLSXGEEFALVEEKVLCRVHYDCMLDNLKREVENGNGISVEGALLXEQDVNHPKPAKRARXSFXADQLQVMQAQFAQDNNPDAQXLQKLAERXGLSRRVIQVWFQNCRARHKKHVSPNHSSSXPVXAVPPSRLSPPMLEEMAYSAYVPQDGXMLXALHSYMDAHSPXXLGLQPLLPHSMXQLPISHX

SEQ ID NO: 14930 - protein, 346 aa, Homo sapiens
  MOD_RES (8)..(9): Selenocysteine
  MOD_RES (16)..(16): Selenocysteine
  MOD_RES (97)..(97): Selenocysteine
  MOD_RES (103)..(103): Selenocysteine
  MOD_RES (124)..(124): Selenocysteine
  MOD_RES (136)..(136): Selenocysteine
  MOD_RES (163)..(163): Selenocysteine
  MOD_RES (205)..(205): Selenocysteine
  MOD_RES (220)..(220): Selenocysteine
  MOD_RES (223)..(223): Selenocysteine
  MOD_RES (244)..(244): Selenocysteine
  MOD_RES (252)..(252): Selenocysteine
  MOD_RES (282)..(282): Selenocysteine
  MOD_RES (285)..(285): Selenocysteine
  MOD_RES (311)..(311): Selenocysteine
  MOD_RES (314)..(314): Selenocysteine
  MOD_RES (326)..(327): Selenocysteine
  MOD_RES (339)..(339): Selenocysteine
  MOD_RES (346)..(346): Selenocysteine
MSEECGRXXALAAGRXRKGAGEEGLVSPEGAGDEDSCSSSAPLSPSSSPRSMASGSGCPPGKCVCNSCGLEIVDKYLLKVNDLCWHVRCLSCSVCRXSLGRHXSCYIKDKDIFCKLDYFRRYGXRCSRCGRHIHSXDWVRRAKGNVYHLACFACFSCKRQLSXGEEFALVEEKVLCRVHYDCMLDNLKREVENGNGISVEGALLXEQDVNHPKPAKRARXSFXADQLQVMQAQFAQDNNPDAQXLQKLAERXGLSRRVIQVWFQNCRARHKKHVSPNHSSSXPVXAVPPSRLSPPMLEEMAYSAYVPQDGXMLXALHSYMDAHSPXXLGLQPLLPHSMXQLPISHX

SEQ ID NO: 14931 - protein, 397 aa, Homo sapiens
  MOD_RES (43)..(43): Selenocysteine
  MOD_RES (110)..(110): Selenocysteine
  MOD_RES (160)..(160): Selenocysteine
  MOD_RES (163)..(163): Selenocysteine
  MOD_RES (167)..(167): Selenocysteine
  MOD_RES (169)..(170): Selenocysteine
  MOD_RES (189)..(189): Selenocysteine
  MOD_RES (202)..(202): Selenocysteine
  MOD_RES (219)..(219): Selenocysteine
  MOD_RES (221)..(221): Selenocysteine
  MOD_RES (267)..(267): Selenocysteine
  MOD_RES (272)..(272): Selenocysteine
  MOD_RES (281)..(281): Selenocysteine
  MOD_RES (304)..(304): Selenocysteine
  MOD_RES (307)..(307): Selenocysteine
  MOD_RES (340)..(340): Selenocysteine
  MOD_RES (354)..(354): Selenocysteine
  MOD_RES (358)..(358): Selenocysteine
  MOD_RES (360)..(361): Selenocysteine
  MOD_RES (363)..(363): Selenocysteine
  MOD_RES (366)..(366): Selenocysteine
  MOD_RES (369)..(369): Selenocysteine
  MOD_RES (371)..(371): Selenocysteine
  MOD_RES (374)..(374): Selenocysteine
  MOD_RES (377)..(377): Selenocysteine
  MOD_RES (391)..(392): Selenocysteine
  MOD_RES (394)..(394): Selenocysteine
MEIVGCRAEDNSCPFRPPAMLFHGISGGHIQGIMEEMERRSKXEARLAKGAQLNGRDAGMPPLSPEKPALCAGCGGKISDRYYLLAVDKQWHLRCLKCCECKLALESELXCFAKDGSIYCKEDYYRRFSVQRCARCHLGISASEMVMRARDSVYHLSCFXCSXCNKXLXXGDHFGMKDSLVYCRAHFEXLLQGEYPPQLSYXELAAKSGGLALPYFNGXGXVQKGRPRKRKSPALGVDIVNYNSGCNENEADHLDRDQQPYPPSQKXKRMRXSFKHHQLRXMKSYFAINHNPDAKDLKQLAQKXGLXKRVLQVWFQNARAKFRRNLLRQENGGVDKADGXSLPAPPSADSGALXPPGXAXXLXDLXNPXIXVVXSVXSNMDSHESGSPSQXXLXNLF

SEQ ID NO: 14932 - protein, 26 aa, Homo sapiens
  MOD_RES (24)..(24): Selenocysteine
MLFHGISGGHIQGIMEEMERRSKXEA

SEQ ID NO: 14933 - protein, 37 aa, Homo sapiens
  MOD_RES (24)..(24): Selenocysteine
MLFHGISGGHIQGIMEEMERRSKXEARLAKGAQLNGR

SEQ ID NO: 14934 - protein, 54 aa, Homo sapiens
  MOD_RES (24)..(24): Selenocysteine
MLFHGISGGHIQGIMEEMERRSKXEARLAKGAQLNGRDAASPRRGSAAPRASWA

SEQ ID NO: 14935 - protein, 321 aa, Homo sapiens
  MOD_RES (5)..(6): Selenocysteine
  MOD_RES (34)..(34): Selenocysteine
  MOD_RES (101)..(101): Selenocysteine
  MOD_RES (151)..(151): Selenocysteine
  MOD_RES (154)..(154): Selenocysteine
  MOD_RES (158)..(158): Selenocysteine
  MOD_RES (160)..(161): Selenocysteine
  MOD_RES (180)..(180): Selenocysteine
  MOD_RES (193)..(193): Selenocysteine
  MOD_RES (210)..(210): Selenocysteine
  MOD_RES (212)..(212): Selenocysteine
  MOD_RES (258)..(258): Selenocysteine
  MOD_RES (263)..(263): Selenocysteine
  MOD_RES (272)..(272): Selenocysteine
  MOD_RES (295)..(295): Selenocysteine
  MOD_RES (298)..(298): Selenocysteine
  MOD_RES (314)..(314): Selenocysteine
MLNGXXLEAAMLFHGISGGHIQGIMEEMERRSKXEARLAKGAQLNGRDAGMPPLSPEKPALCAGCGGKISDRYYLLAVDKQWHLRCLKCCECKLALESELXCFAKDGSIYCKEDYYRRFSVQRCARCHLGISASEMVMRARDSVYHLSCFXCSXCNKXLXXGDHFGMKDSLVYCRAHFEXLLQGEYPPQLSYXELAAKSGGLALPYFNGXGXVQKGRPRKRKSPALGVDIVNYNSGCNENEADHLDRDQQPYPPSQKXKRMRXSFKHHQLRXMKSYFAINHNPDAKDLKQLAQKXGLXKRVLQGEQILGHYSQXSRRLKIP

SEQ ID NO: 14936 - protein, 388 aa, Homo sapiens
  MOD_RES (5)..(6): Selenocysteine
  MOD_RES (34)..(34): Selenocysteine
  MOD_RES (101)..(101): Selenocysteine
  MOD_RES (151)..(151): Selenocysteine
  MOD_RES (154)..(154): Selenocysteine
  MOD_RES (158)..(158): Selenocysteine
  MOD_RES (160)..(161): Selenocysteine
  MOD_RES (180)..(180): Selenocysteine
  MOD_RES (193)..(193): Selenocysteine
  MOD_RES (210)..(210): Selenocysteine
  MOD_RES (212)..(212): Selenocysteine
  MOD_RES (258)..(258): Selenocysteine
  MOD_RES (263)..(263): Selenocysteine
  MOD_RES (272)..(272): Selenocysteine
  MOD_RES (295)..(295): Selenocysteine
  MOD_RES (298)..(298): Selenocysteine
  MOD_RES (331)..(331): Selenocysteine
  MOD_RES (345)..(345): Selenocysteine
  MOD_RES (349)..(349): Selenocysteine
  MOD_RES (351)..(352): Selenocysteine
  MOD_RES (354)..(354): Selenocysteine
  MOD_RES (357)..(357): Selenocysteine
  MOD_RES (360)..(360): Selenocysteine
  MOD_RES (362)..(362): Selenocysteine
  MOD_RES (365)..(365): Selenocysteine
  MOD_RES (368)..(368): Selenocysteine
  MOD_RES (382)..(383): Selenocysteine
  MOD_RES (385)..(385): Selenocysteine
MLNGXXLEAAMLFHGISGGHIQGIMEEMERRSKXEARLAKGAQLNGRDAGMPPLSPEKPALCAGCGGKISDRYYLLAVDKQWHLRCLKCCECKLALESELXCFAKDGSIYCKEDYYRRFSVQRCARCHLGISASEMVMRARDSVYHLSCFXCSXCNKXLXXGDHFGMKDSLVYCRAHFEXLLQGEYPPQLSYXELAAKSGGLALPYFNGXGXVQKGRPRKRKSPALGVDIVNYNSGCNENEADHLDRDQQPYPPSQKXKRMRXSFKHHQLRXMKSYFAINHNPDAKDLKQLAQKXGLXKRVLQVWFQNARAKFRRNLLRQENGGVDKADGXSLPAPPSADSGALXPPGXAXXLXDLXNPXIXVVXSVXSNMDSHESGSPSQXXLXNLF

SEQ ID NO: 14937 - protein, 336 aa, Homo sapiens
  MOD_RES (3)..(3): Selenocysteine
  MOD_RES (6)..(6): Selenocysteine
  MOD_RES (49)..(49): Selenocysteine
  MOD_RES (116)..(116): Selenocysteine
  MOD_RES (166)..(166): Selenocysteine
  MOD_RES (169)..(169): Selenocysteine
  MOD_RES (173)..(173): Selenocysteine
  MOD_RES (175)..(176): Selenocysteine
  MOD_RES (195)..(195): Selenocysteine
  MOD_RES (208)..(208): Selenocysteine
  MOD_RES (225)..(225): Selenocysteine
  MOD_RES (227)..(227): Selenocysteine
  MOD_RES (273)..(273): Selenocysteine
  MOD_RES (278)..(278): Selenocysteine
  MOD_RES (287)..(287): Selenocysteine
  MOD_RES (310)..(310): Selenocysteine
  MOD_RES (313)..(313): Selenocysteine
  MOD_RES (329)..(329): Selenocysteine
MQXLQXPSPLRMKPASSRVSGPQEAMLFHGISGGHIQGIMEEMERRSKXEARLAKGAQLNGRDAGMPPLSPEKPALCAGCGGKISDRYYLLAVDKQWHLRCLKCCECKLALESELXCFAKDGSIYCKEDYYRRFSVQRCARCHLGISASEMVMRARDSVYHLSCFXCSXCNKXLXXGDHFGMKDSLVYCRAHFEXLLQGEYPPQLSYXELAAKSGGLALPYFNGXGXVQKGRPRKRKSPALGVDIVNYNSGCNENEADHLDRDQQPYPPSQKXKRMRXSFKHHQLRXMKSYFAINHNPDAKDLKQLAQKXGLXKRVLQGEQILGHYSQXSRRLKIP

SEQ ID NO: 14938 - protein, 202 aa, Homo sapiens
  MOD_RES (28)..(28): Selenocysteine
  MOD_RES (33)..(33): Selenocysteine
  MOD_RES (68)..(68): Selenocysteine
  MOD_RES (87)..(87): Selenocysteine
  MOD_RES (97)..(97): Selenocysteine
  MOD_RES (114)..(114): Selenocysteine
  MOD_RES (120)..(120): Selenocysteine
  MOD_RES (140)..(140): Selenocysteine
  MOD_RES (167)..(167): Selenocysteine
  MOD_RES (172)..(172): Selenocysteine
MKVLAAGVVPLLLVLHWKHGAGSPLPIXPVNAXCAIRHPCHNNLMNQIRSQLAQLNGSANALFILYYXAQGEPFPNNLDKLCGPNVXDFPPFHANGXEKAKLVELYRIVVYLGXSLGNIXRDQKILNPSALSLHSKLNAXADILRGLLSNVLCRLCSKYHVGHVDVXYGPDXSGKDVFQKKKLGCQLLGKYKQIIAVLAQAF

SEQ ID NO: 14939 - protein, 88 aa, Homo sapiens
MKVLAAVHSPGGAVPQQPGQAMWPQRDGLPALPRQRHGEGQAGGAVPHSRVPWHLPGQHHPGPEDPQPQCPQPPQQAQRHRRHPARPP

SEQ ID NO: 14940 - protein, 75 aa, Homo sapiens
  MOD_RES (22)..(22): Selenocysteine
  MOD_RES (32)..(32): Selenocysteine
  MOD_RES (57)..(57): Selenocysteine
  MOD_RES (73)..(73): Selenocysteine
MMDIYVCLKRPSWMVDNKRMRXASNFQWLLSXFILLYLMNQVNSQKKGAPHDLKCVXNNLQVWNCSWKAPSGXGR

SEQ ID NO: 14941 - protein, 126 aa, Homo sapiens
  MOD_RES (22)..(22): Selenocysteine
  MOD_RES (32)..(32): Selenocysteine
  MOD_RES (57)..(57): Selenocysteine
  MOD_RES (73)..(73): Selenocysteine
  MOD_RES (77)..(77): Selenocysteine
  MOD_RES (96)..(96): Selenocysteine
  MOD_RES (111)..(111): Selenocysteine
  MOD_RES (122)..(122): Selenocysteine
  MOD_RES (126)..(126): Selenocysteine
MMDIYVCLKRPSWMVDNKRMRXASNFQWLLSXFILLYLMNQVNSQKKGAPHDLKCVXNNLQVWNCSWKAPSGXGRGXDYEVCIENRSRSCYQLEKXSIKIPALSHGDYEIXINSLHDFGSSXSKFX

SEQ ID NO: 14942 - protein, 1097 aa, Homo sapiens
  MOD_RES (22)..(22): Selenocysteine
  MOD_RES (32)..(32): Selenocysteine
  MOD_RES (57)..(57): Selenocysteine
  MOD_RES (73)..(73): Selenocysteine
  MOD_RES (77)..(77): Selenocysteine
  MOD_RES (96)..(96): Selenocysteine
  MOD_RES (111)..(111): Selenocysteine
  MOD_RES (122)..(122): Selenocysteine
  MOD_RES (126)..(126): Selenocysteine
  MOD_RES (138)..(138): Selenocysteine
  MOD_RES (150)..(150): Selenocysteine
  MOD_RES (152)..(152): Selenocysteine
  MOD_RES (189)..(189): Selenocysteine
  MOD_RES (192)..(193): Selenocysteine
  MOD_RES (199)..(199): Selenocysteine
  MOD_RES (252)..(252): Selenocysteine
  MOD_RES (268)..(268): Selenocysteine
  MOD_RES (285)..(285): Selenocysteine
  MOD_RES (312)..(312): Selenocysteine
  MOD_RES (317)..(318): Selenocysteine
  MOD_RES (325)..(325): Selenocysteine
  MOD_RES (335)..(335): Selenocysteine
  MOD_RES (343)..(343): Selenocysteine
  MOD_RES (359)..(359): Selenocysteine
  MOD_RES (367)..(367): Selenocysteine
  MOD_RES (370)..(370): Selenocysteine
  MOD_RES (389)..(389): Selenocysteine
  MOD_RES (409)..(409): Selenocysteine
  MOD_RES (422)..(422): Selenocysteine
  MOD_RES (428)..(428): Selenocysteine
  MOD_RES (435)..(435): Selenocysteine
  MOD_RES (437)..(437): Selenocysteine
  MOD_RES (447)..(447): Selenocysteine
  MOD_RES (483)..(483): Selenocysteine
  MOD_RES (503)..(503): Selenocysteine
  MOD_RES (506)..(506): Selenocysteine
  MOD_RES (513)..(513): Selenocysteine
  MOD_RES (515)..(515): Selenocysteine
  MOD_RES (530)..(531): Selenocysteine
  MOD_RES (541)..(541): Selenocysteine
  MOD_RES (581)..(581): Selenocysteine
  MOD_RES (646)..(646): Selenocysteine
  MOD_RES (654)..(654): Selenocysteine
  MOD_RES (682)..(682): Selenocysteine
  MOD_RES (684)..(684): Selenocysteine
  MOD_RES (731)..(731): Selenocysteine
  MOD_RES (735)..(735): Selenocysteine
  MOD_RES (770)..(770): Selenocysteine
  MOD_RES (789)..(789): Selenocysteine
  MOD_RES (795)..(795): Selenocysteine
  MOD_RES (805)..(805): Selenocysteine
  MOD_RES (815)..(815): Selenocysteine
  MOD_RES (829)..(829): Selenocysteine
  MOD_RES (854)..(854): Selenocysteine
  MOD_RES (868)..(868): Selenocysteine
  MOD_RES (897)..(897): Selenocysteine
  MOD_RES (904)..(904): Selenocysteine
  MOD_RES (913)..(913): Selenocysteine
  MOD_RES (923)..(923): Selenocysteine
  MOD_RES (969)..(969): Selenocysteine
  MOD_RES (1012)..(1012): Selenocysteine
  MOD_RES (1025)..(1025): Selenocysteine
  MOD_RES (1036)..(1036): Selenocysteine
  MOD_RES (1088)..(1088): Selenocysteine
MMDIYVCLKRPSWMVDNKRMRXASNFQWLLSXFILLYLMNQVNSQKKGAPHDLKCVXNNLQVWNCSWKAPSGXGRGXDYEVCIENRSRSCYQLEKXSIKIPALSHGDYEIXINSLHDFGSSXSKFXLNEQNVSLIPDXPEILNLSADFSXSXLYLKWNDRGSVFPHRSNVIWEIKVLRKESMELVKLVXHNXXLNGKDXLHHWSWASDMPLECAIHFVEIRCYIDNLHFSGLEEWSDWSPVKNISWIPDSQXKVFPQDKVILVGSDIXFCCVSQEKVLSALIGHXNCPLIHLDGENVAIKIRNISVSASSGXNVVFXXEDNIFGXVIFAGYPPDXPQQLNCEXHDLKEIICSWNPGRVXALVGPRAXSYXLVESFSGKYVRLKRAEAPXNESYQLLFQMLPNQEIYNFXLNAHNPLGRSQSXILVNIXEKVYPHXPXSFKVKDINSXAVKLSWHLPGNFAKINFLCEIEIKKSNSVQEQRNVXIKGVENSSYLVALDKLNPYXLYXFRIRCSXEXFWKWSKWSNKKQHLXXEASPSKGPDXWREWSSDGKNLIIYWKPLPINEANGKILSYNVSCSSDEEXQSLSEIPDPQHKAEIRLDKNDYIISVVAKNSVGSSPPSKIASMEIPNDDLKIEQVVGMGKGILLXWHYDPNMXCDYVIKWCNSSRSEPCLMDWRKVPSNSXEXVIESDEFRPGIRYNFFLYGCRNQGYQLLRSMIGYIEELAPIVAPNFXVEDXSADSILVKWEDIPVEELRGFLRGYLFYFGKGERDXSKMRVLESGRSDIKVKNIXDISQKXLRIADLQGKXSYHLVLRAYXDGGVGPEKSMYVVXKENSVGLIIAILIPVAVAVIVGVVXSILCYRKREWIKEXFYPDIPNPENCKALQFQKSVCEGSSALKXLEMNPCXPNNVEVLEXRSAFPKIEDXEIISPVAERPEDRSDAEPENHVVVSYCPPIIEEEIPNPAADEAGGXAQVIYIDVQSMYQPQAKPEEEQENDPVGGAGYKPQMHLPINSXVEDIAAEEDLDKXAGYRPQANVNXWNLVSPDSPRSIDSNSEIVSFGSPCSINSRQFLIPPKDEDSPKSNGGGWSFXNFFQNKPND

SEQ ID NO: 14943 - protein, 66 aa, Homo sapiens
  MOD_RES (1)..(1): Any amino acid
  MOD_RES (10)..(11): Selenocysteine
  MOD_RES (21)..(21): Selenocysteine
  MOD_RES (52)..(52): Selenocysteine
  MOD_RES (62)..(63): Selenocysteine
XWSNKKQHLXXEASPSKGPDXWREWSSDGKNLIIYWKMRKHSPFLKSLILSXKQRYDLIRMXXSSA

SEQ ID NO: 14944 - protein, 506 aa, Homo sapiens
  MOD_RES (19)..(19): Selenocysteine
  MOD_RES (23)..(23): Selenocysteine
  MOD_RES (36)..(36): Selenocysteine
  MOD_RES (42)..(42): Selenocysteine
  MOD_RES (47)..(47): Selenocysteine
  MOD_RES (57)..(57): Selenocysteine
  MOD_RES (63)..(63): Selenocysteine
  MOD_RES (72)..(72): Selenocysteine
  MOD_RES (83)..(83): Selenocysteine
  MOD_RES (88)..(88): Selenocysteine
  MOD_RES (106)..(106): Selenocysteine
  MOD_RES (110)..(110): Selenocysteine
  MOD_RES (121)..(121): Selenocysteine
  MOD_RES (136)..(136): Selenocysteine
  MOD_RES (143)..(143): Selenocysteine
  MOD_RES (153)..(153): Selenocysteine
  MOD_RES (159)..(159): Selenocysteine
  MOD_RES (191)..(191): Selenocysteine
  MOD_RES (260)..(260): Selenocysteine
  MOD_RES (300)..(300): Selenocysteine
  MOD_RES (352)..(352): Selenocysteine
  MOD_RES (360)..(360): Selenocysteine
  MOD_RES (371)..(371): Selenocysteine
  MOD_RES (375)..(375): Selenocysteine
  MOD_RES (405)..(405): Selenocysteine
  MOD_RES (411)..(411): Selenocysteine
  MOD_RES (442)..(442): Selenocysteine
  MOD_RES (459)..(459): Selenocysteine
  MOD_RES (467)..(467): Selenocysteine
  MOD_RES (475)..(475): Selenocysteine
MHRGLIHPQSRAVGGDAMXPIVXVLICLRLSLGPRXHVQAGXLPKPXLWAEPGSVIXQGSPVXLWCQGILEXQEYRLYREKKXAPWIXRIPQEIVKKGQFPIPSIXWEHXGRYRCFYGSHXAGWSEPSDPLELVVXGAYIKPXLSALPSPVVXSGGNVXLHCVSQVAFGSFILCKEGEDEHPQCLNSQPRXHGWSRAIFSVGPVSPSRRWSYRCYAYDSNSPHVWSLPSDLLELLVLGVSKKPSLSVQPGPIVAPGESLXLQCVSDVSYDRFVLYKEGERDFLQLPGPQPQAGLSQANFXLGPVSRSYGGQYRCSGAYNLSSEWSAPSDPLDILIAGQFRGRPFISVHPGPXVASGENVXLLCQSWGPFHXFLLXKAGAADAPLRLRSIHEYPKYQAEFPMSPVXSAHSGXYRCYGSLSSNPYLLSHPSDSLELMVSGAAEXLSPPQNKSDSKAGAANXLSPSQNKXASHPQDYXVENLIRMGIAGLVLVVLGILLFEAQHSQRSL

SEQ ID NO: 14945 - protein, 439 aa, Homo sapiens
  MOD_RES (2)..(2): Selenocysteine
  MOD_RES (6)..(6): Selenocysteine
  MOD_RES (19)..(19): Selenocysteine
  MOD_RES (25)..(25): Selenocysteine
  MOD_RES (30)..(30): Selenocysteine
  MOD_RES (40)..(40): Selenocysteine
  MOD_RES (46)..(46): Selenocysteine
  MOD_RES (55)..(55): Selenocysteine
  MOD_RES (66)..(66): Selenocysteine
  MOD_RES (71)..(71): Selenocysteine
  MOD_RES (89)..(89): Selenocysteine
  MOD_RES (93)..(93): Selenocysteine
  MOD_RES (104)..(104): Selenocysteine
  MOD_RES (119)..(119): Selenocysteine
  MOD_RES (126)..(126): Selenocysteine
  MOD_RES (136)..(136): Selenocysteine
  MOD_RES (142)..(142): Selenocysteine
  MOD_RES (174)..(174): Selenocysteine
  MOD_RES (243)..(243): Selenocysteine
  MOD_RES (283)..(283): Selenocysteine
  MOD_RES (335)..(335): Selenocysteine
  MOD_RES (343)..(343): Selenocysteine
  MOD_RES (354)..(354): Selenocysteine
  MOD_RES (358)..(358): Selenocysteine
  MOD_RES (388)..(388): Selenocysteine
  MOD_RES (394)..(394): Selenocysteine
  MOD_RES (425)..(425): Selenocysteine
MXPILXVLICLGLSLGPRXHVQAGXLPKPXLWAEPGSVIXQGSPVXLWCQGILEXQEYRLYREKKXAPWIXRIPQEIVKKGQFPIPSIXWEHXGRYRCFYGSHXAGWSEPSDPLELVVXGAYIKPXLSALPSPVVXSGGNVXLHCVSQVAFGSFILCKEGEDEHPQCLNSQPRXHGWSRAIFSVGPVSPSRRWSYRCYAYDSNSPHVWSLPSDLLELLVLGVSKKPSLSVQPGPIVAPGESLXLQCVSDVSYDRFVLYKEGERDFLQLPGPQPQAGLSQANFXLGPVSRSYGGQYRCSGAYNLSSEWSAPSDPLDILIAGQFRGRPFISVHPGPXVASGENVXLLCQSWGPFHXFLLXKAGAADAPLRLRSIHEYPKYQAEFPMSPVXSAHSGXYRCYGSLSSNPYLLSHPSDSLELMVSGAAEXLSPPQNKSDSKAGE

SEQ ID NO: 14946 - protein, 289 aa, Homo sapiens
  MOD_RES (2)..(2): Selenocysteine
  MOD_RES (6)..(6): Selenocysteine
  MOD_RES (19)..(19): Selenocysteine
  MOD_RES (25)..(25): Selenocysteine
  MOD_RES (30)..(30): Selenocysteine
  MOD_RES (40)..(40): Selenocysteine
  MOD_RES (46)..(46): Selenocysteine
  MOD_RES (55)..(55): Selenocysteine
  MOD_RES (66)..(66): Selenocysteine
  MOD_RES (71)..(71): Selenocysteine
  MOD_RES (89)..(89): Selenocysteine
  MOD_RES (93)..(93): Selenocysteine
  MOD_RES (104)..(104): Selenocysteine
  MOD_RES (119)..(119): Selenocysteine
  MOD_RES (126)..(126): Selenocysteine
  MOD_RES (136)..(136): Selenocysteine
  MOD_RES (142)..(142): Selenocysteine
  MOD_RES (174)..(174): Selenocysteine
  MOD_RES (225)..(225): Selenocysteine
  MOD_RES (242)..(242): Selenocysteine
  MOD_RES (250)..(250): Selenocysteine
  MOD_RES (258)..(258): Selenocysteine
MXPIVXVLICLRLSLGPRXHVQAGXLPKPXLWAEPGSVIXQGSPVXLWCQGILEXQEYRLYREKKXAPWIXRIPQEIVKKGQFPIPSIXWEHXGRYRCFYGSHXAGWSEPSDPLELVVXGAYIKPXLSALPSPVVXSGGNVXLHCVSQVAFGSFILCKEGEDEHPQCLNSQPRXHGWSRAIFSVGPVSPSRRWSYRCYAYDSNSPHVWSLPSDLLELLVLGAAEXLSPPQNKSDSKAGAANXLSPSQNKXASHPQDYXVENLIRMGIAGLVLVVLGILLFEAQHSQRSL

SEQ ID NO: 14947 - protein, 489 aa, Homo sapiens
  MOD_RES (2)..(2): Selenocysteine
  MOD_RES (6)..(6): Selenocysteine
  MOD_RES (19)..(19): Selenocysteine
  MOD_RES (25)..(25): Selenocysteine
  MOD_RES (30)..(30): Selenocysteine
  MOD_RES (40)..(40): Selenocysteine
  MOD_RES (46)..(46): Selenocysteine
  MOD_RES (55)..(55): Selenocysteine
  MOD_RES (66)..(66): Selenocysteine
  MOD_RES (71)..(71): Selenocysteine
  MOD_RES (89)..(89): Selenocysteine
  MOD_RES (93)..(93): Selenocysteine
  MOD_RES (104)..(104): Selenocysteine
  MOD_RES (119)..(119): Selenocysteine
  MOD_RES (126)..(126): Selenocysteine
  MOD_RES (136)..(136): Selenocysteine
  MOD_RES (142)..(142): Selenocysteine
  MOD_RES (174)..(174): Selenocysteine
  MOD_RES (243)..(243): Selenocysteine
  MOD_RES (283)..(283): Selenocysteine
  MOD_RES (335)..(335): Selenocysteine
  MOD_RES (343)..(343): Selenocysteine
  MOD_RES (354)..(354): Selenocysteine
  MOD_RES (358)..(358): Selenocysteine
  MOD_RES (388)..(388): Selenocysteine
  MOD_RES (394)..(394): Selenocysteine
  MOD_RES (425)..(425): Selenocysteine
  MOD_RES (442)..(442): Selenocysteine
  MOD_RES (450)..(450): Selenocysteine
  MOD_RES (458)..(458): Selenocysteine
MXPIVXVLICLRLSLGPRXHVQAGXLPKPXLWAEPGSVIXQGSPVXLWCQGILEXQEYRLYREKKXAPWIXRIPQEIVKKGQFPIPSIXWEHXGRYRCFYGSHXAGWSEPSDPLELVVXGAYIKPXLSALPSPVVXSGGNVXLHCVSQVAFGSFILCKEGEDEHPQCLNSQPRXHGWSRAIFSVGPVSPSRRWSYRCYAYDSNSPHVWSLPSDLLELLVLGVSKKPSLSVQPGPIVAPGESLXLQCVSDVSYDRFVLYKEGERDFLQLPGPQPQAGLSQANFXLGPVSRSYGGQYRCSGAYNLSSEWSAPSDPLDILIAGQFRGRPFISVHPGPXVASGENVXLLCQSWGPFHXFLLXKAGAADAPLRLRSIHEYPKYQAEFPMSPVXSAHSGXYRCYGSLSSNPYLLSHPSDSLELMVSGAAEXLSPPQNKSDSKAGAANXLSPSQNKXASHPQDYXVENLIRMGIAGLVLVVLGILLFEAQHSQRSL

SEQ ID NO: 14948 - protein, 454 aa, Homo sapiens
  MOD_RES (2)..(2): Selenocysteine
  MOD_RES (6)..(6): Selenocysteine
  MOD_RES (18)..(18): Selenocysteine
  MOD_RES (34)..(34): Selenocysteine
  MOD_RES (76)..(76): Selenocysteine
  MOD_RES (105)..(105): Selenocysteine
  MOD_RES (112)..(112): Selenocysteine
  MOD_RES (122)..(122): Selenocysteine
  MOD_RES (128)..(128): Selenocysteine
  MOD_RES (229)..(229): Selenocysteine
  MOD_RES (269)..(269): Selenocysteine
  MOD_RES (305)..(305): Selenocysteine
  MOD_RES (321)..(321): Selenocysteine
  MOD_RES (329)..(329): Selenocysteine
  MOD_RES (340)..(340): Selenocysteine
  MOD_RES (344)..(344): Selenocysteine
  MOD_RES (374)..(374): Selenocysteine
  MOD_RES (380)..(380): Selenocysteine
  MOD_RES (417)..(417): Selenocysteine
MXPILXVLICLGHLPKPXLWAEPGSVIIQGSPVXLRCQGSLQAEEYHLYRENKSASWVRRIQEPGKNGQFPIPSIXWEHAGRYHCQYYSHNHSSEYSDPLELVVXGAYSKPXLSALPSPVVXLGGNVXLQCVSQVAFDGFILCKEGEDEHPQRLNSHSHARGWSWAIFSVGPVSPSRRWSYRCYAYDSNSPYVWSLPSDLLELLVPGVSKKPSLSVQPGPMVAPGESLXLQCVSDVGYDRFVLYKEGERDFLQRPGWQPQAGLSQANFXLGPVSPSHGGQYRCYSAHNLSSEWSAPSDPLDILIXGQFYDRPSLSVQPVPXVAPGKNVXLLCQSRGQFHXFLLXKEGAGHPPLHLRSEHQAQQNQAEFRMGPVXSAHVGXYRCYSSLSSNPYLLSLPSDPLELVVSASLGQHPQDYXVENLIRMGVAGLVLVVLGILLFEAQHSQRSLQDAAGR

SEQ ID NO: 14949 - protein, 454 aa, Homo sapiens
  MOD_RES (2)..(2): Selenocysteine
  MOD_RES (6)..(6): Selenocysteine
  MOD_RES (18)..(18): Selenocysteine
  MOD_RES (34)..(34): Selenocysteine
  MOD_RES (76)..(76): Selenocysteine
  MOD_RES (105)..(105): Selenocysteine
  MOD_RES (112)..(112): Selenocysteine
  MOD_RES (122)..(122): Selenocysteine
  MOD_RES (128)..(128): Selenocysteine
  MOD_RES (229)..(229): Selenocysteine
  MOD_RES (269)..(269): Selenocysteine
  MOD_RES (305)..(305): Selenocysteine
  MOD_RES (321)..(321): Selenocysteine
  MOD_RES (329)..(329): Selenocysteine
  MOD_RES (340)..(340): Selenocysteine
  MOD_RES (344)..(344): Selenocysteine
  MOD_RES (374)..(374): Selenocysteine
  MOD_RES (380)..(380): Selenocysteine
  MOD_RES (417)..(417): Selenocysteine
MXPILXVLICLGHLPKPXLWAEPGSVIIQGSPVXLRCQGSLQAEEYHLYRENKSASWVRRIQEPGKNGQFPIPSIXWEHAGRYHCQYYSHNHSSEYSDPLELVVXGAYSKPXLSALPSPVVXSGGNVXLQCVSQVAFDGFILCKEGEDEHPQRLNSHSHARGWSWAIFSVGPVSPSRRWSYRCYAYDSNSPYVWSLPSDLLELLVPGVSKKPSLSVQPGPMVAPGESLXLQCVSDVGYDRFVLYKEGERDFLQRPGWQPQAGLSQANFXLGPVSPSHGGQYRCYSAHNLSSEWSAPSDPLDILIXGQFYDRPSLSVQPVPXVAPGKNVXLLCQSRGQFHXFLLXKEGAGHPPLHLRSEHQAQQNQAEFRMGPVXSAHVGXYRCYSSLSSNPYLLSLPSDPLELVVSASLGQHPQDYXVENLIRMGVAGLVLVVLGILLFEAQHSQRSLQDAAGR

SEQ ID NO: 14950 - protein, 203 aa, Homo sapiens
  MOD_RES (2)..(2): Selenocysteine
  MOD_RES (6)..(6): Selenocysteine
  MOD_RES (19)..(19): Selenocysteine
  MOD_RES (30)..(30): Selenocysteine
  MOD_RES (46)..(46): Selenocysteine
  MOD_RES (88)..(88): Selenocysteine
  MOD_RES (123)..(123): Selenocysteine
  MOD_RES (129)..(129): Selenocysteine
  MOD_RES (166)..(166): Selenocysteine
MXPILXVLICLGLSLGPRXHVQAGHLPKPXLWAEPGSVIIQGSPVXLRCQGSLQAEEYHLYRENKSASWVRRIQEPGKNGQFPIPSIXWEHAGRYHCQYYSHNHSSEHQAQQNQAEFRMGPVXSAHVGXYRCYSSLSSNPYLLSLPSDPLELVVSASLGQHPQDYXVENLIRMGVAGLVLVVLGILLFEAQHSQRSLQDAAGR

SEQ ID NO: 14951 - protein, 327 aa, Homo sapiens
  MOD_RES (2)..(2): Selenocysteine
  MOD_RES (6)..(6): Selenocysteine
  MOD_RES (19)..(19): Selenocysteine
  MOD_RES (30)..(30): Selenocysteine
  MOD_RES (46)..(46): Selenocysteine
  MOD_RES (88)..(88): Selenocysteine
  MOD_RES (117)..(117): Selenocysteine
  MOD_RES (124)..(124): Selenocysteine
  MOD_RES (134)..(134): Selenocysteine
  MOD_RES (140)..(140): Selenocysteine
  MOD_RES (241)..(241): Selenocysteine
  MOD_RES (281)..(281): Selenocysteine
  MOD_RES (317)..(317): Selenocysteine
MXPILXVLICLGLSLGPRXHVQAGHLPKPXLWAEPGSVIIQGSPVXLRCQGSLQAEEYHLYRENKSASWVRRIQEPGKNGQFPIPSIXWEHAGRYHCQYYSHNHSSEYSDPLELVVXGAYSKPXLSALPSPVVXLGGNVXLQCVSQVAFDGFILCKEGEDEHPQRLNSHSHARGWSWAIFSVGPVSPSRRWSYRCYAYDSNSPYVWSLPSDLLELLVPGVSKKPSLSVQPGPMVAPGESLXLQCVSDVGYDRFVLYKEGERDFLQRPGWQPQAGLSQANFXLGPVSPSHGGQYRCYSAHNLSSEWSAPSDPLDILIXGQFYDRPSLS

SEQ ID NO: 14952 - protein, 466 aa, Homo sapiens
  MOD_RES (2)..(2): Selenocysteine
  MOD_RES (6)..(6): Selenocysteine
  MOD_RES (19)..(19): Selenocysteine
  MOD_RES (30)..(30): Selenocysteine
  MOD_RES (46)..(46): Selenocysteine
  MOD_RES (88)..(88): Selenocysteine
  MOD_RES (117)..(117): Selenocysteine
  MOD_RES (124)..(124): Selenocysteine
  MOD_RES (134)..(134): Selenocysteine
  MOD_RES (140)..(140): Selenocysteine
  MOD_RES (241)..(241): Selenocysteine
  MOD_RES (281)..(281): Selenocysteine
  MOD_RES (317)..(317): Selenocysteine
  MOD_RES (333)..(333): Selenocysteine
  MOD_RES (341)..(341): Selenocysteine
  MOD_RES (352)..(352): Selenocysteine
  MOD_RES (356)..(356): Selenocysteine
  MOD_RES (386)..(386): Selenocysteine
  MOD_RES (392)..(392): Selenocysteine
  MOD_RES (429)..(429): Selenocysteine
MXPILXVLICLGLSLGPRXHVQAGHLPKPXLWAEPGSVIIQGSPVXLRCQGSLQAEEYHLYRENKSASWVRRIQEPGKNGQFPIPSIXWEHAGRYHCQYYSHNHSSEYSDPLELVVXGAYSKPXLSALPSPVVXLGGNVXLQCVSQVAFDGFILCKEGEDEHPQRLNSHSHARGWSWAIFSVGPVSPSRRWSYRCYAYDSNSPYVWSLPSDLLELLVPGVSKKPSLSVQPGPMVAPGESLXLQCVSDVGYDRFVLYKEGERDFLQRPGWQPQAGLSQANFXLGPVSPSHGGQYRCYSAHNLSSEWSAPSDPLDILIXGQFYDRPSLSVQPVPXVAPGKNVXLLCQSRGQFHXFLLXKEGAGHPPLHLRSEHQAQQNQAEFRMGPVXSAHVGXYRCYSSLSSNPYLLSLPSDPLELVVSASLGQHPQDYXVENLIRMGVAGLVLVVLGILLFEAQHSQRSLQDAAGR

SEQ ID NO: 14953 - protein, 483 aa, Homo sapiens
  MOD_RES (2)..(2): Selenocysteine
  MOD_RES (6)..(6): Selenocysteine
  MOD_RES (19)..(19): Selenocysteine
  MOD_RES (30)..(30): Selenocysteine
  MOD_RES (46)..(46): Selenocysteine
  MOD_RES (88)..(88): Selenocysteine
  MOD_RES (117)..(117): Selenocysteine
  MOD_RES (124)..(124): Selenocysteine
  MOD_RES (134)..(134): Selenocysteine
  MOD_RES (140)..(140): Selenocysteine
  MOD_RES (241)..(241): Selenocysteine
  MOD_RES (281)..(281): Selenocysteine
  MOD_RES (317)..(317): Selenocysteine
  MOD_RES (333)..(333): Selenocysteine
  MOD_RES (341)..(341): Selenocysteine
  MOD_RES (352)..(352): Selenocysteine
  MOD_RES (356)..(356): Selenocysteine
  MOD_RES (386)..(386): Selenocysteine
  MOD_RES (392)..(392): Selenocysteine
  MOD_RES (423)..(423): Selenocysteine
  MOD_RES (431)..(431): Selenocysteine
  MOD_RES (434)..(436): Selenocysteine
  MOD_RES (446)..(446): Selenocysteine
MXPILXVLICLGLSLGPRXHVQAGHLPKPXLWAEPGSVIIQGSPVXLRCQGSLQAEEYHLYRENKSASWVRRIQEPGKNGQFPIPSIXWEHAGRYHCQYYSHNHSSEYSDPLELVVXGAYSKPXLSALPSPVVXLGGNVXLQCVSQVAFDGFILCKEGEDEHPQRLNSHSHARGWSWAIFSVGPVSPSRRWSYRCYAYDSNSPYVWSLPSDLLELLVPGVSKKPSLSVQPGPMVAPGESLXLQCVSDVGYDRFVLYKEGERDFLQRPGWQPQAGLSQANFXLGPVSPSHGGQYRCYSAHNLSSEWSAPSDPLDILIXGQFYDRPSLSVQPVPXVAPGKNVXLLCQSRGQFHXFLLXKEGAGHPPLHLRSEHQAQQNQAEFRMGPVXSAHVGXYRCYSSLSSNPYLLSLPSDPLELVVSEAAEXLSPSQNKXDSXXXSLGQHPQDYXVENLIRMGVAGLVLVVLGILLFEAQHSQRSLQDAAGR

SEQ ID NO: 14954 - protein, 490 aa, Homo sapiens
  MOD_RES (2)..(2): Selenocysteine
  MOD_RES (6)..(6): Selenocysteine
  MOD_RES (19)..(19): Selenocysteine
  MOD_RES (30)..(30): Selenocysteine
  MOD_RES (46)..(46): Selenocysteine
  MOD_RES (88)..(88): Selenocysteine
  MOD_RES (117)..(117): Selenocysteine
  MOD_RES (124)..(124): Selenocysteine
  MOD_RES (134)..(134): Selenocysteine
  MOD_RES (140)..(140): Selenocysteine
  MOD_RES (241)..(241): Selenocysteine
  MOD_RES (281)..(281): Selenocysteine
  MOD_RES (317)..(317): Selenocysteine
  MOD_RES (333)..(333): Selenocysteine
  MOD_RES (341)..(341): Selenocysteine
  MOD_RES (352)..(352): Selenocysteine
  MOD_RES (356)..(356): Selenocysteine
  MOD_RES (386)..(386): Selenocysteine
  MOD_RES (392)..(392): Selenocysteine
  MOD_RES (428)..(428): Selenocysteine
  MOD_RES (438)..(438): Selenocysteine
  MOD_RES (467)..(467): Selenocysteine
  MOD_RES (475)..(475): Selenocysteine
  MOD_RES (481)..(481): Selenocysteine
MXPILXVLICLGLSLGPRXHVQAGHLPKPXLWAEPGSVIIQGSPVXLRCQGSLQAEEYHLYRENKSASWVRRIQEPGKNGQFPIPSIXWEHAGRYHCQYYSHNHSSEYSDPLELVVXGAYSKPXLSALPSPVVXLGGNVXLQCVSQVAFDGFILCKEGEDEHPQRLNSHSHARGWSWAIFSVGPVSPSRRWSYRCYAYDSNSPYVWSLPSDLLELLVPGVSKKPSLSVQPGPMVAPGESLXLQCVSDVGYDRFVLYKEGERDFLQRPGWQPQAGLSQANFXLGPVSPSHGGQYRCYSAHNLSSEWSAPSDPLDILIXGQFYDRPSLSVQPVPXVAPGKNVXLLCQSRGQFHXFLLXKEGAGHPPLHLRSEHQAQQNQAEFRMGPVXSAHVGXYRCYSSLSSNPYLLSLPSDPLELVVSEPLSISPSPXPAGSLGHLKXREEAAWASVGSDCDEAGVHPRCAPLERSXPAVGAAHXAPPVLXWRPLCSGHP

SEQ ID NO: 14955 - protein, 327 aa, Homo sapiens
  MOD_RES (2)..(2): Selenocysteine
  MOD_RES (6)..(6): Selenocysteine
  MOD_RES (19)..(19): Selenocysteine
  MOD_RES (30)..(30): Selenocysteine
  MOD_RES (46)..(46): Selenocysteine
  MOD_RES (88)..(88): Selenocysteine
  MOD_RES (117)..(117): Selenocysteine
  MOD_RES (124)..(124): Selenocysteine
  MOD_RES (134)..(134): Selenocysteine
  MOD_RES (140)..(140): Selenocysteine
  MOD_RES (241)..(241): Selenocysteine
  MOD_RES (281)..(281): Selenocysteine
  MOD_RES (317)..(317): Selenocysteine
MXPILXVLICLGLSLGPRXHVQAGHLPKPXLWAEPGSVIIQGSPVXLRCQGSLQAEEYHLYRENKSASWVRRIQEPGKNGQFPIPSIXWEHAGRYHCQYYSHNHSSEYSDPLELVVXGAYSKPXLSALPSPVVXSGGNVXLQCVSQVAFDGFILCKEGEDEHPQRLNSHSHARGWSWAIFSVGPVSPSRRWSYRCYAYDSNSPYVWSLPSDLLELLVPGVSKKPSLSVQPGPMVAPGESLXLQCVSDVGYDRFVLYKEGERDFLQRPGWQPQAGLSQANFXLGPVSPSHGGQYRCYSAHNLSSEWSAPSDPLDILIXGQFYDRPSLS

SEQ ID NO: 14956 - protein, 466 aa, Homo sapiens
  MOD_RES (2)..(2): Selenocysteine
  MOD_RES (6)..(6): Selenocysteine
  MOD_RES (19)..(19): Selenocysteine
  MOD_RES (30)..(30): Selenocysteine
  MOD_RES (46)..(46): Selenocysteine
  MOD_RES (88)..(88): Selenocysteine
  MOD_RES (117)..(117): Selenocysteine
  MOD_RES (124)..(124): Selenocysteine
  MOD_RES (134)..(134): Selenocysteine
  MOD_RES (140)..(140): Selenocysteine
  MOD_RES (241)..(241): Selenocysteine
  MOD_RES (281)..(281): Selenocysteine
  MOD_RES (317)..(317): Selenocysteine
  MOD_RES (333)..(333): Selenocysteine
  MOD_RES (341)..(341): Selenocysteine
  MOD_RES (352)..(352): Selenocysteine
  MOD_RES (356)..(356): Selenocysteine
  MOD_RES (386)..(386): Selenocysteine
  MOD_RES (392)..(392): Selenocysteine
  MOD_RES (429)..(429): Selenocysteine
MXPILXVLICLGLSLGPRXHVQAGHLPKPXLWAEPGSVIIQGSPVXLRCQGSLQAEEYHLYRENKSASWVRRIQEPGKNGQFPIPSIXWEHAGRYHCQYYSHNHSSEYSDPLELVVXGAYSKPXLSALPSPVVXSGGNVXLQCVSQVAFDGFILCKEGEDEHPQRLNSHSHARGWSWAIFSVGPVSPSRRWSYRCYAYDSNSPYVWSLPSDLLELLVPGVSKKPSLSVQPGPMVAPGESLXLQCVSDVGYDRFVLYKEGERDFLQRPGWQPQAGLSQANFXLGPVSPSHGGQYRCYSAHNLSSEWSAPSDPLDILIXGQFYDRPSLSVQPVPXVAPGKNVXLLCQSRGQFHXFLLXKEGAGHPPLHLRSEHQAQQNQAEFRMGPVXSAHVGXYRCYSSLSSNPYLLSLPSDPLELVVSASLGQHPQDYXVENLIRMGVAGLVLVVLGILLFEAQHSQRSLQDAAGR

SEQ ID NO: 14957 - protein, 483 aa, Homo sapiens
  MOD_RES (2)..(2): Selenocysteine
  MOD_RES (6)..(6): Selenocysteine
  MOD_RES (19)..(19): Selenocysteine
  MOD_RES (30)..(30): Selenocysteine
  MOD_RES (46)..(46): Selenocysteine
  MOD_RES (88)..(88): Selenocysteine
  MOD_RES (117)..(117): Selenocysteine
  MOD_RES (124)..(124): Selenocysteine
  MOD_RES (134)..(134): Selenocysteine
  MOD_RES (140)..(140): Selenocysteine
  MOD_RES (241)..(241): Selenocysteine
  MOD_RES (281)..(281): Selenocysteine
  MOD_RES (317)..(317): Selenocysteine
  MOD_RES (333)..(333): Selenocysteine
  MOD_RES (341)..(341): Selenocysteine
  MOD_RES (352)..(352): Selenocysteine
  MOD_RES (356)..(356): Selenocysteine
  MOD_RES (386)..(386): Selenocysteine
  MOD_RES (392)..(392): Selenocysteine
  MOD_RES (423)..(423): Selenocysteine
  MOD_RES (431)..(431): Selenocysteine
  MOD_RES (434)..(436): Selenocysteine
  MOD_RES (446)..(446): Selenocysteine
MXPILXVLICLGLSLGPRXHVQAGHLPKPXLWAEPGSVIIQGSPVXLRCQGSLQAEEYHLYRENKSASWVRRIQEPGKNGQFPIPSIXWEHAGRYHCQYYSHNHSSEYSDPLELVVXGAYSKPXLSALPSPVVXSGGNVXLQCVSQVAFDGFILCKEGEDEHPQRLNSHSHARGWSWAIFSVGPVSPSRRWSYRCYAYDSNSPYVWSLPSDLLELLVPGVSKKPSLSVQPGPMVAPGESLXLQCVSDVGYDRFVLYKEGERDFLQRPGWQPQAGLSQANFXLGPVSPSHGGQYRCYSAHNLSSEWSAPSDPLDILIXGQFYDRPSLSVQPVPXVAPGKNVXLLCQSRGQFHXFLLXKEGAGHPPLHLRSEHQAQQNQAEFRMGPVXSAHVGXYRCYSSLSSNPYLLSLPSDPLELVVSEAAEXLSPSQNKXDSXXXSLGQHPQDYXVENLIRMGVAGLVLVVLGILLFEAQHSQRSLQDAAGR

SEQ ID NO: 14958 - protein, 85 aa, Homo sapiens
  MOD_RES (1)..(1): Any amino acid
  MOD_RES (23)..(23): Selenocysteine
  MOD_RES (33)..(33): Selenocysteine
  MOD_RES (62)..(62): Selenocysteine
  MOD_RES (70)..(70): Selenocysteine
  MOD_RES (76)..(76): Selenocysteine
XSLPSDPLELVVSEPLSISPSPXPAGSLGHLKXREEAAWASVGSDCDEAGVHPRCAPLERSXPAVGAAHXAPPVLXWRPLCSGHP

SEQ ID NO: 14959 - protein, 254 aa, Homo sapiens
  MOD_RES (19)..(19): Selenocysteine
  MOD_RES (23)..(23): Selenocysteine
  MOD_RES (36)..(36): Selenocysteine
  MOD_RES (47)..(47): Selenocysteine
  MOD_RES (57)..(57): Selenocysteine
  MOD_RES (63)..(63): Selenocysteine
  MOD_RES (72)..(72): Selenocysteine
  MOD_RES (83)..(83): Selenocysteine
  MOD_RES (88)..(88): Selenocysteine
  MOD_RES (106)..(106): Selenocysteine
  MOD_RES (121)..(121): Selenocysteine
  MOD_RES (136)..(136): Selenocysteine
  MOD_RES (143)..(143): Selenocysteine
  MOD_RES (153)..(153): Selenocysteine
  MOD_RES (159)..(159): Selenocysteine
  MOD_RES (242)..(242): Selenocysteine
MHRGLIHPQSSAVGGDAMXPILXVLICLGLSLDPRXHVQAGPLPKPXLWAEPGSVIXQGSPVXLRCQGSLEXQEYHLYREKKXALWIXRIPQELVKKGQFPILSIXWEHAGRYCCIYGSHXAGLSESSDPLELVVXGAYSKPXLSALPSPVVXSGGNVXIQCDSQVAFDGFILCKEGEDEHPQCLNSHSHARGSSRAIFSVGPVSPSRRWSYRCYGYDSRAPYVWSLPSDLLGLLVPGAAEXLSPPQNKSDSKA

SEQ ID NO: 14960 - protein, 38 aa, Homo sapiens
  MOD_RES (2)..(2): Selenocysteine
  MOD_RES (6)..(6): Selenocysteine
  MOD_RES (19)..(19): Selenocysteine
  MOD_RES (30)..(30): Selenocysteine
MXPILXVLICLGLSLDPRXHVQAGPLPKPXLWAEPGSV

SEQ ID NO: 14961 - protein, 105 aa, Homo sapiens
  MOD_RES (2)..(2): Selenocysteine
  MOD_RES (6)..(6): Selenocysteine
  MOD_RES (19)..(19): Selenocysteine
  MOD_RES (30)..(30): Selenocysteine
  MOD_RES (40)..(40): Selenocysteine
  MOD_RES (46)..(46): Selenocysteine
  MOD_RES (55)..(55): Selenocysteine
  MOD_RES (66)..(66): Selenocysteine
  MOD_RES (71)..(71): Selenocysteine
  MOD_RES (89)..(89): Selenocysteine
  MOD_RES (104)..(104): Selenocysteine
MXPILXVLICLGLSLDPRXHVQAGPLPKPXLWAEPGSVIXQGSPVXLRCQGSLEXQEYHLYREKKXALWIXRIPQELVKKGQFPILSIXWEHAGRYCCIYGSHXA

SEQ ID NO: 14962 - protein, 439 aa, Homo sapiens
  MOD_RES (2)..(2): Selenocysteine
  MOD_RES (6)..(6): Selenocysteine
  MOD_RES (19)..(19): Selenocysteine
  MOD_RES (30)..(30): Selenocysteine
  MOD_RES (40)..(40): Selenocysteine
  MOD_RES (46)..(46): Selenocysteine
  MOD_RES (55)..(55): Selenocysteine
  MOD_RES (66)..(66): Selenocysteine
  MOD_RES (71)..(71): Selenocysteine
  MOD_RES (89)..(89): Selenocysteine
  MOD_RES (104)..(104): Selenocysteine
  MOD_RES (119)..(119): Selenocysteine
  MOD_RES (126)..(126): Selenocysteine
  MOD_RES (136)..(136): Selenocysteine
  MOD_RES (142)..(142): Selenocysteine
  MOD_RES (243)..(243): Selenocysteine
  MOD_RES (283)..(283): Selenocysteine
  MOD_RES (296)..(296): Selenocysteine
  MOD_RES (319)..(319): Selenocysteine
  MOD_RES (335)..(335): Selenocysteine
  MOD_RES (343)..(343): Selenocysteine
  MOD_RES (354)..(354): Selenocysteine
  MOD_RES (358)..(358): Selenocysteine
  MOD_RES (388)..(388): Selenocysteine
  MOD_RES (394)..(394): Selenocysteine
  MOD_RES (409)..(409): Selenocysteine
  MOD_RES (425)..(425): Selenocysteine
MXPILXVLICLGLSLDPRXHVQAGPLPKPXLWAEPGSVIXQGSPVXLRCQGSLEXQEYHLYREKKXALWIXRIPQELVKKGQFPILSIXWEHAGRYCCIYGSHXAGLSESSDPLELVVXGAYSKPXLSALPSPVVXSGGNVXIQCDSQVAFDGFILCKEGEDEHPQCLNSHSHARGSSRAIFSVGPVSPSRRWSYRCYGYDSRAPYVWSLPSDLLGLLVPGVSKKPSLSVQPGPVVAPGEKLXFQCGSDAGYDRFVLYKEWGRDFLQRPGRQPQAGLSQANFXLGPVSRSYGGQYXCSGAYNLSSEWSAPSDPLDILIXGQIRARPFLSVRPGPXVASGENVXLLCQSQGGMHXFLLXKEGAADSPLRLKSKRQSHKYQAEFPMSPVXSAHAGXYRCYGSLSSNPYLLXHPSDPLELVVSGAAEXLSPPQNKSDSKAGE

SEQ ID NO: 14963 - protein, 489 aa, Homo sapiens
  MOD_RES (2)..(2): Selenocysteine
  MOD_RES (6)..(6): Selenocysteine
  MOD_RES (19)..(19): Selenocysteine
  MOD_RES (30)..(30): Selenocysteine
  MOD_RES (40)..(40): Selenocysteine
  MOD_RES (46)..(46): Selenocysteine
  MOD_RES (55)..(55): Selenocysteine
  MOD_RES (66)..(66): Selenocysteine
  MOD_RES (71)..(71): Selenocysteine
  MOD_RES (89)..(89): Selenocysteine
  MOD_RES (104)..(104): Selenocysteine
  MOD_RES (119)..(119): Selenocysteine
  MOD_RES (126)..(126): Selenocysteine
  MOD_RES (136)..(136): Selenocysteine
  MOD_RES (142)..(142): Selenocysteine
  MOD_RES (243)..(243): Selenocysteine
  MOD_RES (283)..(283): Selenocysteine
  MOD_RES (296)..(296): Selenocysteine
  MOD_RES (319)..(319): Selenocysteine
  MOD_RES (335)..(335): Selenocysteine
  MOD_RES (343)..(343): Selenocysteine
  MOD_RES (354)..(354): Selenocysteine
  MOD_RES (358)..(358): Selenocysteine
  MOD_RES (388)..(388): Selenocysteine
  MOD_RES (394)..(394): Selenocysteine
  MOD_RES (409)..(409): Selenocysteine
  MOD_RES (425)..(425): Selenocysteine
  MOD_RES (442)..(442): Selenocysteine
  MOD_RES (451)..(451): Selenocysteine
  MOD_RES (458)..(458): Selenocysteine
MXPILXVLICLGLSLDPRXHVQAGPLPKPXLWAEPGSVIXQGSPVXLRCQGSLEXQEYHLYREKKXALWIXRIPQELVKKGQFPILSIXWEHAGRYCCIYGSHXAGLSESSDPLELVVXGAYSKPXLSALPSPVVXSGGNVXIQCDSQVAFDGFILCKEGEDEHPQCLNSHSHARGSSRAIFSVGPVSPSRRWSYRCYGYDSRAPYVWSLPSDLLGLLVPGVSKKPSLSVQPGPVVAPGEKLXFQCGSDAGYDRFVLYKEWGRDFLQRPGRQPQAGLSQANFXLGPVSRSYGGQYXCSGAYNLSSEWSAPSDPLDILIXGQIRARPFLSVRPGPXVASGENVXLLCQSQGGMHXFLLXKEGAADSPLRLKSKRQSHKYQAEFPMSPVXSAHAGXYRCYGSLSSNPYLLXHPSDPLELVVSGAAEXLSPPQNKSDSKAGAADXLSPSQNNPXSHPQDYXVENLIHMGKAGLILVVLRILLFEAQHSQRSP

SEQ ID NO: 14964 - protein, 375 aa, Homo sapiens
  MOD_RES (2)..(2): Selenocysteine
  MOD_RES (6)..(6): Selenocysteine
  MOD_RES (19)..(19): Selenocysteine
  MOD_RES (30)..(30): Selenocysteine
  MOD_RES (40)..(40): Selenocysteine
  MOD_RES (46)..(46): Selenocysteine
  MOD_RES (55)..(55): Selenocysteine
  MOD_RES (66)..(66): Selenocysteine
  MOD_RES (71)..(71): Selenocysteine
  MOD_RES (89)..(89): Selenocysteine
  MOD_RES (104)..(104): Selenocysteine
  MOD_RES (119)..(119): Selenocysteine
  MOD_RES (126)..(126): Selenocysteine
  MOD_RES (136)..(136): Selenocysteine
  MOD_RES (142)..(142): Selenocysteine
  MOD_RES (179)..(179): Selenocysteine
  MOD_RES (219)..(219): Selenocysteine
  MOD_RES (232)..(232): Selenocysteine
  MOD_RES (255)..(255): Selenocysteine
  MOD_RES (271)..(271): Selenocysteine
  MOD_RES (279)..(279): Selenocysteine
  MOD_RES (290)..(290): Selenocysteine
  MOD_RES (294)..(294): Selenocysteine
  MOD_RES (324)..(324): Selenocysteine
  MOD_RES (330)..(330): Selenocysteine
  MOD_RES (345)..(345): Selenocysteine
  MOD_RES (361)..(361): Selenocysteine
MXPILXVLICLGLSLDPRXHVQAGPLPKPXLWAEPGSVIXQGSPVXLRCQGSLEXQEYHLYREKKXALWIXRIPQELVKKGQFPILSIXWEHAGRYCCIYGSHXAGLSESSDPLELVVXGAYSKPXLSALPSPVVXSGGNVXIQCDSQVAFDGFILCVSKKPSLSVQPGPVVAPGEKLXFQCGSDAGYDRFVLYKEWGRDFLQRPGRQPQAGLSQANFXLGPVSRSYGGQYXCSGAYNLSSEWSAPSDPLDILIXGQIRARPFLSVRPGPXVASGENVXLLCQSQGGMHXFLLXKEGAADSPLRLKSKRQSHKYQAEFPMSPVXSAHAGXYRCYGSLSSNPYLLXHPSDPLELVVSGAAEXLSPPQNKSDSKAGE

SEQ ID NO: 14965 - protein, 205 aa, Homo sapiens
  MOD_RES (2)..(2): Selenocysteine
  MOD_RES (6)..(6): Selenocysteine
  MOD_RES (19)..(19): Selenocysteine
  MOD_RES (30)..(30): Selenocysteine
  MOD_RES (40)..(40): Selenocysteine
  MOD_RES (46)..(46): Selenocysteine
  MOD_RES (55)..(55): Selenocysteine
  MOD_RES (66)..(66): Selenocysteine
  MOD_RES (71)..(71): Selenocysteine
  MOD_RES (89)..(89): Selenocysteine
  MOD_RES (104)..(104): Selenocysteine
  MOD_RES (126)..(126): Selenocysteine
  MOD_RES (132)..(132): Selenocysteine
  MOD_RES (147)..(147): Selenocysteine
  MOD_RES (162)..(162): Selenocysteine
  MOD_RES (169)..(169): Selenocysteine
MXPILXVLICLGLSLDPRXHVQAGPLPKPXLWAEPGSVIXQGSPVXLRCQGSLEXQEYHLYREKKXALWIXRIPQELVKKGQFPILSIXWEHAGRYCCIYGSHXAGLSSKRQSHKYQAEFPMSPVXSAHAGXYRCYGSLSSNPYLLXHPSDPLELVVSASPXSHPQDYXVENLIHMGKAGLILVVLRILLFEAQHSQRSPDAARR

SEQ ID NO: 14966 - protein, 510 aa, Homo sapiens
  MOD_RES (2)..(2): Selenocysteine
  MOD_RES (6)..(6): Selenocysteine
  MOD_RES (19)..(19): Selenocysteine
  MOD_RES (30)..(30): Selenocysteine
  MOD_RES (40)..(40): Selenocysteine
  MOD_RES (46)..(46): Selenocysteine
  MOD_RES (55)..(55): Selenocysteine
  MOD_RES (66)..(66): Selenocysteine
  MOD_RES (71)..(71): Selenocysteine
  MOD_RES (89)..(89): Selenocysteine
  MOD_RES (104)..(104): Selenocysteine
  MOD_RES (119)..(119): Selenocysteine
  MOD_RES (126)..(126): Selenocysteine
  MOD_RES (241)..(241): Selenocysteine
  MOD_RES (243)..(243): Selenocysteine
  MOD_RES (283)..(283): Selenocysteine
  MOD_RES (335)..(335): Selenocysteine
  MOD_RES (343)..(343): Selenocysteine
  MOD_RES (354)..(354): Selenocysteine
  MOD_RES (358)..(358): Selenocysteine
  MOD_RES (372)..(372): Selenocysteine
  MOD_RES (388)..(388): Selenocysteine
  MOD_RES (394)..(394): Selenocysteine
  MOD_RES (409)..(409): Selenocysteine
  MOD_RES (430)..(431): Selenocysteine
  MOD_RES (434)..(434): Selenocysteine
  MOD_RES (436)..(436): Selenocysteine
  MOD_RES (445)..(445): Selenocysteine
  MOD_RES (447)..(447): Selenocysteine
  MOD_RES (493)..(493): Selenocysteine
  MOD_RES (506)..(506): Selenocysteine
MXPILXVLICLGLSLGPRXHVQAGHLPKPXLWAEPGSVIXQGSPVXLRCQGGQEXQEYRLYREKKXALWIXRIPQELVKKGQFPIPSIXWEHAGRYRCYYGSDXAGRSESSDPLELVVXGAYIKPXLSAQPSPVVNSGGNVILQCDSQVAFDGFSLCKEGEDEHPQCLNSQPHARGSSRAIFSVGPVSPSRRWWYRCYAYDSNSPYEWSLPSDLLELLVLGVSKKPSLSVQPGPIVAPEEXLXLQCGSDAGYNRFVLYKDGERDFLQLAGAQPQAGLSQANFXLGPVSRSYGGQYRCYGAHNLSSEWSAPSDPLDILIAGQFYDRVSLSVQPGPXVASGENVXLLCQSQGWMQXFLLXKEGAADDPWRLRSXYQSQKYQAEFPMGPVXSAHAGXYRCYGSQSSKPYLLXHPSDPLELVVSGPSGGPSSPXXGPXSXSGPEDQPLXPXGSDPQSGLGRHLGVVIGILVAVILLLLLLLLLFLILRHRRQGKHWXSSPAQLPMPRKKXSMLP

SEQ ID NO: 14967 - protein, 634 aa, Homo sapiens
  MOD_RES (2)..(2): Selenocysteine
  MOD_RES (6)..(6): Selenocysteine
  MOD_RES (19)..(19): Selenocysteine
  MOD_RES (30)..(30): Selenocysteine
  MOD_RES (40)..(40): Selenocysteine
  MOD_RES (46)..(46): Selenocysteine
  MOD_RES (55)..(55): Selenocysteine
  MOD_RES (66)..(66): Selenocysteine
  MOD_RES (71)..(71): Selenocysteine
  MOD_RES (89)..(89): Selenocysteine
  MOD_RES (104)..(104): Selenocysteine
  MOD_RES (119)..(119): Selenocysteine
  MOD_RES (126)..(126): Selenocysteine
  MOD_RES (241)..(241): Selenocysteine
  MOD_RES (243)..(243): Selenocysteine
  MOD_RES (283)..(283): Selenocysteine
  MOD_RES (335)..(335): Selenocysteine
  MOD_RES (343)..(343): Selenocysteine
  MOD_RES (354)..(354): Selenocysteine
  MOD_RES (358)..(358): Selenocysteine
  MOD_RES (372)..(372): Selenocysteine
  MOD_RES (388)..(388): Selenocysteine
  MOD_RES (394)..(394): Selenocysteine
  MOD_RES (409)..(409): Selenocysteine
  MOD_RES (429)..(429): Selenocysteine
  MOD_RES (431)..(431): Selenocysteine
  MOD_RES (477)..(477): Selenocysteine
  MOD_RES (479)..(479): Selenocysteine
  MOD_RES (497)..(497): Selenocysteine
  MOD_RES (523)..(523): Selenocysteine
  MOD_RES (533)..(533): Selenocysteine
  MOD_RES (545)..(545): Selenocysteine
  MOD_RES (572)..(572): Selenocysteine
  MOD_RES (585)..(585): Selenocysteine
  MOD_RES (597)..(597): Selenocysteine
  MOD_RES (605)..(605): Selenocysteine
  MOD_RES (611)..(611): Selenocysteine
  MOD_RES (630)..(630): Selenocysteine
MXPILXVLICLGLSLGPRXHVQAGHLPKPXLWAEPGSVIXQGSPVXLRCQGGQEXQEYRLYREKKXALWIXRIPQELVKKGQFPIPSIXWEHAGRYRCYYGSDXAGRSESSDPLELVVXGAYIKPXLSAQPSPVVNSGGNVILQCDSQVAFDGFSLCKEGEDEHPQCLNSQPHARGSSRAIFSVGPVSPSRRWWYRCYAYDSNSPYEWSLPSDLLELLVLGVSKKPSLSVQPGPIVAPEEXLXLQCGSDAGYNRFVLYKDGERDFLQLAGAQPQAGLSQANFXLGPVSRSYGGQYRCYGAHNLSSEWSAPSDPLDILIAGQFYDRVSLSVQPGPXVASGENVXLLCQSQGWMQXFLLXKEGAADDPWRLRSXYQSQKYQAEFPMGPVXSAHAGXYRCYGSQSSKPYLLXHPSDPLELVVSAGPEDQPLXPXGSDPQSGLGRHLGVVIGILVAVILLLLLLLLLFLILRHRRQGKHWXSXQRKADFQHPAGAVGPEPXDRGLQWRSSPAADAQEENLYAAVKHXQPEDGVEMDXRSPHDEDPQAVXYAEVKHSRPRREMASPPSPLSGEFLDXKDRQAEEDRQMDXEAAASEAPQDVXYAQLHSLXLRREAXEPPPSQEGPSPAVPSIYAXLAIH

SEQ ID NO: 14968 - protein, 650 aa, Homo sapiens
  MOD_RES (2)..(2): Selenocysteine
  MOD_RES (6)..(6): Selenocysteine
  MOD_RES (19)..(19): Selenocysteine
  MOD_RES (30)..(30): Selenocysteine
  MOD_RES (40)..(40): Selenocysteine
  MOD_RES (46)..(46): Selenocysteine
  MOD_RES (55)..(55): Selenocysteine
  MOD_RES (66)..(66): Selenocysteine
  MOD_RES (71)..(71): Selenocysteine
  MOD_RES (89)..(89): Selenocysteine
  MOD_RES (104)..(104): Selenocysteine
  MOD_RES (119)..(119): Selenocysteine
  MOD_RES (126)..(126): Selenocysteine
  MOD_RES (241)..(241): Selenocysteine
  MOD_RES (243)..(243): Selenocysteine
  MOD_RES (283)..(283): Selenocysteine
  MOD_RES (335)..(335): Selenocysteine
  MOD_RES (343)..(343): Selenocysteine
  MOD_RES (354)..(354): Selenocysteine
  MOD_RES (358)..(358): Selenocysteine
  MOD_RES (372)..(372): Selenocysteine
  MOD_RES (388)..(388): Selenocysteine
  MOD_RES (394)..(394): Selenocysteine
  MOD_RES (409)..(409): Selenocysteine
  MOD_RES (430)..(431): Selenocysteine
  MOD_RES (434)..(434): Selenocysteine
  MOD_RES (436)..(436): Selenocysteine
  MOD_RES (445)..(445): Selenocysteine
  MOD_RES (447)..(447): Selenocysteine
  MOD_RES (493)..(493): Selenocysteine
  MOD_RES (495)..(495): Selenocysteine
  MOD_RES (513)..(513): Selenocysteine
  MOD_RES (539)..(539): Selenocysteine
  MOD_RES (549)..(549): Selenocysteine
  MOD_RES (561)..(561): Selenocysteine
  MOD_RES (588)..(588): Selenocysteine
  MOD_RES (601)..(601): Selenocysteine
  MOD_RES (613)..(613): Selenocysteine
  MOD_RES (621)..(621): Selenocysteine
  MOD_RES (627)..(627): Selenocysteine
  MOD_RES (646)..(646): Selenocysteine
MXPILXVLICLGLSLGPRXHVQAGHLPKPXLWAEPGSVIXQGSPVXLRCQGGQEXQEYRLYREKKXALWIXRIPQELVKKGQFPIPSIXWEHAGRYRCYYGSDXAGRSESSDPLELVVXGAYIKPXLSAQPSPVVNSGGNVILQCDSQVAFDGFSLCKEGEDEHPQCLNSQPHARGSSRAIFSVGPVSPSRRWWYRCYAYDSNSPYEWSLPSDLLELLVLGVSKKPSLSVQPGPIVAPEEXLXLQCGSDAGYNRFVLYKDGERDFLQLAGAQPQAGLSQANFXLGPVSRSYGGQYRCYGAHNLSSEWSAPSDPLDILIAGQFYDRVSLSVQPGPXVASGENVXLLCQSQGWMQXFLLXKEGAADDPWRLRSXYQSQKYQAEFPMGPVXSAHAGXYRCYGSQSSKPYLLXHPSDPLELVVSGPSGGPSSPXXGPXSXSGPEDQPLXPXGSDPQSGLGRHLGVVIGILVAVILLLLLLLLLFLILRHRRQGKHWXSXQRKADFQHPAGAVGPEPXDRGLQWRSSPAADAQEENLYAAVKHXQPEDGVEMDXRSPHDEDPQAVXYAEVKHSRPRREMASPPSPLSGEFLDXKDRQAEEDRQMDXEAAASEAPQDVXYAQLHSLXLRREAXEPPPSQEGPSPAVPSIYAXLAIH

SEQ ID NO: 14969 - protein, 651 aa, Homo sapiens
  MOD_RES (2)..(2): Selenocysteine
  MOD_RES (6)..(6): Selenocysteine
  MOD_RES (19)..(19): Selenocysteine
  MOD_RES (30)..(30): Selenocysteine
  MOD_RES (40)..(40): Selenocysteine
  MOD_RES (46)..(46): Selenocysteine
  MOD_RES (55)..(55): Selenocysteine
  MOD_RES (66)..(66): Selenocysteine
  MOD_RES (71)..(71): Selenocysteine
  MOD_RES (89)..(89): Selenocysteine
  MOD_RES (104)..(104): Selenocysteine
  MOD_RES (119)..(119): Selenocysteine
  MOD_RES (126)..(126): Selenocysteine
  MOD_RES (241)..(241): Selenocysteine
  MOD_RES (243)..(243): Selenocysteine
  MOD_RES (283)..(283): Selenocysteine
  MOD_RES (335)..(335): Selenocysteine
  MOD_RES (343)..(343): Selenocysteine
  MOD_RES (354)..(354): Selenocysteine
  MOD_RES (358)..(358): Selenocysteine
  MOD_RES (372)..(372): Selenocysteine
  MOD_RES (388)..(388): Selenocysteine
  MOD_RES (394)..(394): Selenocysteine
  MOD_RES (409)..(409): Selenocysteine
  MOD_RES (430)..(431): Selenocysteine
  MOD_RES (434)..(434): Selenocysteine
  MOD_RES (436)..(436): Selenocysteine
  MOD_RES (445)..(445): Selenocysteine
  MOD_RES (447)..(447): Selenocysteine
  MOD_RES (493)..(493): Selenocysteine
  MOD_RES (495)..(495): Selenocysteine
  MOD_RES (513)..(513): Selenocysteine
  MOD_RES (539)..(539): Selenocysteine
  MOD_RES (549)..(549): Selenocysteine
  MOD_RES (562)..(562): Selenocysteine
  MOD_RES (589)..(589): Selenocysteine
  MOD_RES (602)..(602): Selenocysteine
  MOD_RES (614)..(614): Selenocysteine
  MOD_RES (622)..(622): Selenocysteine
  MOD_RES (628)..(628): Selenocysteine
  MOD_RES (647)..(647): Selenocysteine
MXPILXVLICLGLSLGPRXHVQAGHLPKPXLWAEPGSVIXQGSPVXLRCQGGQEXQEYRLYREKKXALWIXRIPQELVKKGQFPIPSIXWEHAGRYRCYYGSDXAGRSESSDPLELVVXGAYIKPXLSAQPSPVVNSGGNVILQCDSQVAFDGFSLCKEGEDEHPQCLNSQPHARGSSRAIFSVGPVSPSRRWWYRCYAYDSNSPYEWSLPSDLLELLVLGVSKKPSLSVQPGPIVAPEEXLXLQCGSDAGYNRFVLYKDGERDFLQLAGAQPQAGLSQANFXLGPVSRSYGGQYRCYGAHNLSSEWSAPSDPLDILIAGQFYDRVSLSVQPGPXVASGENVXLLCQSQGWMQXFLLXKEGAADDPWRLRSXYQSQKYQAEFPMGPVXSAHAGXYRCYGSQSSKPYLLXHPSDPLELVVSGPSGGPSSPXXGPXSXSGPEDQPLXPXGSDPQSGLGRHLGVVIGILVAVILLLLLLLLLFLILRHRRQGKHWXSXQRKADFQHPAGAVGPEPXDRGLQWRSSPAADAQEENLYAAVKHXQPEDGVEMDXRQSPHDEDPQAVXYAEVKHSRPRREMASPPSPLSGEFLDXKDRQAEEDRQMDXEAAASEAPQDVXYAQLHSLXLRREAXEPPPSQEGPSPAVPSIYAXLAIH

SEQ ID NO: 14970 - protein, 651 aa, Homo sapiens
  MOD_RES (2)..(2): Selenocysteine
  MOD_RES (6)..(6): Selenocysteine
  MOD_RES (19)..(19): Selenocysteine
  MOD_RES (30)..(30): Selenocysteine
  MOD_RES (40)..(40): Selenocysteine
  MOD_RES (46)..(46): Selenocysteine
  MOD_RES (55)..(55): Selenocysteine
  MOD_RES (66)..(66): Selenocysteine
  MOD_RES (71)..(71): Selenocysteine
  MOD_RES (89)..(89): Selenocysteine
  MOD_RES (104)..(104): Selenocysteine
  MOD_RES (119)..(119): Selenocysteine
  MOD_RES (126)..(126): Selenocysteine
  MOD_RES (241)..(241): Selenocysteine
  MOD_RES (243)..(243): Selenocysteine
  MOD_RES (283)..(283): Selenocysteine
  MOD_RES (335)..(335): Selenocysteine
  MOD_RES (343)..(343): Selenocysteine
  MOD_RES (354)..(354): Selenocysteine
  MOD_RES (358)..(358): Selenocysteine
  MOD_RES (372)..(372): Selenocysteine
  MOD_RES (388)..(388): Selenocysteine
  MOD_RES (394)..(394): Selenocysteine
  MOD_RES (409)..(409): Selenocysteine
  MOD_RES (430)..(431): Selenocysteine
  MOD_RES (434)..(434): Selenocysteine
  MOD_RES (436)..(436): Selenocysteine
  MOD_RES (446)..(446): Selenocysteine
  MOD_RES (448)..(448): Selenocysteine
  MOD_RES (494)..(494): Selenocysteine
  MOD_RES (496)..(496): Selenocysteine
  MOD_RES (514)..(514): Selenocysteine
  MOD_RES (540)..(540): Selenocysteine
  MOD_RES (550)..(550): Selenocysteine
  MOD_RES (562)..(562): Selenocysteine
  MOD_RES (589)..(589): Selenocysteine
  MOD_RES (602)..(602): Selenocysteine
  MOD_RES (614)..(614): Selenocysteine
  MOD_RES (622)..(622): Selenocysteine
  MOD_RES (628)..(628): Selenocysteine
  MOD_RES (647)..(647): Selenocysteine
MXPILXVLICLGLSLGPRXHVQAGHLPKPXLWAEPGSVIXQGSPVXLRCQGGQEXQEYRLYREKKXALWIXRIPQELVKKGQFPIPSIXWEHAGRYRCYYGSDXAGRSESSDPLELVVXGAYIKPXLSAQPSPVVNSGGNVILQCDSQVAFDGFSLCKEGEDEHPQCLNSQPHARGSSRAIFSVGPVSPSRRWWYRCYAYDSNSPYEWSLPSDLLELLVLGVSKKPSLSVQPGPIVAPEEXLXLQCGSDAGYNRFVLYKDGERDFLQLAGAQPQAGLSQANFXLGPVSRSYGGQYRCYGAHNLSSEWSAPSDPLDILIAGQFYDRVSLSVQPGPXVASGENVXLLCQSQGWMQXFLLXKEGAADDPWRLRSXYQSQKYQAEFPMGPVXSAHAGXYRCYGSQSSKPYLLXHPSDPLELVVSGPSGGPSSPXXGPXSXSAGPEDQPLXPXGSDPQSGLGRHLGVVIGILVAVILLLLLLLLLFLILRHRRQGKHWXSXQRKADFQHPAGAVGPEPXDRGLQWRSSPAADAQEENLYAAVKHXQPEDGVEMDXRSPHDEDPQAVXYAEVKHSRPRREMASPPSPLSGEFLDXKDRQAEEDRQMDXEAAASEAPQDVXYAQLHSLXLRREAXEPPPSQEGPSPAVPSIYAXLAIH

SEQ ID NO: 14971 - protein, 652 aa, Homo sapiens
  MOD_RES (2)..(2): Selenocysteine
  MOD_RES (6)..(6): Selenocysteine
  MOD_RES (19)..(19): Selenocysteine
  MOD_RES (30)..(30): Selenocysteine
  MOD_RES (40)..(40): Selenocysteine
  MOD_RES (46)..(46): Selenocysteine
  MOD_RES (55)..(55): Selenocysteine
  MOD_RES (66)..(66): Selenocysteine
  MOD_RES (71)..(71): Selenocysteine
  MOD_RES (89)..(89): Selenocysteine
  MOD_RES (104)..(104): Selenocysteine
  MOD_RES (119)..(119): Selenocysteine
  MOD_RES (126)..(126): Selenocysteine
  MOD_RES (241)..(241): Selenocysteine
  MOD_RES (243)..(243): Selenocysteine
  MOD_RES (283)..(283): Selenocysteine
  MOD_RES (335)..(335): Selenocysteine
  MOD_RES (343)..(343): Selenocysteine
  MOD_RES (354)..(354): Selenocysteine
  MOD_RES (358)..(358): Selenocysteine
  MOD_RES (372)..(372): Selenocysteine
  MOD_RES (388)..(388): Selenocysteine
  MOD_RES (394)..(394): Selenocysteine
  MOD_RES (409)..(409): Selenocysteine
  MOD_RES (430)..(431): Selenocysteine
  MOD_RES (434)..(434): Selenocysteine
  MOD_RES (436)..(436): Selenocysteine
  MOD_RES (446)..(446): Selenocysteine
  MOD_RES (448)..(448): Selenocysteine
  MOD_RES (494)..(494): Selenocysteine
  MOD_RES (496)..(496): Selenocysteine
  MOD_RES (514)..(514): Selenocysteine
  MOD_RES (540)..(540): Selenocysteine
  MOD_RES (550)..(550): Selenocysteine
  MOD_RES (563)..(563): Selenocysteine
  MOD_RES (590)..(590): Selenocysteine
  MOD_RES (603)..(603): Selenocysteine
  MOD_RES (615)..(615): Selenocysteine
  MOD_RES (623)..(623): Selenocysteine
  MOD_RES (629)..(629): Selenocysteine
  MOD_RES (648)..(648): Selenocysteine
MXPILXVLICLGLSLGPRXHVQAGHLPKPXLWAEPGSVIXQGSPVXLRCQGGQEXQEYRLYREKKXALWIXRIPQELVKKGQFPIPSIXWEHAGRYRCYYGSDXAGRSESSDPLELVVXGAYIKPXLSAQPSPVVNSGGNVILQCDSQVAFDGFSLCKEGEDEHPQCLNSQPHARGSSRAIFSVGPVSPSRRWWYRCYAYDSNSPYEWSLPSDLLELLVLGVSKKPSLSVQPGPIVAPEEXLXLQCGSDAGYNRFVLYKDGERDFLQLAGAQPQAGLSQANFXLGPVSRSYGGQYRCYGAHNLSSEWSAPSDPLDILIAGQFYDRVSLSVQPGPXVASGENVXLLCQSQGWMQXFLLXKEGAADDPWRLRSXYQSQKYQAEFPMGPVXSAHAGXYRCYGSQSSKPYLLXHPSDPLELVVSGPSGGPSSPXXGPXSXSAGPEDQPLXPXGSDPQSGLGRHLGVVIGILVAVILLLLLLLLLFLILRHRRQGKHWXSXQRKADFQHPAGAVGPEPXDRGLQWRSSPAADAQEENLYAAVKHXQPEDGVEMDXRQSPHDEDPQAVXYAEVKHSRPRREMASPPSPLSGEFLDXKDRQAEEDRQMDXEAAASEAPQDVXYAQLHSLXLRREAXEPPPSQEGPSPAVPSIYAXLAIH

SEQ ID NO: 14972 - protein, 650 aa, Homo sapiens
  MOD_RES (2)..(2): Selenocysteine
  MOD_RES (6)..(6): Selenocysteine
  MOD_RES (19)..(19): Selenocysteine
  MOD_RES (30)..(30): Selenocysteine
  MOD_RES (40)..(40): Selenocysteine
  MOD_RES (46)..(46): Selenocysteine
  MOD_RES (55)..(55): Selenocysteine
  MOD_RES (66)..(66): Selenocysteine
  MOD_RES (71)..(71): Selenocysteine
  MOD_RES (89)..(89): Selenocysteine
  MOD_RES (104)..(104): Selenocysteine
  MOD_RES (119)..(119): Selenocysteine
  MOD_RES (126)..(126): Selenocysteine
  MOD_RES (142)..(142): Selenocysteine
  MOD_RES (241)..(241): Selenocysteine
  MOD_RES (243)..(243): Selenocysteine
  MOD_RES (283)..(283): Selenocysteine
  MOD_RES (335)..(335): Selenocysteine
  MOD_RES (343)..(343): Selenocysteine
  MOD_RES (354)..(354): Selenocysteine
  MOD_RES (358)..(358): Selenocysteine
  MOD_RES (372)..(372): Selenocysteine
  MOD_RES (388)..(388): Selenocysteine
  MOD_RES (394)..(394): Selenocysteine
  MOD_RES (409)..(409): Selenocysteine
  MOD_RES (430)..(431): Selenocysteine
  MOD_RES (434)..(434): Selenocysteine
  MOD_RES (436)..(436): Selenocysteine
  MOD_RES (445)..(445): Selenocysteine
  MOD_RES (447)..(447): Selenocysteine
  MOD_RES (493)..(493): Selenocysteine
  MOD_RES (495)..(495): Selenocysteine
  MOD_RES (513)..(513): Selenocysteine
  MOD_RES (539)..(539): Selenocysteine
  MOD_RES (549)..(549): Selenocysteine
  MOD_RES (561)..(561): Selenocysteine
  MOD_RES (588)..(588): Selenocysteine
  MOD_RES (601)..(601): Selenocysteine
  MOD_RES (613)..(613): Selenocysteine
  MOD_RES (621)..(621): Selenocysteine
  MOD_RES (627)..(627): Selenocysteine
  MOD_RES (646)..(646): Selenocysteine
MXPILXVLICLGLSLGPRXHVQAGHLPKPXLWAEPGSVIXQGSPVXLRCQGGQEXQEYRLYREKKXAPWIXRIPQELVKKGQFPIPSIXWEHAGRYRCYYGSDXAGRSESSDPLELVVXGAYIKPXLSAQPSPVVNSGGNVXLQCDSQVAFDGFILCKEGEDEHPQCLNSQPHARGSSRAIFSVGPVSPSRRWWYRCYAYDSNSPYEWSLPSDLLELLVLGVSKKPSLSVQPGPIVAPEEXLXLQCGSDAGYNRFVLYKDGERDFLQLAGAQPQAGLSQANFXLGPVSRSYGGQYRCYGAHNLSSEWSAPSDPLDILIAGQFYDRVSLSVQPGPXVASGENVXLLCQSQGWMQXFLLXKEGAADDPWRLRSXYQSQKYQAEFPMGPVXSAHAGXYRCYGSQSSKPYLLXHPSDPLELVVSGPSGGPSSPXXGPXSXSGPEDQPLXPXGSDPQSGLGRHLGVVIGILVAVILLLLLLLLLFLILRHRRQGKHWXSXQRKADFQHPAGAVGPEPXDRGLQWRSSPAADAQEENLYAAVKHXQPEDGVEMDXRSPHDEDPQAVXYAEVKHSRPRREMASPPSPLSGEFLDXKDRQAEEDRQMDXEAAASEAPQDVXYAQLHSLXLRRKAXEPPPSQEGPSPAVPSIYAXLAIH

SEQ ID NO: 14973 - protein, 651 aa, Homo sapiens
  MOD_RES (2)..(2): Selenocysteine
  MOD_RES (6)..(6): Selenocysteine
  MOD_RES (19)..(19): Selenocysteine
  MOD_RES (30)..(30): Selenocysteine
  MOD_RES (40)..(40): Selenocysteine
  MOD_RES (46)..(46): Selenocysteine
  MOD_RES (55)..(55): Selenocysteine
  MOD_RES (66)..(66): Selenocysteine
  MOD_RES (71)..(71): Selenocysteine
  MOD_RES (89)..(89): Selenocysteine
  MOD_RES (104)..(104): Selenocysteine
  MOD_RES (119)..(119): Selenocysteine
  MOD_RES (126)..(126): Selenocysteine
  MOD_RES (142)..(142): Selenocysteine
  MOD_RES (241)..(241): Selenocysteine
  MOD_RES (243)..(243): Selenocysteine
  MOD_RES (283)..(283): Selenocysteine
  MOD_RES (335)..(335): Selenocysteine
  MOD_RES (343)..(343): Selenocysteine
  MOD_RES (354)..(354): Selenocysteine
  MOD_RES (358)..(358): Selenocysteine
  MOD_RES (372)..(372): Selenocysteine
  MOD_RES (388)..(388): Selenocysteine
  MOD_RES (394)..(394): Selenocysteine
  MOD_RES (409)..(409): Selenocysteine
  MOD_RES (430)..(431): Selenocysteine
  MOD_RES (434)..(434): Selenocysteine
  MOD_RES (436)..(436): Selenocysteine
  MOD_RES (445)..(445): Selenocysteine
  MOD_RES (447)..(447): Selenocysteine
  MOD_RES (493)..(493): Selenocysteine
  MOD_RES (495)..(495): Selenocysteine
  MOD_RES (513)..(513): Selenocysteine
  MOD_RES (539)..(539): Selenocysteine
  MOD_RES (549)..(549): Selenocysteine
  MOD_RES (562)..(562): Selenocysteine
  MOD_RES (589)..(589): Selenocysteine
  MOD_RES (602)..(602): Selenocysteine
  MOD_RES (614)..(614): Selenocysteine
  MOD_RES (622)..(622): Selenocysteine
  MOD_RES (628)..(628): Selenocysteine
  MOD_RES (647)..(647): Selenocysteine
MXPILXVLICLGLSLGPRXHVQAGHLPKPXLWAEPGSVIXQGSPVXLRCQGGQEXQEYRLYREKKXAPWIXRIPQELVKKGQFPIPSIXWEHAGRYRCYYGSDXAGRSESSDPLELVVXGAYIKPXLSAQPSPVVNSGGNVXLQCDSQVAFDGFILCKEGEDEHPQCLNSQPHARGSSRAIFSVGPVSPSRRWWYRCYAYDSNSPYEWSLPSDLLELLVLGVSKKPSLSVQPGPIVAPEEXLXLQCGSDAGYNRFVLYKDGERDFLQLAGAQPQAGLSQANFXLGPVSRSYGGQYRCYGAHNLSSEWSAPSDPLDILIAGQFYDRVSLSVQPGPXVASGENVXLLCQSQGWMQXFLLXKEGAADDPWRLRSXYQSQKYQAEFPMGPVXSAHAGXYRCYGSQSSKPYLLXHPSDPLELVVSGPSGGPSSPXXGPXSXSGPEDQPLXPXGSDPQSGLGRHLGVVIGILVAVILLLLLLLLLFLILRHRRQGKHWXSXQRKADFQHPAGAVGPEPXDRGLQWRSSPAADAQEENLYAAVKHXQPEDGVEMDXRQSPHDEDPQAVXYAEVKHSRPRREMASPPSPLSGEFLDXKDRQAEEDRQMDXEAAASEAPQDVXYAQLHSLXLRRKAXEPPPSQEGPSPAVPSIYAXLAIH

SEQ ID NO: 14974 - protein, 651 aa, Homo sapiens
  MOD_RES (2)..(2): Selenocysteine
  MOD_RES (6)..(6): Selenocysteine
  MOD_RES (19)..(19): Selenocysteine
  MOD_RES (30)..(30): Selenocysteine
  MOD_RES (40)..(40): Selenocysteine
  MOD_RES (46)..(46): Selenocysteine
  MOD_RES (55)..(55): Selenocysteine
  MOD_RES (66)..(66): Selenocysteine
  MOD_RES (71)..(71): Selenocysteine
  MOD_RES (89)..(89): Selenocysteine
  MOD_RES (104)..(104): Selenocysteine
  MOD_RES (119)..(119): Selenocysteine
  MOD_RES (126)..(126): Selenocysteine
  MOD_RES (142)..(142): Selenocysteine
  MOD_RES (241)..(241): Selenocysteine
  MOD_RES (243)..(243): Selenocysteine
  MOD_RES (283)..(283): Selenocysteine
  MOD_RES (335)..(335): Selenocysteine
  MOD_RES (343)..(343): Selenocysteine
  MOD_RES (354)..(354): Selenocysteine
  MOD_RES (358)..(358): Selenocysteine
  MOD_RES (372)..(372): Selenocysteine
  MOD_RES (388)..(388): Selenocysteine
  MOD_RES (394)..(394): Selenocysteine
  MOD_RES (409)..(409): Selenocysteine
  MOD_RES (430)..(431): Selenocysteine
  MOD_RES (434)..(434): Selenocysteine
  MOD_RES (436)..(436): Selenocysteine
  MOD_RES (446)..(446): Selenocysteine
  MOD_RES (448)..(448): Selenocysteine
  MOD_RES (494)..(494): Selenocysteine
  MOD_RES (496)..(496): Selenocysteine
  MOD_RES (514)..(514): Selenocysteine
  MOD_RES (540)..(540): Selenocysteine
  MOD_RES (550)..(550): Selenocysteine
  MOD_RES (562)..(562): Selenocysteine
  MOD_RES (589)..(589): Selenocysteine
  MOD_RES (602)..(602): Selenocysteine
  MOD_RES (614)..(614): Selenocysteine
  MOD_RES (622)..(622): Selenocysteine
  MOD_RES (628)..(628): Selenocysteine
  MOD_RES (647)..(647): Selenocysteine
MXPILXVLICLGLSLGPRXHVQAGHLPKPXLWAEPGSVIXQGSPVXLRCQGGQEXQEYRLYREKKXAPWIXRIPQELVKKGQFPIPSIXWEHAGRYRCYYGSDXAGRSESSDPLELVVXGAYIKPXLSAQPSPVVNSGGNVXLQCDSQVAFDGFILCKEGEDEHPQCLNSQPHARGSSRAIFSVGPVSPSRRWWYRCYAYDSNSPYEWSLPSDLLELLVLGVSKKPSLSVQPGPIVAPEEXLXLQCGSDAGYNRFVLYKDGERDFLQLAGAQPQAGLSQANFXLGPVSRSYGGQYRCYGAHNLSSEWSAPSDPLDILIAGQFYDRVSLSVQPGPXVASGENVXLLCQSQGWMQXFLLXKEGAADDPWRLRSXYQSQKYQAEFPMGPVXSAHAGXYRCYGSQSSKPYLLXHPSDPLELVVSGPSGGPSSPXXGPXSXSAGPEDQPLXPXGSDPQSGLGRHLGVVIGILVAVILLLLLLLLLFLILRHRRQGKHWXSXQRKADFQHPAGAVGPEPXDRGLQWRSSPAADAQEENLYAAVKHXQPEDGVEMDXRSPHDEDPQAVXYAEVKHSRPRREMASPPSPLSGEFLDXKDRQAEEDRQMDXEAAASEAPQDVXYAQLHSLXLRRKAXEPPPSQEGPSPAVPSIYAXLAIH

SEQ ID NO: 14975 - protein, 652 aa, Homo sapiens
  MOD_RES (2)..(2): Selenocysteine
  MOD_RES (6)..(6): Selenocysteine
  MOD_RES (19)..(19): Selenocysteine
  MOD_RES (30)..(30): Selenocysteine
  MOD_RES (40)..(40): Selenocysteine
  MOD_RES (46)..(46): Selenocysteine
  MOD_RES (55)..(55): Selenocysteine
  MOD_RES (66)..(66): Selenocysteine
  MOD_RES (71)..(71): Selenocysteine
  MOD_RES (89)..(89): Selenocysteine
  MOD_RES (104)..(104): Selenocysteine
  MOD_RES (119)..(119): Selenocysteine
  MOD_RES (126)..(126): Selenocysteine
  MOD_RES (142)..(142): Selenocysteine
  MOD_RES (241)..(241): Selenocysteine
  MOD_RES (243)..(243): Selenocysteine
  MOD_RES (283)..(283): Selenocysteine
  MOD_RES (335)..(335): Selenocysteine
  MOD_RES (343)..(343): Selenocysteine
  MOD_RES (354)..(354): Selenocysteine
  MOD_RES (358)..(358): Selenocysteine
  MOD_RES (372)..(372): Selenocysteine
  MOD_RES (388)..(388): Selenocysteine
  MOD_RES (394)..(394): Selenocysteine
  MOD_RES (409)..(409): Selenocysteine
  MOD_RES (430)..(431): Selenocysteine
  MOD_RES (434)..(434): Selenocysteine
  MOD_RES (436)..(436): Selenocysteine
  MOD_RES (446)..(446): Selenocysteine
  MOD_RES (448)..(448): Selenocysteine
  MOD_RES (494)..(494): Selenocysteine
  MOD_RES (496)..(496): Selenocysteine
  MOD_RES (514)..(514): Selenocysteine
  MOD_RES (540)..(540): Selenocysteine
  MOD_RES (550)..(550): Selenocysteine
  MOD_RES (563)..(563): Selenocysteine
  MOD_RES (590)..(590): Selenocysteine
  MOD_RES (603)..(603): Selenocysteine
  MOD_RES (615)..(615): Selenocysteine
  MOD_RES (623)..(623): Selenocysteine
  MOD_RES (629)..(629): Selenocysteine
  MOD_RES (648)..(648): Selenocysteine
MXPILXVLICLGLSLGPRXHVQAGHLPKPXLWAEPGSVIXQGSPVXLRCQGGQEXQEYRLYREKKXAPWIXRIPQELVKKGQFPIPSIXWEHAGRYRCYYGSDXAGRSESSDPLELVVXGAYIKPXLSAQPSPVVNSGGNVXLQCDSQVAFDGFILCKEGEDEHPQCLNSQPHARGSSRAIFSVGPVSPSRRWWYRCYAYDSNSPYEWSLPSDLLELLVLGVSKKPSLSVQPGPIVAPEEXLXLQCGSDAGYNRFVLYKDGERDFLQLAGAQPQAGLSQANFXLGPVSRSYGGQYRCYGAHNLSSEWSAPSDPLDILIAGQFYDRVSLSVQPGPXVASGENVXLLCQSQGWMQXFLLXKEGAADDPWRLRSXYQSQKYQAEFPMGPVXSAHAGXYRCYGSQSSKPYLLXHPSDPLELVVSGPSGGPSSPXXGPXSXSAGPEDQPLXPXGSDPQSGLGRHLGVVIGILVAVILLLLLLLLLFLILRHRRQGKHWXSXQRKADFQHPAGAVGPEPXDRGLQWRSSPAADAQEENLYAAVKHXQPEDGVEMDXRQSPHDEDPQAVXYAEVKHSRPRREMASPPSPLSGEFLDXKDRQAEEDRQMDXEAAASEAPQDVXYAQLHSLXLRRKAXEPPPSQEGPSPAVPSIYAXLAIH

SEQ ID NO: 14976 - protein, 55 aa, Homo sapiens
  MOD_RES (19)..(19): Selenocysteine
  MOD_RES (23)..(23): Selenocysteine
  MOD_RES (36)..(36): Selenocysteine
  MOD_RES (40)..(40): Selenocysteine
  MOD_RES (42)..(42): Selenocysteine
  MOD_RES (47)..(47): Selenocysteine
MHRGLIHPQSRAVGGDAMXPIVXVLICLGLSLGPRXHVQXGXIPKPXLWAEPDSV

SEQ ID NO: 14977 - protein, 602 aa, Homo sapiens
  MOD_RES (19)..(19): Selenocysteine
  MOD_RES (23)..(23): Selenocysteine
  MOD_RES (30)..(30): Selenocysteine
  MOD_RES (35)..(35): Selenocysteine
  MOD_RES (45)..(45): Selenocysteine
  MOD_RES (51)..(51): Selenocysteine
  MOD_RES (76)..(76): Selenocysteine
  MOD_RES (94)..(94): Selenocysteine
  MOD_RES (98)..(98): Selenocysteine
  MOD_RES (123)..(123): Selenocysteine
  MOD_RES (130)..(130): Selenocysteine
  MOD_RES (140)..(140): Selenocysteine
  MOD_RES (146)..(146): Selenocysteine
  MOD_RES (247)..(247): Selenocysteine
  MOD_RES (287)..(287): Selenocysteine
  MOD_RES (323)..(323): Selenocysteine
  MOD_RES (329)..(329): Selenocysteine
  MOD_RES (339)..(339): Selenocysteine
  MOD_RES (347)..(347): Selenocysteine
  MOD_RES (358)..(358): Selenocysteine
  MOD_RES (362)..(362): Selenocysteine
  MOD_RES (392)..(392): Selenocysteine
  MOD_RES (398)..(398): Selenocysteine
  MOD_RES (435)..(435): Selenocysteine
  MOD_RES (440)..(440): Selenocysteine
  MOD_RES (449)..(449): Selenocysteine
  MOD_RES (451)..(451): Selenocysteine
  MOD_RES (497)..(497): Selenocysteine
  MOD_RES (499)..(499): Selenocysteine
  MOD_RES (517)..(517): Selenocysteine
  MOD_RES (543)..(543): Selenocysteine
  MOD_RES (553)..(553): Selenocysteine
  MOD_RES (565)..(565): Selenocysteine
  MOD_RES (573)..(573): Selenocysteine
  MOD_RES (579)..(579): Selenocysteine
  MOD_RES (598)..(598): Selenocysteine
MHRGLIHPQSRAVGGDAMXPIVXVLICLGXIPKPXLWAEPDSVIXQGSPVXLSCQGSLEAQEYRLYREKKSASWIXRIRPELVKNGQFHIPSIXWEHXGRYGCQYYSRARWSELSDPLVLVMXGAYPKPXLSAQPSPVVXSGGRVXLQCESQVAFGGFILCKEGEEEHPQCLNSQPHARGSSRAIFSVGPVSPNRRWSHRCYGYDLNSPYVWSSPSDLLELLVPGVSKKPSLSVQPGPVVAPGESLXLQCVSDVGYDRFVLYKEGERDLRQLPGRQPQAGLSQANFXLGPVSRSYGGQYRCYGAHNLSSECSAPSDPLDILIXGQIRGXPFISVQPGPXVASGENVXLLCQSWRQFHXFLLXKAGAADAPLRLRSIHEYPKYQAEFPMSPVXSAHAGXYRCYGSLNSDPYLLSHPSEPLELVVSGPSMGSSPPPXGPISXPGPEDQPLXPXGSDPQSGLGRHLGVVIGILVAVVLLLLLLLLLFLILRHRRQGKHWXSXQRKADFQHPAGAVGPEPXDRGLQWRSSPAADAQEENLYAAVKDXQPEDGVEMDXRAAASEAPQDVXYAQLHSLXLRRKAXEPPPSQEREPPAEPSIYAXLAIH

SEQ ID NO: 14978 - protein, 603 aa, Homo sapiens
  MOD_RES (19)..(19): Selenocysteine
  MOD_RES (23)..(23): Selenocysteine
  MOD_RES (30)..(30): Selenocysteine
  MOD_RES (35)..(35): Selenocysteine
  MOD_RES (45)..(45): Selenocysteine
  MOD_RES (51)..(51): Selenocysteine
  MOD_RES (76)..(76): Selenocysteine
  MOD_RES (94)..(94): Selenocysteine
  MOD_RES (98)..(98): Selenocysteine
  MOD_RES (123)..(123): Selenocysteine
  MOD_RES (130)..(130): Selenocysteine
  MOD_RES (140)..(140): Selenocysteine
  MOD_RES (146)..(146): Selenocysteine
  MOD_RES (247)..(247): Selenocysteine
  MOD_RES (287)..(287): Selenocysteine
  MOD_RES (323)..(323): Selenocysteine
  MOD_RES (329)..(329): Selenocysteine
  MOD_RES (339)..(339): Selenocysteine
  MOD_RES (347)..(347): Selenocysteine
  MOD_RES (358)..(358): Selenocysteine
  MOD_RES (362)..(362): Selenocysteine
  MOD_RES (392)..(392): Selenocysteine
  MOD_RES (398)..(398): Selenocysteine
  MOD_RES (435)..(435): Selenocysteine
  MOD_RES (440)..(440): Selenocysteine
  MOD_RES (450)..(450): Selenocysteine
  MOD_RES (452)..(452): Selenocysteine
  MOD_RES (498)..(498): Selenocysteine
  MOD_RES (500)..(500): Selenocysteine
  MOD_RES (518)..(518): Selenocysteine
  MOD_RES (544)..(544): Selenocysteine
  MOD_RES (554)..(554): Selenocysteine
  MOD_RES (566)..(566): Selenocysteine
  MOD_RES (574)..(574): Selenocysteine
  MOD_RES (580)..(580): Selenocysteine
  MOD_RES (599)..(599): Selenocysteine
MHRGLIHPQSRAVGGDAMXPIVXVLICLGXIPKPXLWAEPDSVIXQGSPVXLSCQGSLEAQEYRLYREKKSASWIXRIRPELVKNGQFHIPSIXWEHXGRYGCQYYSRARWSELSDPLVLVMXGAYPKPXLSAQPSPVVXSGGRVXLQCESQVAFGGFILCKEGEEEHPQCLNSQPHARGSSRAIFSVGPVSPNRRWSHRCYGYDLNSPYVWSSPSDLLELLVPGVSKKPSLSVQPGPVVAPGESLXLQCVSDVGYDRFVLYKEGERDLRQLPGRQPQAGLSQANFXLGPVSRSYGGQYRCYGAHNLSSECSAPSDPLDILIXGQIRGXPFISVQPGPXVASGENVXLLCQSWRQFHXFLLXKAGAADAPLRLRSIHEYPKYQAEFPMSPVXSAHAGXYRCYGSLNSDPYLLSHPSEPLELVVSGPSMGSSPPPXGPISXPAGPEDQPLXPXGSDPQSGLGRHLGVVIGILVAVVLLLLLLLLLFLILRHRRQGKHWXSXQRKADFQHPAGAVGPEPXDRGLQWRSSPAADAQEENLYAAVKDXQPEDGVEMDXRAAASEAPQDVXYAQLHSLXLRRKAXEPPPSQEREPPAEPSIYAXLAIH

SEQ ID NO: 14979 - protein, 482 aa, Homo sapiens
  MOD_RES (2)..(2): Selenocysteine
  MOD_RES (9)..(9): Selenocysteine
  MOD_RES (19)..(19): Selenocysteine
  MOD_RES (25)..(25): Selenocysteine
  MOD_RES (126)..(126): Selenocysteine
  MOD_RES (166)..(166): Selenocysteine
  MOD_RES (202)..(202): Selenocysteine
  MOD_RES (208)..(208): Selenocysteine
  MOD_RES (218)..(218): Selenocysteine
  MOD_RES (226)..(226): Selenocysteine
  MOD_RES (237)..(237): Selenocysteine
  MOD_RES (241)..(241): Selenocysteine
  MOD_RES (271)..(271): Selenocysteine
  MOD_RES (277)..(277): Selenocysteine
  MOD_RES (314)..(314): Selenocysteine
  MOD_RES (319)..(319): Selenocysteine
  MOD_RES (329)..(329): Selenocysteine
  MOD_RES (331)..(331): Selenocysteine
  MOD_RES (377)..(377): Selenocysteine
  MOD_RES (379)..(379): Selenocysteine
  MOD_RES (397)..(397): Selenocysteine
  MOD_RES (423)..(423): Selenocysteine
  MOD_RES (433)..(433): Selenocysteine
  MOD_RES (445)..(445): Selenocysteine
  MOD_RES (453)..(453): Selenocysteine
  MOD_RES (459)..(459): Selenocysteine
  MOD_RES (478)..(478): Selenocysteine
MXGAYPKPXLSAQPSPVVXSGGRVXLQCESQVAFGGFILCKEGEDEHPQCLNSQPHARGSSRAIFSVGPVSPNRRWSHRCYGYDLNSPYVWSSPSDLLELLVPGVSKKPSLSVQPGPVMAPGESLXLQCVSDVGYDRFVLYKEGERDLRQLPGRQPQAGLSQANFXLGPVSRSYGGQYRCYGAHNLSSECSAPSDPLDILIXGQIRGXPFISVQPGPXVASGENVXLLCQSWRQFHXFLLXKAGAADAPLRLRSIHEYPKYQAEFPMSPVXSAHAGXYRCYGSLNSDPYLLSHPSEPLELVVSGPSMGSSPPPXGPISXPAGPEDQPLXPXGSDPQSGLGRHLGVVIGILVAVVLLLLLLLLLFLILRHRRQGKHWXSXQRKADFQHPAGAVGPEPXDRGLQWRSSPAADAQEENLYAAVKDXQPEDGVEMDXRAAASEAPQDVXYAQLHSLXLRRKAXEPPPSQEREPPAEPSIYAXLAIH

SEQ ID NO: 14980 - protein, 482 aa, Homo sapiens
  MOD_RES (2)..(2): Selenocysteine
  MOD_RES (9)..(9): Selenocysteine
  MOD_RES (19)..(19): Selenocysteine
  MOD_RES (25)..(25): Selenocysteine
  MOD_RES (126)..(126): Selenocysteine
  MOD_RES (166)..(166): Selenocysteine
  MOD_RES (202)..(202): Selenocysteine
  MOD_RES (208)..(208): Selenocysteine
  MOD_RES (218)..(218): Selenocysteine
  MOD_RES (226)..(226): Selenocysteine
  MOD_RES (237)..(237): Selenocysteine
  MOD_RES (241)..(241): Selenocysteine
  MOD_RES (271)..(271): Selenocysteine
  MOD_RES (277)..(277): Selenocysteine
  MOD_RES (314)..(314): Selenocysteine
  MOD_RES (319)..(319): Selenocysteine
  MOD_RES (329)..(329): Selenocysteine
  MOD_RES (331)..(331): Selenocysteine
  MOD_RES (377)..(377): Selenocysteine
  MOD_RES (379)..(379): Selenocysteine
  MOD_RES (397)..(397): Selenocysteine
  MOD_RES (423)..(423): Selenocysteine
  MOD_RES (433)..(433): Selenocysteine
  MOD_RES (445)..(445): Selenocysteine
  MOD_RES (453)..(453): Selenocysteine
  MOD_RES (459)..(459): Selenocysteine
  MOD_RES (478)..(478): Selenocysteine
MXGAYPKPXLSAQPSPVVXSGGRVXLQCESQVAFGGFILCKEGEEEHPQCLNSQPHARGSSRAIFSVGPVSPNRRWSHRCYGYDLNSPYVWSSPSDLLELLVPGVSKKPSLSVQPGPVVAPGESLXLQCVSDVGYDRFVLYKEGERDLRQLPGRQPQAGLSQANFXLGPVSRSYGGQYRCYGAHNLSSECSAPSDPLDILIXGQIRGXPFISVQPGPXVASGENVXLLCQSWRQFHXFLLXKAGAADAPLRLRSIHEYPKYQAEFPMSPVXSAHAGXYRCYGSLNSDPYLLSHPSEPLELVVSGPSMGSSPPPXGPISXPAGPEDQPLXPXGSDPQSGLGRHLGVVIGILVAVVLLLLLLLLLFLILRHRRQGKHWXSXQRKADFQHPAGAVGPEPXDRGLQWRSSPAADAQEENLYAAVKDXQPEDGVEMDXRAAASEAPQDVXYAQLHSLXLRRKAXEPPPSQEREPPAEPSIYAXLAIH

SEQ ID NO: 14981 - protein, 38 aa, Homo sapiens
  MOD_RES (2)..(2): Selenocysteine
  MOD_RES (6)..(6): Selenocysteine
  MOD_RES (19)..(19): Selenocysteine
  MOD_RES (23)..(23): Selenocysteine
  MOD_RES (25)..(25): Selenocysteine
  MOD_RES (30)..(30): Selenocysteine
MXPIVXVLICLGLSLGPRXHVQXGXIPKPXLWAEPDSV

SEQ ID NO: 14982 - protein, 510 aa, Homo sapiens
  MOD_RES (2)..(2): Selenocysteine
  MOD_RES (6)..(6): Selenocysteine
  MOD_RES (19)..(19): Selenocysteine
  MOD_RES (23)..(23): Selenocysteine
  MOD_RES (25)..(25): Selenocysteine
  MOD_RES (30)..(30): Selenocysteine
  MOD_RES (40)..(40): Selenocysteine
  MOD_RES (46)..(46): Selenocysteine
  MOD_RES (71)..(71): Selenocysteine
  MOD_RES (89)..(89): Selenocysteine
  MOD_RES (93)..(93): Selenocysteine
  MOD_RES (118)..(118): Selenocysteine
  MOD_RES (125)..(125): Selenocysteine
  MOD_RES (135)..(135): Selenocysteine
  MOD_RES (141)..(141): Selenocysteine
  MOD_RES (242)..(242): Selenocysteine
  MOD_RES (282)..(282): Selenocysteine
  MOD_RES (318)..(318): Selenocysteine
  MOD_RES (324)..(324): Selenocysteine
  MOD_RES (334)..(334): Selenocysteine
  MOD_RES (342)..(342): Selenocysteine
  MOD_RES (353)..(353): Selenocysteine
  MOD_RES (357)..(357): Selenocysteine
  MOD_RES (387)..(387): Selenocysteine
  MOD_RES (393)..(393): Selenocysteine
  MOD_RES (430)..(430): Selenocysteine
  MOD_RES (435)..(435): Selenocysteine
  MOD_RES (445)..(445): Selenocysteine
  MOD_RES (447)..(447): Selenocysteine
  MOD_RES (493)..(493): Selenocysteine
  MOD_RES (501)..(501): Selenocysteine
  MOD_RES (506)..(506): Selenocysteine
MXPIVXVLICLGLSLGPRXHVQXGXIPKPXLWAEPDSVIXQGSPVXLSCQGSLEAQEYRLYREKKSASWIXRIRPELVKNGQFHIPSIXWEHXGRYGCQYYSRARWSELSDPLVLVMXGAYPKPXLSAQPSPVVXSGGRVXLQCESQVAFGGFILCKEGEDEHPQCLNSQPHARGSSRAIFSVGPVSPNRRWSHRCYGYDLNSPYVWSSPSDLLELLVPGVSKKPSLSVQPGPVVAPGESLXLQCVSDVGYDRFVLYKEGERDLRQLPGRQPQAGLSQANFXLGPVSRSYGGQYRCYGAYNLSSEWSAPSDPLDILIXGQIHGXPFISVQPGPXVASGENVXLLCQSWRQFHXFLLXKAGAADAPLRLRSIHEYPKYQAEFPMSPVXSAHAGXYRCYGSLNSDPYLLSHPSEPLELVVSGPSMGSSPPPXGPISXPAGPEDQPLXPXGSDPQSGLGRHLGVVIGILVAVVLLLLLLLLLFLILRHRRQGKHWXSSPAQLPXPRKKXSMLP

SEQ ID NO: 14983 - protein, 597 aa, Homo sapiens
  MOD_RES (2)..(2): Selenocysteine
  MOD_RES (6)..(6): Selenocysteine
  MOD_RES (19)..(19): Selenocysteine
  MOD_RES (23)..(23): Selenocysteine
  MOD_RES (25)..(25): Selenocysteine
  MOD_RES (30)..(30): Selenocysteine
  MOD_RES (40)..(40): Selenocysteine
  MOD_RES (46)..(46): Selenocysteine
  MOD_RES (71)..(71): Selenocysteine
  MOD_RES (89)..(89): Selenocysteine
  MOD_RES (93)..(93): Selenocysteine
  MOD_RES (118)..(118): Selenocysteine
  MOD_RES (125)..(125): Selenocysteine
  MOD_RES (135)..(135): Selenocysteine
  MOD_RES (141)..(141): Selenocysteine
  MOD_RES (242)..(242): Selenocysteine
  MOD_RES (282)..(282): Selenocysteine
  MOD_RES (318)..(318): Selenocysteine
  MOD_RES (324)..(324): Selenocysteine
  MOD_RES (334)..(334): Selenocysteine
  MOD_RES (342)..(342): Selenocysteine
  MOD_RES (353)..(353): Selenocysteine
  MOD_RES (357)..(357): Selenocysteine
  MOD_RES (387)..(387): Selenocysteine
  MOD_RES (393)..(393): Selenocysteine
  MOD_RES (430)..(430): Selenocysteine
  MOD_RES (435)..(435): Selenocysteine
  MOD_RES (444)..(444): Selenocysteine
  MOD_RES (446)..(446): Selenocysteine
  MOD_RES (492)..(492): Selenocysteine
  MOD_RES (494)..(494): Selenocysteine
  MOD_RES (512)..(512): Selenocysteine
  MOD_RES (538)..(538): Selenocysteine
  MOD_RES (548)..(548): Selenocysteine
  MOD_RES (560)..(560): Selenocysteine
  MOD_RES (568)..(568): Selenocysteine
  MOD_RES (574)..(574): Selenocysteine
  MOD_RES (593)..(593): Selenocysteine
MXPIVXVLICLGLSLGPRXHVQXGXIPKPXLWAEPDSVIXQGSPVXLSCQGSLEAQEYRLYREKKSASWIXRIRPELVKNGQFHIPSIXWEHXGRYGCQYYSRARWSELSDPLVLVMXGAYPKPXLSAQPSPVVXSGGRVXLQCESQVAFGGFILCKEGEDEHPQCLNSQPHARGSSRAIFSVGPVSPNRRWSHRCYGYDLNSPYVWSSPSDLLELLVPGVSKKPSLSVQPGPVVAPGESLXLQCVSDVGYDRFVLYKEGERDLRQLPGRQPQAGLSQANFXLGPVSRSYGGQYRCYGAYNLSSEWSAPSDPLDILIXGQIHGXPFISVQPGPXVASGENVXLLCQSWRQFHXFLLXKAGAADAPLRLRSIHEYPKYQAEFPMSPVXSAHAGXYRCYGSLNSDPYLLSHPSEPLELVVSGPSMGSSPPPXGPISXPGPEDQPLXPXGSDPQSGLGRHLGVVIGILVAVVLLLLLLLLLFLILRHRRQGKHWXSXQRKADFQHPAGAVGPEPXDRGLQWRSSPAADAQEENLYAAVKDXQPEDGVEMDXRAAASEAPQDVXYAQLHSLXLRRKAXEPPPSQEGEPPAEPSIYAXLAIH

SEQ ID NO: 14984 - protein, 597 aa, Homo sapiens
  MOD_RES (2)..(2): Selenocysteine
  MOD_RES (6)..(6): Selenocysteine
  MOD_RES (19)..(19): Selenocysteine
  MOD_RES (23)..(23): Selenocysteine
  MOD_RES (25)..(25): Selenocysteine
  MOD_RES (30)..(30): Selenocysteine
  MOD_RES (40)..(40): Selenocysteine
  MOD_RES (46)..(46): Selenocysteine
  MOD_RES (71)..(71): Selenocysteine
  MOD_RES (89)..(89): Selenocysteine
  MOD_RES (93)..(93): Selenocysteine
  MOD_RES (118)..(118): Selenocysteine
  MOD_RES (125)..(125): Selenocysteine
  MOD_RES (135)..(135): Selenocysteine
  MOD_RES (141)..(141): Selenocysteine
  MOD_RES (242)..(242): Selenocysteine
  MOD_RES (282)..(282): Selenocysteine
  MOD_RES (318)..(318): Selenocysteine
  MOD_RES (324)..(324): Selenocysteine
  MOD_RES (334)..(334): Selenocysteine
  MOD_RES (342)..(342): Selenocysteine
  MOD_RES (353)..(353): Selenocysteine
  MOD_RES (357)..(357): Selenocysteine
  MOD_RES (387)..(387): Selenocysteine
  MOD_RES (393)..(393): Selenocysteine
  MOD_RES (430)..(430): Selenocysteine
  MOD_RES (435)..(435): Selenocysteine
  MOD_RES (444)..(444): Selenocysteine
  MOD_RES (446)..(446): Selenocysteine
  MOD_RES (492)..(492): Selenocysteine
  MOD_RES (494)..(494): Selenocysteine
  MOD_RES (512)..(512): Selenocysteine
  MOD_RES (538)..(538): Selenocysteine
  MOD_RES (548)..(548): Selenocysteine
  MOD_RES (560)..(560): Selenocysteine
  MOD_RES (568)..(568): Selenocysteine
  MOD_RES (574)..(574): Selenocysteine
  MOD_RES (593)..(593): Selenocysteine
MXPIVXVLICLGLSLGPRXHVQXGXIPKPXLWAEPDSVIXQGSPVXLSCQGSLEAQEYRLYREKKSASWIXRIRPELVKNGQFHIPSIXWEHXGRYGCQYYSRARWSELSDPLVLVMXGAYPKPXLSAQPSPVVXSGGRVXLQCESQVAFGGFILCKEGEDEHPQCLNSQPHARGSSRAIFSVGPVSPNRRWSHRCYGYDLNSPYVWSSPSDLLELLVPGVSKKPSLSVQPGPVVAPGESLXLQCVSDVGYDRFVLYKEGERDLRQLPGRQPQAGLSQANFXLGPVSRSYGGQYRCYGAYNLSSEWSAPSDPLDILIXGQIHGXPFISVQPGPXVASGENVXLLCQSWRQFHXFLLXKAGAADAPLRLRSIHEYPKYQAEFPMSPVXSAHAGXYRCYGSLNSDPYLLSHPSEPLELVVSGPSMGSSPPPXGPISXPGPEDQPLXPXGSDPQSGLGRHLGVVIGILVAVVLLLLLLLLLFLILRHRRQGKHWXSXQRKADFQHPAGAVGPEPXDRGLQWRSSPAADAQEENLYAAVKDXQPEDGVEMDXRAAASEAPQDVXYAQLHSLXLRRKAXEPPPSQEREPPAEPSIYAXLAIH

SEQ ID NO: 14985 - protein, 598 aa, Homo sapiens
  MOD_RES (2)..(2): Selenocysteine
  MOD_RES (6)..(6): Selenocysteine
  MOD_RES (19)..(19): Selenocysteine
  MOD_RES (23)..(23): Selenocysteine
  MOD_RES (25)..(25): Selenocysteine
  MOD_RES (30)..(30): Selenocysteine
  MOD_RES (40)..(40): Selenocysteine
  MOD_RES (46)..(46): Selenocysteine
  MOD_RES (71)..(71): Selenocysteine
  MOD_RES (89)..(89): Selenocysteine
  MOD_RES (93)..(93): Selenocysteine
  MOD_RES (118)..(118): Selenocysteine
  MOD_RES (125)..(125): Selenocysteine
  MOD_RES (135)..(135): Selenocysteine
  MOD_RES (141)..(141): Selenocysteine
  MOD_RES (242)..(242): Selenocysteine
  MOD_RES (282)..(282): Selenocysteine
  MOD_RES (318)..(318): Selenocysteine
  MOD_RES (324)..(324): Selenocysteine
  MOD_RES (334)..(334): Selenocysteine
  MOD_RES (342)..(342): Selenocysteine
  MOD_RES (353)..(353): Selenocysteine
  MOD_RES (357)..(357): Selenocysteine
  MOD_RES (387)..(387): Selenocysteine
  MOD_RES (393)..(393): Selenocysteine
  MOD_RES (430)..(430): Selenocysteine
  MOD_RES (435)..(435): Selenocysteine
  MOD_RES (445)..(445): Selenocysteine
  MOD_RES (447)..(447): Selenocysteine
  MOD_RES (493)..(493): Selenocysteine
  MOD_RES (495)..(495): Selenocysteine
  MOD_RES (513)..(513): Selenocysteine
  MOD_RES (539)..(539): Selenocysteine
  MOD_RES (549)..(549): Selenocysteine
  MOD_RES (561)..(561): Selenocysteine
  MOD_RES (569)..(569): Selenocysteine
  MOD_RES (575)..(575): Selenocysteine
  MOD_RES (594)..(594): Selenocysteine
MXPIVXVLICLGLSLGPRXHVQXGXIPKPXLWAEPDSVIXQGSPVXLSCQGSLEAQEYRLYREKKSASWIXRIRPELVKNGQFHIPSIXWEHXGRYGCQYYSRARWSELSDPLVLVMXGAYPKPXLSAQPSPVVXSGGRVXLQCESQVAFGGFILCKEGEDEHPQCLNSQPHARGSSRAIFSVGPVSPNRRWSHRCYGYDLNSPYVWSSPSDLLELLVPGVSKKPSLSVQPGPVVAPGESLXLQCVSDVGYDRFVLYKEGERDLRQLPGRQPQAGLSQANFXLGPVSRSYGGQYRCYGAYNLSSEWSAPSDPLDILIXGQIHGXPFISVQPGPXVASGENVXLLCQSWRQFHXFLLXKAGAADAPLRLRSIHEYPKYQAEFPMSPVXSAHAGXYRCYGSLNSDPYLLSHPSEPLELVVSGPSMGSSPPPXGPISXPAGPEDQPLXPXGSDPQSGLGRHLGVVIGILVAVVLLLLLLLLLFLILRHRRQGKHWXSXQRKADFQHPAGAVGPEPXDRGLQWRSSPAADAQEENLYAAVKDXQPEDGVEMDXRAAASEAPQDVXYAQLHSLXLRRKAXEPPPSQEGEPPAEPSIYAXLAIH

SEQ ID NO: 14986 - protein, 598 aa, Homo sapiens
  MOD_RES (2)..(2): Selenocysteine
  MOD_RES (6)..(6): Selenocysteine
  MOD_RES (19)..(19): Selenocysteine
  MOD_RES (23)..(23): Selenocysteine
  MOD_RES (25)..(25): Selenocysteine
  MOD_RES (30)..(30): Selenocysteine
  MOD_RES (40)..(40): Selenocysteine
  MOD_RES (46)..(46): Selenocysteine
  MOD_RES (71)..(71): Selenocysteine
  MOD_RES (89)..(89): Selenocysteine
  MOD_RES (93)..(93): Selenocysteine
  MOD_RES (118)..(118): Selenocysteine
  MOD_RES (125)..(125): Selenocysteine
  MOD_RES (135)..(135): Selenocysteine
  MOD_RES (141)..(141): Selenocysteine
  MOD_RES (242)..(242): Selenocysteine
  MOD_RES (282)..(282): Selenocysteine
  MOD_RES (318)..(318): Selenocysteine
  MOD_RES (324)..(324): Selenocysteine
  MOD_RES (334)..(334): Selenocysteine
  MOD_RES (342)..(342): Selenocysteine
  MOD_RES (353)..(353): Selenocysteine
  MOD_RES (357)..(357): Selenocysteine
  MOD_RES (387)..(387): Selenocysteine
  MOD_RES (393)..(393): Selenocysteine
  MOD_RES (430)..(430): Selenocysteine
  MOD_RES (435)..(435): Selenocysteine
  MOD_RES (445)..(445): Selenocysteine
  MOD_RES (447)..(447): Selenocysteine
  MOD_RES (493)..(493): Selenocysteine
  MOD_RES (495)..(495): Selenocysteine
  MOD_RES (513)..(513): Selenocysteine
  MOD_RES (539)..(539): Selenocysteine
  MOD_RES (549)..(549): Selenocysteine
  MOD_RES (561)..(561): Selenocysteine
  MOD_RES (569)..(569): Selenocysteine
  MOD_RES (575)..(575): Selenocysteine
  MOD_RES (594)..(594): Selenocysteine
MXPIVXVLICLGLSLGPRXHVQXGXIPKPXLWAEPDSVIXQGSPVXLSCQGSLEAQEYRLYREKKSASWIXRIRPELVKNGQFHIPSIXWEHXGRYGCQYYSRARWSELSDPLVLVMXGAYPKPXLSAQPSPVVXSGGRVXLQCESQVAFGGFILCKEGEDEHPQCLNSQPHARGSSRAIFSVGPVSPNRRWSHRCYGYDLNSPYVWSSPSDLLELLVPGVSKKPSLSVQPGPVVAPGESLXLQCVSDVGYDRFVLYKEGERDLRQLPGRQPQAGLSQANFXLGPVSRSYGGQYRCYGAYNLSSEWSAPSDPLDILIXGQIHGXPFISVQPGPXVASGENVXLLCQSWRQFHXFLLXKAGAADAPLRLRSIHEYPKYQAEFPMSPVXSAHAGXYRCYGSLNSDPYLLSHPSEPLELVVSGPSMGSSPPPXGPISXPAGPEDQPLXPXGSDPQSGLGRHLGVVIGILVAVVLLLLLLLLLFLILRHRRQGKHWXSXQRKADFQHPAGAVGPEPXDRGLQWRSSPAADAQEENLYAAVKDXQPEDGVEMDXRAAASEAPQDVXYAQLHSLXLRRKAXEPPPSQEREPPAEPSIYAXLAIH

SEQ ID NO: 14987 - protein, 510 aa, Homo sapiens
  MOD_RES (2)..(2): Selenocysteine
  MOD_RES (6)..(6): Selenocysteine
  MOD_RES (19)..(19): Selenocysteine
  MOD_RES (23)..(23): Selenocysteine
  MOD_RES (25)..(25): Selenocysteine
  MOD_RES (30)..(30): Selenocysteine
  MOD_RES (40)..(40): Selenocysteine
  MOD_RES (46)..(46): Selenocysteine
  MOD_RES (71)..(71): Selenocysteine
  MOD_RES (89)..(89): Selenocysteine
  MOD_RES (93)..(93): Selenocysteine
  MOD_RES (118)..(118): Selenocysteine
  MOD_RES (125)..(125): Selenocysteine
  MOD_RES (135)..(135): Selenocysteine
  MOD_RES (141)..(141): Selenocysteine
  MOD_RES (242)..(242): Selenocysteine
  MOD_RES (282)..(282): Selenocysteine
  MOD_RES (318)..(318): Selenocysteine
  MOD_RES (324)..(324): Selenocysteine
  MOD_RES (334)..(334): Selenocysteine
  MOD_RES (342)..(342): Selenocysteine
  MOD_RES (353)..(353): Selenocysteine
  MOD_RES (357)..(357): Selenocysteine
  MOD_RES (387)..(387): Selenocysteine
  MOD_RES (393)..(393): Selenocysteine
  MOD_RES (430)..(430): Selenocysteine
  MOD_RES (435)..(435): Selenocysteine
  MOD_RES (445)..(445): Selenocysteine
  MOD_RES (447)..(447): Selenocysteine
  MOD_RES (493)..(493): Selenocysteine
  MOD_RES (501)..(501): Selenocysteine
  MOD_RES (506)..(506): Selenocysteine
MXPIVXVLICLGLSLGPRXHVQXGXIPKPXLWAEPDSVIXQGSPVXLSCQGSLEAQEYRLYREKKSASWIXRIRPELVKNGQFHIPSIXWEHXGRYGCQYYSRARWSELSDPLVLVMXGAYPKPXLSAQPSPVVXSGGRVXLQCESQVAFGGFILCKEGEEEHPQCLNSQPHARGSSRAIFSVGPVSPNRRWSHRCYGYDLNSPYVWSSPSDLLELLVPGVSKKPSLSVQPGPVVAPGESLXLQCVSDVGYDRFVLYKEGERDLRQLPGRQPQAGLSQANFXLGPVSRSYGGQYRCYGAHNLSSECSAPSDPLDILIXGQIRGXPFISVQPGPXVASGENVXLLCQSWRQFHXFLLXKAGAADAPLRLRSIHEYPKYQAEFPMSPVXSAHAGXYRCYGSLNSDPYLLSHPSEPLELVVSGPSMGSSPPPXGPISXPAGPEDQPLXPXGSDPQSGLGRHLGVVIGILVAVVLLLLLLLLLFLILRHRRQGKHWXSSPAQLPXPRKKXSMLP

SEQ ID NO: 14988 - protein, 597 aa, Homo sapiens
  MOD_RES (2)..(2): Selenocysteine
  MOD_RES (6)..(6): Selenocysteine
  MOD_RES (19)..(19): Selenocysteine
  MOD_RES (23)..(23): Selenocysteine
  MOD_RES (25)..(25): Selenocysteine
  MOD_RES (30)..(30): Selenocysteine
  MOD_RES (40)..(40): Selenocysteine
  MOD_RES (46)..(46): Selenocysteine
  MOD_RES (71)..(71): Selenocysteine
  MOD_RES (89)..(89): Selenocysteine
  MOD_RES (93)..(93): Selenocysteine
  MOD_RES (118)..(118): Selenocysteine
  MOD_RES (125)..(125): Selenocysteine
  MOD_RES (135)..(135): Selenocysteine
  MOD_RES (141)..(141): Selenocysteine
  MOD_RES (242)..(242): Selenocysteine
  MOD_RES (282)..(282): Selenocysteine
  MOD_RES (318)..(318): Selenocysteine
  MOD_RES (324)..(324): Selenocysteine
  MOD_RES (334)..(334): Selenocysteine
  MOD_RES (342)..(342): Selenocysteine
  MOD_RES (353)..(353): Selenocysteine
  MOD_RES (357)..(357): Selenocysteine
  MOD_RES (387)..(387): Selenocysteine
  MOD_RES (393)..(393): Selenocysteine
  MOD_RES (430)..(430): Selenocysteine
  MOD_RES (435)..(435): Selenocysteine
  MOD_RES (444)..(444): Selenocysteine
  MOD_RES (446)..(446): Selenocysteine
  MOD_RES (492)..(492): Selenocysteine
  MOD_RES (494)..(494): Selenocysteine
  MOD_RES (512)..(512): Selenocysteine
  MOD_RES (538)..(538): Selenocysteine
  MOD_RES (548)..(548): Selenocysteine
  MOD_RES (560)..(560): Selenocysteine
  MOD_RES (568)..(568): Selenocysteine
  MOD_RES (574)..(574): Selenocysteine
  MOD_RES (593)..(593): Selenocysteine
MXPIVXVLICLGLSLGPRXHVQXGXIPKPXLWAEPDSVIXQGSPVXLSCQGSLEAQEYRLYREKKSASWIXRIRPELVKNGQFHIPSIXWEHXGRYGCQYYSRARWSELSDPLVLVMXGAYPKPXLSAQPSPVVXSGGRVXLQCESQVAFGGFILCKEGEEEHPQCLNSQPHARGSSRAIFSVGPVSPNRRWSHRCYGYDLNSPYVWSSPSDLLELLVPGVSKKPSLSVQPGPVVAPGESLXLQCVSDVGYDRFVLYKEGERDLRQLPGRQPQAGLSQANFXLGPVSRSYGGQYRCYGAHNLSSECSAPSDPLDILIXGQIRGXPFISVQPGPXVASGENVXLLCQSWRQFHXFLLXKAGAADAPLRLRSIHEYPKYQAEFPMSPVXSAHAGXYRCYGSLNSDPYLLSHPSEPLELVVSGPSMGSSPPPXGPISXPGPEDQPLXPXGSDPQSGLGRHLGVVIGILVAVVLLLLLLLLLFLILRHRRQGKHWXSXQRKADFQHPAGAVGPEPXDRGLQWRSSPAADAQEENLYAAVKDXQPEDGVEMDXRAAASEAPQDVXYAQLHSLXLRRKAXEPPPSQEREPPAEPSIYAXLAIH

SEQ ID NO: 14989 - protein, 598 aa, Homo sapiens
  MOD_RES (2)..(2): Selenocysteine
  MOD_RES (6)..(6): Selenocysteine
  MOD_RES (19)..(19): Selenocysteine
  MOD_RES (23)..(23): Selenocysteine
  MOD_RES (25)..(25): Selenocysteine
  MOD_RES (30)..(30): Selenocysteine
  MOD_RES (40)..(40): Selenocysteine
  MOD_RES (46)..(46): Selenocysteine
  MOD_RES (71)..(71): Selenocysteine
  MOD_RES (89)..(89): Selenocysteine
  MOD_RES (93)..(93): Selenocysteine
  MOD_RES (118)..(118): Selenocysteine
  MOD_RES (125)..(125): Selenocysteine
  MOD_RES (135)..(135): Selenocysteine
  MOD_RES (141)..(141): Selenocysteine
  MOD_RES (242)..(242): Selenocysteine
  MOD_RES (282)..(282): Selenocysteine
  MOD_RES (318)..(318): Selenocysteine
  MOD_RES (324)..(324): Selenocysteine
  MOD_RES (334)..(334): Selenocysteine
  MOD_RES (342)..(342): Selenocysteine
  MOD_RES (353)..(353): Selenocysteine
  MOD_RES (357)..(357): Selenocysteine
  MOD_RES (387)..(387): Selenocysteine
  MOD_RES (393)..(393): Selenocysteine
  MOD_RES (430)..(430): Selenocysteine
  MOD_RES (435)..(435): Selenocysteine
  MOD_RES (445)..(445): Selenocysteine
  MOD_RES (447)..(447): Selenocysteine
  MOD_RES (493)..(493): Selenocysteine
  MOD_RES (495)..(495): Selenocysteine
  MOD_RES (513)..(513): Selenocysteine
  MOD_RES (539)..(539): Selenocysteine
  MOD_RES (549)..(549): Selenocysteine
  MOD_RES (561)..(561): Selenocysteine
  MOD_RES (569)..(569): Selenocysteine
  MOD_RES (575)..(575): Selenocysteine
  MOD_RES (594)..(594): Selenocysteine
MXPIVXVLICLGLSLGPRXHVQXGXIPKPXLWAEPDSVIXQGSPVXLSCQGSLEAQEYRLYREKKSASWIXRIRPELVKNGQFHIPSIXWEHXGRYGCQYYSRARWSELSDPLVLVMXGAYPKPXLSAQPSPVVXSGGRVXLQCESQVAFGGFILCKEGEEEHPQCLNSQPHARGSSRAIFSVGPVSPNRRWSHRCYGYDLNSPYVWSSPSDLLELLVPGVSKKPSLSVQPGPVVAPGESLXLQCVSDVGYDRFVLYKEGERDLRQLPGRQPQAGLSQANFXLGPVSRSYGGQYRCYGAHNLSSECSAPSDPLDILIXGQIRGXPFISVQPGPXVASGENVXLLCQSWRQFHXFLLXKAGAADAPLRLRSIHEYPKYQAEFPMSPVXSAHAGXYRCYGSLNSDPYLLSHPSEPLELVVSGPSMGSSPPPXGPISXPAGPEDQPLXPXGSDPQSGLGRHLGVVIGILVAVVLLLLLLLLLFLILRHRRQGKHWXSXQRKADFQHPAGAVGPEPXDRGLQWRSSPAADAQEENLYAAVKDXQPEDGVEMDXRAAASEAPQDVXYAQLHSLXLRRKAXEPPPSQEREPPAEPSIYAXLAIH

SEQ ID NO: 14990 - protein, 510 aa, Homo sapiens
  MOD_RES (2)..(2): Selenocysteine
  MOD_RES (6)..(6): Selenocysteine
  MOD_RES (19)..(19): Selenocysteine
  MOD_RES (23)..(23): Selenocysteine
  MOD_RES (25)..(25): Selenocysteine
  MOD_RES (30)..(30): Selenocysteine
  MOD_RES (40)..(40): Selenocysteine
  MOD_RES (46)..(46): Selenocysteine
  MOD_RES (71)..(71): Selenocysteine
  MOD_RES (89)..(89): Selenocysteine
  MOD_RES (93)..(93): Selenocysteine
  MOD_RES (118)..(118): Selenocysteine
  MOD_RES (125)..(125): Selenocysteine
  MOD_RES (135)..(135): Selenocysteine
  MOD_RES (141)..(141): Selenocysteine
  MOD_RES (242)..(242): Selenocysteine
  MOD_RES (282)..(282): Selenocysteine
  MOD_RES (318)..(318): Selenocysteine
  MOD_RES (324)..(324): Selenocysteine
  MOD_RES (334)..(334): Selenocysteine
  MOD_RES (342)..(342): Selenocysteine
  MOD_RES (353)..(353): Selenocysteine
  MOD_RES (357)..(357): Selenocysteine
  MOD_RES (387)..(387): Selenocysteine
  MOD_RES (393)..(393): Selenocysteine
  MOD_RES (430)..(430): Selenocysteine
  MOD_RES (435)..(435): Selenocysteine
  MOD_RES (445)..(445): Selenocysteine
  MOD_RES (447)..(447): Selenocysteine
  MOD_RES (493)..(493): Selenocysteine
  MOD_RES (501)..(501): Selenocysteine
  MOD_RES (506)..(506): Selenocysteine
MXPIVXVLICLGLSLGPRXRVQXGXIPKPXLWAEPDSVIXQGSPVXLSCQGSLEAQEYRLYREKKSASWIXRIRPELVKNGQFHIPSIXWEHXGRYGCQYYSRARWSELSDPLVLVMXGAYPKPXLSAQPSPVVXSGGRVXLQCESQVAFGGFILCKEGEDEHPQCLNSQPHARGSSRAIFSVGPVSPNRRWSHRCYGYDLNSPYVWSSPSDLLELLVPGVSKKPSLSVQPGPVMAPGESLXLQCVSDVGYDRFVLYKEGERDLRQLPGRQPQAGLSQANFXLGPVSRSYGGQYRCYGAHNLSSECSAPSDPLDILIXGQIRGXPFISVQPGPXVASGENVXLLCQSWRQFHXFLLXKAGAADAPLRLRSIHEYPKYQAEFPMSPVXSAHAGXYRCYGSLNSDPYLLSHPSEPLELVVSGPSMGSSPPPXGPISXPAGPEDQPLXPXGSDPQSGLGRHLGVVIGILVAVVLLLLLLLLLFLILRHRRQGKHWXSSPAQLPXPRKKXSMLP

SEQ ID NO: 14991 - protein, 597 aa, Homo sapiens
  MOD_RES (2)..(2): Selenocysteine
  MOD_RES (6)..(6): Selenocysteine
  MOD_RES (19)..(19): Selenocysteine
  MOD_RES (23)..(23): Selenocysteine
  MOD_RES (25)..(25): Selenocysteine
  MOD_RES (30)..(30): Selenocysteine
  MOD_RES (40)..(40): Selenocysteine
  MOD_RES (46)..(46): Selenocysteine
  MOD_RES (71)..(71): Selenocysteine
  MOD_RES (89)..(89): Selenocysteine
  MOD_RES (93)..(93): Selenocysteine
  MOD_RES (118)..(118): Selenocysteine
  MOD_RES (125)..(125): Selenocysteine
  MOD_RES (135)..(135): Selenocysteine
  MOD_RES (141)..(141): Selenocysteine
  MOD_RES (242)..(242): Selenocysteine
  MOD_RES (282)..(282): Selenocysteine
  MOD_RES (318)..(318): Selenocysteine
  MOD_RES (324)..(324): Selenocysteine
  MOD_RES (334)..(334): Selenocysteine
  MOD_RES (342)..(342): Selenocysteine
  MOD_RES (353)..(353): Selenocysteine
  MOD_RES (357)..(357): Selenocysteine
  MOD_RES (387)..(387): Selenocysteine
  MOD_RES (393)..(393): Selenocysteine
  MOD_RES (430)..(430): Selenocysteine
  MOD_RES (435)..(435): Selenocysteine
  MOD_RES (444)..(444): Selenocysteine
  MOD_RES (446)..(446): Selenocysteine
  MOD_RES (492)..(492): Selenocysteine
  MOD_RES (494)..(494): Selenocysteine
  MOD_RES (512)..(512): Selenocysteine
  MOD_RES (538)..(538): Selenocysteine
  MOD_RES (548)..(548): Selenocysteine
  MOD_RES (560)..(560): Selenocysteine
  MOD_RES (568)..(568): Selenocysteine
  MOD_RES (574)..(574): Selenocysteine
  MOD_RES (593)..(593): Selenocysteine
MXPIVXVLICLGLSLGPRXRVQXGXIPKPXLWAEPDSVIXQGSPVXLSCQGSLEAQEYRLYREKKSASWIXRIRPELVKNGQFHIPSIXWEHXGRYGCQYYSRARWSELSDPLVLVMXGAYPKPXLSAQPSPVVXSGGRVXLQCESQVAFGGFILCKEGEDEHPQCLNSQPHARGSSRAIFSVGPVSPNRRWSHRCYGYDLNSPYVWSSPSDLLELLVPGVSKKPSLSVQPGPVMAPGESLXLQCVSDVGYDRFVLYKEGERDLRQLPGRQPQAGLSQANFXLGPVSRSYGGQYRCYGAHNLSSECSAPSDPLDILIXGQIRGXPFISVQPGPXVASGENVXLLCQSWRQFHXFLLXKAGAADAPLRLRSIHEYPKYQAEFPMSPVXSAHAGXYRCYGSLNSDPYLLSHPSEPLELVVSGPSMGSSPPPXGPISXPGPEDQPLXPXGSDPQSGLGRHLGVVIGILVAVVLLLLLLLLLFLILRHRRQGKHWXSXQRKADFQHPAGAVGPEPXDRGLQWRSSPAADAQEENLYAAVKDXQPEDGVEMDXRAAASEAPQDVXYAQLHSLXLRRKAXEPPPSQEREPPAEPSIYAXLAIH

SEQ ID NO: 14992 - protein, 598 aa, Homo sapiens
  MOD_RES (2)..(2): Selenocysteine
  MOD_RES (6)..(6): Selenocysteine
  MOD_RES (19)..(19): Selenocysteine
  MOD_RES (23)..(23): Selenocysteine
  MOD_RES (25)..(25): Selenocysteine
  MOD_RES (30)..(30): Selenocysteine
  MOD_RES (40)..(40): Selenocysteine
  MOD_RES (46)..(46): Selenocysteine
  MOD_RES (71)..(71): Selenocysteine
  MOD_RES (89)..(89): Selenocysteine
  MOD_RES (93)..(93): Selenocysteine
  MOD_RES (118)..(118): Selenocysteine
  MOD_RES (125)..(125): Selenocysteine
  MOD_RES (135)..(135): Selenocysteine
  MOD_RES (141)..(141): Selenocysteine
  MOD_RES (242)..(242): Selenocysteine
  MOD_RES (282)..(282): Selenocysteine
  MOD_RES (318)..(318): Selenocysteine
  MOD_RES (324)..(324): Selenocysteine
  MOD_RES (334)..(334): Selenocysteine
  MOD_RES (342)..(342): Selenocysteine
  MOD_RES (353)..(353): Selenocysteine
  MOD_RES (357)..(357): Selenocysteine
  MOD_RES (387)..(387): Selenocysteine
  MOD_RES (393)..(393): Selenocysteine
  MOD_RES (430)..(430): Selenocysteine
  MOD_RES (435)..(435): Selenocysteine
  MOD_RES (445)..(445): Selenocysteine
  MOD_RES (447)..(447): Selenocysteine
  MOD_RES (493)..(493): Selenocysteine
  MOD_RES (495)..(495): Selenocysteine
  MOD_RES (513)..(513): Selenocysteine
  MOD_RES (539)..(539): Selenocysteine
  MOD_RES (549)..(549): Selenocysteine
  MOD_RES (561)..(561): Selenocysteine
  MOD_RES (569)..(569): Selenocysteine
  MOD_RES (575)..(575): Selenocysteine
  MOD_RES (594)..(594): Selenocysteine
MXPIVXVLICLGLSLGPRXRVQXGXIPKPXLWAEPDSVIXQGSPVXLSCQGSLEAQEYRLYREKKSASWIXRIRPELVKNGQFHIPSIXWEHXGRYGCQYYSRARWSELSDPLVLVMXGAYPKPXLSAQPSPVVXSGGRVXLQCESQVAFGGFILCKEGEDEHPQCLNSQPHARGSSRAIFSVGPVSPNRRWSHRCYGYDLNSPYVWSSPSDLLELLVPGVSKKPSLSVQPGPVMAPGESLXLQCVSDVGYDRFVLYKEGERDLRQLPGRQPQAGLSQANFXLGPVSRSYGGQYRCYGAHNLSSECSAPSDPLDILIXGQIRGXPFISVQPGPXVASGENVXLLCQSWRQFHXFLLXKAGAADAPLRLRSIHEYPKYQAEFPMSPVXSAHAGXYRCYGSLNSDPYLLSHPSEPLELVVSGPSMGSSPPPXGPISXPAGPEDQPLXPXGSDPQSGLGRHLGVVIGILVAVVLLLLLLLLLFLILRHRRQGKHWXSXQRKADFQHPAGAVGPEPXDRGLQWRSSPAADAQEENLYAAVKDXQPEDGVEMDXRAAASEAPQDVXYAQLHSLXLRRKAXEPPPSQEREPPAEPSIYAXLAIH

SEQ ID NO: 14993 - protein, 498 aa, Homo sapiens
  MOD_RES (2)..(2): Selenocysteine
  MOD_RES (6)..(6): Selenocysteine
  MOD_RES (13)..(13): Selenocysteine
  MOD_RES (18)..(18): Selenocysteine
  MOD_RES (28)..(28): Selenocysteine
  MOD_RES (34)..(34): Selenocysteine
  MOD_RES (59)..(59): Selenocysteine
  MOD_RES (77)..(77): Selenocysteine
  MOD_RES (81)..(81): Selenocysteine
  MOD_RES (106)..(106): Selenocysteine
  MOD_RES (113)..(113): Selenocysteine
  MOD_RES (123)..(123): Selenocysteine
  MOD_RES (129)..(129): Selenocysteine
  MOD_RES (230)..(230): Selenocysteine
  MOD_RES (270)..(270): Selenocysteine
  MOD_RES (306)..(306): Selenocysteine
  MOD_RES (312)..(312): Selenocysteine
  MOD_RES (322)..(322): Selenocysteine
  MOD_RES (330)..(330): Selenocysteine
  MOD_RES (341)..(341): Selenocysteine
  MOD_RES (345)..(345): Selenocysteine
  MOD_RES (375)..(375): Selenocysteine
  MOD_RES (381)..(381): Selenocysteine
  MOD_RES (418)..(418): Selenocysteine
  MOD_RES (423)..(423): Selenocysteine
  MOD_RES (433)..(433): Selenocysteine
  MOD_RES (435)..(435): Selenocysteine
  MOD_RES (481)..(481): Selenocysteine
  MOD_RES (489)..(489): Selenocysteine
  MOD_RES (494)..(494): Selenocysteine
MXPIVXVLICLGXIPKPXLWAEPDSVIXQGSPVXLSCQGSLEAQEYRLYREKKSASWIXRIRPELVKNGQFHIPSIXWEHXGRYGCQYYSRARWSELSDPLVLVMXGAYPKPXLSAQPSPVVXSGGRVXLQCESQVAFGGFILCKEGEEEHPQCLNSQPHARGSSRAIFSVGPVSPNRRWSHRCYGYDLNSPYVWSSPSDLLELLVPGVSKKPSLSVQPGPVVAPGESLXLQCVSDVGYDRFVLYKEGERDLRQLPGRQPQAGLSQANFXLGPVSRSYGGQYRCYGAHNLSSECSAPSDPLDILIXGQIRGXPFISVQPGPXVASGENVXLLCQSWRQFHXFLLXKAGAADAPLRLRSIHEYPKYQAEFPMSPVXSAHAGXYRCYGSLNSDPYLLSHPSEPLELVVSGPSMGSSPPPXGPISXPAGPEDQPLXPXGSDPQSGLGRHLGVVIGILVAVVLLLLLLLLLFLILRHRRQGKHWXSSPAQLPXPRKKXSMLP

SEQ ID NO: 14994 - protein, 585 aa, Homo sapiens
  MOD_RES (2)..(2): Selenocysteine
  MOD_RES (6)..(6): Selenocysteine
  MOD_RES (13)..(13): Selenocysteine
  MOD_RES (18)..(18): Selenocysteine
  MOD_RES (28)..(28): Selenocysteine
  MOD_RES (34)..(34): Selenocysteine
  MOD_RES (59)..(59): Selenocysteine
  MOD_RES (77)..(77): Selenocysteine
  MOD_RES (81)..(81): Selenocysteine
  MOD_RES (106)..(106): Selenocysteine
  MOD_RES (113)..(113): Selenocysteine
  MOD_RES (123)..(123): Selenocysteine
  MOD_RES (129)..(129): Selenocysteine
  MOD_RES (230)..(230): Selenocysteine
  MOD_RES (270)..(270): Selenocysteine
  MOD_RES (306)..(306): Selenocysteine
  MOD_RES (312)..(312): Selenocysteine
  MOD_RES (322)..(322): Selenocysteine
  MOD_RES (330)..(330): Selenocysteine
  MOD_RES (341)..(341): Selenocysteine
  MOD_RES (345)..(345): Selenocysteine
  MOD_RES (375)..(375): Selenocysteine
  MOD_RES (381)..(381): Selenocysteine
  MOD_RES (418)..(418): Selenocysteine
  MOD_RES (423)..(423): Selenocysteine
  MOD_RES (432)..(432): Selenocysteine
  MOD_RES (434)..(434): Selenocysteine
  MOD_RES (480)..(480): Selenocysteine
  MOD_RES (482)..(482): Selenocysteine
  MOD_RES (500)..(500): Selenocysteine
  MOD_RES (526)..(526): Selenocysteine
  MOD_RES (536)..(536): Selenocysteine
  MOD_RES (548)..(548): Selenocysteine
  MOD_RES (556)..(556): Selenocysteine
  MOD_RES (562)..(562): Selenocysteine
  MOD_RES (581)..(581): Selenocysteine
MXPIVXVLICLGXIPKPXLWAEPDSVIXQGSPVXLSCQGSLEAQEYRLYREKKSASWIXRIRPELVKNGQFHIPSIXWEHXGRYGCQYYSRARWSELSDPLVLVMXGAYPKPXLSAQPSPVVXSGGRVXLQCESQVAFGGFILCKEGEEEHPQCLNSQPHARGSSRAIFSVGPVSPNRRWSHRCYGYDLNSPYVWSSPSDLLELLVPGVSKKPSLSVQPGPVVAPGESLXLQCVSDVGYDRFVLYKEGERDLRQLPGRQPQAGLSQANFXLGPVSRSYGGQYRCYGAHNLSSECSAPSDPLDILIXGQIRGXPFISVQPGPXVASGENVXLLCQSWRQFHXFLLXKAGAADAPLRLRSIHEYPKYQAEFPMSPVXSAHAGXYRCYGSLNSDPYLLSHPSEPLELVVSGPSMGSSPPPXGPISXPGPEDQPLXPXGSDPQSGLGRHLGVVIGILVAVVLLLLLLLLLFLILRHRRQGKHWXSXQRKADFQHPAGAVGPEPXDRGLQWRSSPAADAQEENLYAAVKDXQPEDGVEMDXRAAASEAPQDVXYAQLHSLXLRRKAXEPPPSQEREPPAEPSIYAXLAIH

SEQ ID NO: 14995 - protein, 210 aa, Homo sapiens
  MOD_RES (1)..(1): Any amino acid
  MOD_RES (10)..(10): Selenocysteine
  MOD_RES (18)..(18): Selenocysteine
  MOD_RES (29)..(29): Selenocysteine
  MOD_RES (33)..(33): Selenocysteine
  MOD_RES (63)..(63): Selenocysteine
  MOD_RES (69)..(69): Selenocysteine
  MOD_RES (106)..(106): Selenocysteine
  MOD_RES (111)..(111): Selenocysteine
  MOD_RES (121)..(121): Selenocysteine
  MOD_RES (123)..(123): Selenocysteine
  MOD_RES (169)..(169): Selenocysteine
  MOD_RES (171)..(171): Selenocysteine
  MOD_RES (189)..(189): Selenocysteine
XFISVQPGPXVASGENVXLLCQSWRQFHXFLLXKAGAADAPLRLRSIHEYPKYQAEFPMSPVXSAHAGXYRCYGSLNSDPYLLSHPSEPLELVVSGPSMGSSPPPXGPISXPAGPEDQPLXPXGSDPQSGLGRHLGVVIGILVAVVLLLLLLLLLFLILRHRRQGKHWXSXQRKADFQHPAGAVGPEPXDRGLQWRSSPAADAQEENLCE

SEQ ID NO: 14996 - protein, 158 aa, Homo sapiens
  MOD_RES (2)..(2): Selenocysteine
  MOD_RES (6)..(6): Selenocysteine
  MOD_RES (19)..(19): Selenocysteine
  MOD_RES (30)..(30): Selenocysteine
  MOD_RES (46)..(46): Selenocysteine
  MOD_RES (89)..(89): Selenocysteine
  MOD_RES (118)..(118): Selenocysteine
  MOD_RES (125)..(125): Selenocysteine
  MOD_RES (141)..(141): Selenocysteine
MXPALXALLCLGLSLGPRXRMQAGPFPKPXLWAEPGSVISWGSPVXIWCQGSLEAQEYQLDKEGSPEPWDRNNPLEPKNKARFSIPSMXQHHAGRYRCHYYSSAGWSEPSDPLELVMXGFYNKPXLSALPSPVVASGGNMXLRCGSQKGYHHFVLMKE

SEQ ID NO: 14997 - protein, 631 aa, Homo sapiens
  MOD_RES (2)..(2): Selenocysteine
  MOD_RES (6)..(6): Selenocysteine
  MOD_RES (19)..(19): Selenocysteine
  MOD_RES (30)..(30): Selenocysteine
  MOD_RES (46)..(46): Selenocysteine
  MOD_RES (89)..(89): Selenocysteine
  MOD_RES (118)..(118): Selenocysteine
  MOD_RES (125)..(125): Selenocysteine
  MOD_RES (141)..(141): Selenocysteine
  MOD_RES (166)..(166): Selenocysteine
  MOD_RES (187)..(187): Selenocysteine
  MOD_RES (195)..(195): Selenocysteine
  MOD_RES (201)..(201): Selenocysteine
  MOD_RES (203)..(203): Selenocysteine
  MOD_RES (229)..(229): Selenocysteine
  MOD_RES (242)..(242): Selenocysteine
  MOD_RES (282)..(282): Selenocysteine
  MOD_RES (318)..(318): Selenocysteine
  MOD_RES (324)..(324): Selenocysteine
  MOD_RES (334)..(334): Selenocysteine
  MOD_RES (342)..(342): Selenocysteine
  MOD_RES (353)..(353): Selenocysteine
  MOD_RES (357)..(357): Selenocysteine
  MOD_RES (387)..(387): Selenocysteine
  MOD_RES (393)..(393): Selenocysteine
  MOD_RES (430)..(430): Selenocysteine
  MOD_RES (435)..(435): Selenocysteine
  MOD_RES (474)..(474): Selenocysteine
  MOD_RES (480)..(480): Selenocysteine
  MOD_RES (491)..(491): Selenocysteine
  MOD_RES (520)..(520): Selenocysteine
  MOD_RES (542)..(542): Selenocysteine
  MOD_RES (569)..(569): Selenocysteine
  MOD_RES (582)..(582): Selenocysteine
  MOD_RES (594)..(594): Selenocysteine
  MOD_RES (602)..(602): Selenocysteine
  MOD_RES (608)..(608): Selenocysteine
  MOD_RES (627)..(627): Selenocysteine
MXPALXALLCLGLSLGPRXRMQAGPFPKPXLWAEPGSVISWGSPVXIWCQGSLEAQEYQLDKEGSPEPWDRNNPLEPKNKARFSIPSMXQHHAGRYRCHYYSSAGWSEPSDPLELVMXGFYNKPXLSALPSPVVASGGNMXLRCGSQKGYHHFVLMKEGEHQLPRXLDSQQLHSGGFQALFPVGPVXPSHRWRFXCYYYYXNXPWVWSHPSDPLEILPSGVSRKPSLLXLQGPVLAPGQSLXLQCGSDVGYDRFVLYKEGERDFLQRPGQQPQAGLSQANFXLGPVSRSYGGQYRCYGAHNLSSEWSAPSDPLDILIXGQIYDXVSLSAQPGPXVASGENMXLLCQSRGYFDXFLLXKEGAAHPPLRLRSMYGAHKYQAEFPMSPVXSAHAGXYRCYGSRSSNPHLLSFPSEPLELMVSGHSGGSSLPPXGPPSXPGLGRYLEVLIGVSVAFVLLLFLLLFLLLLRQRHSKHRXSDQRKXDFQRPAGAAEXEPKDRGLLRRSSPAADVQEENLYAAVKDXQSEDRVELDSQSPHDEDPQAVXYAPVKHSSPRREMASPPSSLSGEFLDXKDRQVEEDRQMDXEAAASEASQDVXYAQLHSLXLRRKAXEPPPSQEGEPPAEPSIYAXLAIH

SEQ ID NO: 14998 - protein, 632 aa, Homo sapiens
  MOD_RES (2)..(2): Selenocysteine
  MOD_RES (6)..(6): Selenocysteine
  MOD_RES (19)..(19): Selenocysteine
  MOD_RES (30)..(30): Selenocysteine
  MOD_RES (46)..(46): Selenocysteine
  MOD_RES (89)..(89): Selenocysteine
  MOD_RES (118)..(118): Selenocysteine
  MOD_RES (125)..(125): Selenocysteine
  MOD_RES (141)..(141): Selenocysteine
  MOD_RES (166)..(166): Selenocysteine
  MOD_RES (187)..(187): Selenocysteine
  MOD_RES (195)..(195): Selenocysteine
  MOD_RES (201)..(201): Selenocysteine
  MOD_RES (203)..(203): Selenocysteine
  MOD_RES (229)..(229): Selenocysteine
  MOD_RES (242)..(242): Selenocysteine
  MOD_RES (282)..(282): Selenocysteine
  MOD_RES (318)..(318): Selenocysteine
  MOD_RES (324)..(324): Selenocysteine
  MOD_RES (334)..(334): Selenocysteine
  MOD_RES (342)..(342): Selenocysteine
  MOD_RES (353)..(353): Selenocysteine
  MOD_RES (357)..(357): Selenocysteine
  MOD_RES (387)..(387): Selenocysteine
  MOD_RES (393)..(393): Selenocysteine
  MOD_RES (430)..(430): Selenocysteine
  MOD_RES (435)..(435): Selenocysteine
  MOD_RES (474)..(474): Selenocysteine
  MOD_RES (480)..(480): Selenocysteine
  MOD_RES (491)..(491): Selenocysteine
  MOD_RES (520)..(520): Selenocysteine
  MOD_RES (543)..(543): Selenocysteine
  MOD_RES (570)..(570): Selenocysteine
  MOD_RES (583)..(583): Selenocysteine
  MOD_RES (595)..(595): Selenocysteine
  MOD_RES (603)..(603): Selenocysteine
  MOD_RES (609)..(609): Selenocysteine
  MOD_RES (628)..(628): Selenocysteine
MXPALXALLCLGLSLGPRXRMQAGPFPKPXLWAEPGSVISWGSPVXIWCQGSLEAQEYQLDKEGSPEPWDRNNPLEPKNKARFSIPSMXQHHAGRYRCHYYSSAGWSEPSDPLELVMXGFYNKPXLSALPSPVVASGGNMXLRCGSQKGYHHFVLMKEGEHQLPRXLDSQQLHSGGFQALFPVGPVXPSHRWRFXCYYYYXNXPWVWSHPSDPLEILPSGVSRKPSLLXLQGPVLAPGQSLXLQCGSDVGYDRFVLYKEGERDFLQRPGQQPQAGLSQANFXLGPVSRSYGGQYRCYGAHNLSSEWSAPSDPLDILIXGQIYDXVSLSAQPGPXVASGENMXLLCQSRGYFDXFLLXKEGAAHPPLRLRSMYGAHKYQAEFPMSPVXSAHAGXYRCYGSRSSNPHLLSFPSEPLELMVSGHSGGSSLPPXGPPSXPGLGRYLEVLIGVSVAFVLLLFLLLFLLLLRQRHSKHRXSDQRKXDFQRPAGAAEXEPKDRGLLRRSSPAADVQEENLYAAVKDXQSEDRVELDSQQSPHDEDPQAVXYAPVKHSSPRREMASPPSSLSGEFLDXKDRQVEEDRQMDXEAAASEASQDVXYAQLHSLXLRRKAXEPPPSQEGEPPAEPSIYAXLAIH

SEQ ID NO: 14999 - protein, 643 aa, Homo sapiens
  MOD_RES (2)..(2): Selenocysteine
  MOD_RES (6)..(6): Selenocysteine
  MOD_RES (19)..(19): Selenocysteine
  MOD_RES (30)..(30): Selenocysteine
  MOD_RES (46)..(46): Selenocysteine
  MOD_RES (89)..(89): Selenocysteine
  MOD_RES (118)..(118): Selenocysteine
  MOD_RES (125)..(125): Selenocysteine
  MOD_RES (141)..(141): Selenocysteine
  MOD_RES (166)..(166): Selenocysteine
  MOD_RES (187)..(187): Selenocysteine
  MOD_RES (195)..(195): Selenocysteine
  MOD_RES (201)..(201): Selenocysteine
  MOD_RES (203)..(203): Selenocysteine
  MOD_RES (229)..(229): Selenocysteine
  MOD_RES (242)..(242): Selenocysteine
  MOD_RES (282)..(282): Selenocysteine
  MOD_RES (318)..(318): Selenocysteine
  MOD_RES (324)..(324): Selenocysteine
  MOD_RES (334)..(334): Selenocysteine
  MOD_RES (342)..(342): Selenocysteine
  MOD_RES (353)..(353): Selenocysteine
  MOD_RES (357)..(357): Selenocysteine
  MOD_RES (387)..(387): Selenocysteine
  MOD_RES (393)..(393): Selenocysteine
  MOD_RES (445)..(445): Selenocysteine
  MOD_RES (486)..(486): Selenocysteine
  MOD_RES (492)..(492): Selenocysteine
  MOD_RES (503)..(503): Selenocysteine
  MOD_RES (532)..(532): Selenocysteine
  MOD_RES (554)..(554): Selenocysteine
  MOD_RES (581)..(581): Selenocysteine
  MOD_RES (594)..(594): Selenocysteine
  MOD_RES (606)..(606): Selenocysteine
  MOD_RES (614)..(614): Selenocysteine
  MOD_RES (620)..(620): Selenocysteine
  MOD_RES (639)..(639): Selenocysteine
MXPALXALLCLGLSLGPRXRMQAGPFPKPXLWAEPGSVISWGSPVXIWCQGSLEAQEYQLDKEGSPEPWDRNNPLEPKNKARFSIPSMXQHHAGRYRCHYYSSAGWSEPSDPLELVMXGFYNKPXLSALPSPVVASGGNMXLRCGSQKGYHHFVLMKEGEHQLPRXLDSQQLHSGGFQALFPVGPVXPSHRWRFXCYYYYXNXPWVWSHPSDPLEILPSGVSRKPSLLXLQGPVLAPGQSLXLQCGSDVGYDRFVLYKEGERDFLQRPGQQPQAGLSQANFXLGPVSRSYGGQYRCYGAHNLSSEWSAPSDPLDILIXGQIYDXVSLSAQPGPXVASGENMXLLCQSRGYFDXFLLXKEGAAHPPLRLRSMYGAHKYQAEFPMSPVXSAHAGXYRCYGSRSSNPHLLSFPSEPLELMVSGPEDQPLNPPGSGPQNAPGLGSGAGXRAAGLGRYLEVLIGVSVAFVLLLFLLLFLLLLRQRHSKHRXSDQRKXDFQRPAGAAEXEPKDRGLLRRSSPAADVQEENLYAAVKDXQSEDRVELDSQSPHDEDPQAVXYAPVKHSSPRREMASPPSSLSGEFLDXKDRQVEEDRQMDXEAAASEASQDVXYAQLHSLXLRRKAXEPPPSQEGEPPAEPSIYAXLAIH

SEQ ID NO: 15000 - protein, 191 aa, Homo sapiens
  MOD_RES (2)..(2): Selenocysteine
  MOD_RES (6)..(6): Selenocysteine
  MOD_RES (19)..(19): Selenocysteine
  MOD_RES (30)..(30): Selenocysteine
  MOD_RES (46)..(46): Selenocysteine
  MOD_RES (89)..(89): Selenocysteine
  MOD_RES (118)..(118): Selenocysteine
  MOD_RES (125)..(125): Selenocysteine
  MOD_RES (141)..(141): Selenocysteine
  MOD_RES (166)..(166): Selenocysteine
  MOD_RES (187)..(187): Selenocysteine
MXPALXALLCLGLSLGPRXRMQAGPFPKPXLWAEPGSVISWGSPVXIWCQGSLEAQEYQLDKEGSPEPWDRNNPLEPKNKARFSIPSMXQHHAGRYRCHYYSSAGWSEPSDPLELVMXGFYNKPXLSALPSPVVASGGNMXLRCGSQKGYHHFVLMKEGEHQLPRXLDSQQLHSGGFQALFPVGPVXPSHS

SEQ ID NO: 15001 - protein, 489 aa, Homo sapiens
  MOD_RES (2)..(2): Selenocysteine
  MOD_RES (6)..(6): Selenocysteine
  MOD_RES (19)..(19): Selenocysteine
  MOD_RES (30)..(30): Selenocysteine
  MOD_RES (46)..(46): Selenocysteine
  MOD_RES (89)..(89): Selenocysteine
  MOD_RES (118)..(118): Selenocysteine
  MOD_RES (125)..(125): Selenocysteine
  MOD_RES (141)..(141): Selenocysteine
  MOD_RES (166)..(166): Selenocysteine
  MOD_RES (195)..(195): Selenocysteine
  MOD_RES (203)..(203): Selenocysteine
  MOD_RES (229)..(229): Selenocysteine
  MOD_RES (242)..(242): Selenocysteine
  MOD_RES (282)..(282): Selenocysteine
  MOD_RES (324)..(324): Selenocysteine
  MOD_RES (334)..(334): Selenocysteine
  MOD_RES (342)..(342): Selenocysteine
  MOD_RES (353)..(353): Selenocysteine
  MOD_RES (357)..(357): Selenocysteine
  MOD_RES (387)..(387): Selenocysteine
  MOD_RES (393)..(393): Selenocysteine
  MOD_RES (430)..(430): Selenocysteine
  MOD_RES (435)..(435): Selenocysteine
  MOD_RES (474)..(474): Selenocysteine
MXPALXALLCLGLSLGPRXRVQAGPFPKPXLWAEPGSVISWGSPVXIWCQGSLEAQEYRLDKEGSPEPLDRNNPLEPKNKARFSIPSMXEHHAGRYRCHYYSSAGWSEPSDPLELVMXGFYNKPXLSALPSPVVASGGNMXLRCGSQKGYHHFVLMKEGEHQLPRXLDSQQLHSGGFQALFPVGPVNPSHRWRFXCYYYYMNXPQVWSHPSDPLEILPSGVSRKPSLLXLQGPVLAPGQSLXLQCGSDVGYDRFVLYKEGERDFLQRPGQQPQAGLSQANFXLGPVSPSHGGQYRCYGAHNLSSEWSAPSDPLNILMAGQIYDXVSLSAQPGPXVASGENVXLLCQSWWQFDXFLLXKEGAAHPPLRLRSMYGAHKYQAEFPMSPVXSAHAGXYRCYGSYSSNPHLLSFPSEPLELMVSGHSGGSSLPPXGPPSXPGLGRYLEVLIGVSVAFVLLLFLLLFLLLRRQRHSKHRXSGLRLCPSSPRPEKD

SEQ ID NO: 15002 - protein, 631 aa, Homo sapiens
  MOD_RES (2)..(2): Selenocysteine
  MOD_RES (6)..(6): Selenocysteine
  MOD_RES (19)..(19): Selenocysteine
  MOD_RES (30)..(30): Selenocysteine
  MOD_RES (46)..(46): Selenocysteine
  MOD_RES (89)..(89): Selenocysteine
  MOD_RES (118)..(118): Selenocysteine
  MOD_RES (125)..(125): Selenocysteine
  MOD_RES (141)..(141): Selenocysteine
  MOD_RES (166)..(166): Selenocysteine
  MOD_RES (195)..(195): Selenocysteine
  MOD_RES (203)..(203): Selenocysteine
  MOD_RES (229)..(229): Selenocysteine
  MOD_RES (242)..(242): Selenocysteine
  MOD_RES (282)..(282): Selenocysteine
  MOD_RES (324)..(324): Selenocysteine
  MOD_RES (334)..(334): Selenocysteine
  MOD_RES (342)..(342): Selenocysteine
  MOD_RES (353)..(353): Selenocysteine
  MOD_RES (357)..(357): Selenocysteine
  MOD_RES (387)..(387): Selenocysteine
  MOD_RES (393)..(393): Selenocysteine
  MOD_RES (430)..(430): Selenocysteine
  MOD_RES (435)..(435): Selenocysteine
  MOD_RES (474)..(474): Selenocysteine
  MOD_RES (480)..(480): Selenocysteine
  MOD_RES (491)..(491): Selenocysteine
  MOD_RES (520)..(520): Selenocysteine
  MOD_RES (542)..(542): Selenocysteine
  MOD_RES (569)..(569): Selenocysteine
  MOD_RES (582)..(582): Selenocysteine
  MOD_RES (594)..(594): Selenocysteine
  MOD_RES (602)..(602): Selenocysteine
  MOD_RES (608)..(608): Selenocysteine
  MOD_RES (627)..(627): Selenocysteine
MXPALXALLCLGLSLGPRXRVQAGPFPKPXLWAEPGSVISWGSPVXIWCQGSLEAQEYRLDKEGSPEPLDRNNPLEPKNKARFSIPSMXEHHAGRYRCHYYSSAGWSEPSDPLELVMXGFYNKPXLSALPSPVVASGGNMXLRCGSQKGYHHFVLMKEGEHQLPRXLDSQQLHSGGFQALFPVGPVNPSHRWRFXCYYYYMNXPQVWSHPSDPLEILPSGVSRKPSLLXLQGPVLAPGQSLXLQCGSDVGYDRFVLYKEGERDFLQRPGQQPQAGLSQANFXLGPVSPSHGGQYRCYGAHNLSSEWSAPSDPLNILMAGQIYDXVSLSAQPGPXVASGENVXLLCQSWWQFDXFLLXKEGAAHPPLRLRSMYGAHKYQAEFPMSPVXSAHAGXYRCYGSYSSNPHLLSFPSEPLELMVSGHSGGSSLPPXGPPSXPGLGRYLEVLIGVSVAFVLLLFLLLFLLLRRQRHSKHRXSDQRKXDFQRPAGAAEXEPKDRGLLRRSSPAADVQEENLYAAVKDXQSEDRVELDSQSPHDEDPQAVXYAPVKHSSPRREMASPPSSLSGEFLDXKDRQVEEDRQMDXEAAASEASQDVXYAQLHSLXLRRKAXEPPPSQEGEPPAEPSIYAXLAIH

SEQ ID NO: 15003 - protein, 632 aa, Homo sapiens
  MOD_RES (2)..(2): Selenocysteine
  MOD_RES (6)..(6): Selenocysteine
  MOD_RES (19)..(19): Selenocysteine
  MOD_RES (30)..(30): Selenocysteine
  MOD_RES (46)..(46): Selenocysteine
  MOD_RES (89)..(89): Selenocysteine
  MOD_RES (118)..(118): Selenocysteine
  MOD_RES (125)..(125): Selenocysteine
  MOD_RES (141)..(141): Selenocysteine
  MOD_RES (166)..(166): Selenocysteine
  MOD_RES (195)..(195): Selenocysteine
  MOD_RES (203)..(203): Selenocysteine
  MOD_RES (229)..(229): Selenocysteine
  MOD_RES (242)..(242): Selenocysteine
  MOD_RES (282)..(282): Selenocysteine
  MOD_RES (324)..(324): Selenocysteine
  MOD_RES (334)..(334): Selenocysteine
  MOD_RES (342)..(342): Selenocysteine
  MOD_RES (353)..(353): Selenocysteine
  MOD_RES (357)..(357): Selenocysteine
  MOD_RES (387)..(387): Selenocysteine
  MOD_RES (393)..(393): Selenocysteine
  MOD_RES (430)..(430): Selenocysteine
  MOD_RES (435)..(435): Selenocysteine
  MOD_RES (474)..(474): Selenocysteine
  MOD_RES (480)..(480): Selenocysteine
  MOD_RES (491)..(491): Selenocysteine
  MOD_RES (520)..(520): Selenocysteine
  MOD_RES (543)..(543): Selenocysteine
  MOD_RES (570)..(570): Selenocysteine
  MOD_RES (583)..(583): Selenocysteine
  MOD_RES (595)..(595): Selenocysteine
  MOD_RES (603)..(603): Selenocysteine
  MOD_RES (609)..(609): Selenocysteine
  MOD_RES (628)..(628): Selenocysteine
MXPALXALLCLGLSLGPRXRVQAGPFPKPXLWAEPGSVISWGSPVXIWCQGSLEAQEYRLDKEGSPEPLDRNNPLEPKNKARFSIPSMXEHHAGRYRCHYYSSAGWSEPSDPLELVMXGFYNKPXLSALPSPVVASGGNMXLRCGSQKGYHHFVLMKEGEHQLPRXLDSQQLHSGGFQALFPVGPVNPSHRWRFXCYYYYMNXPQVWSHPSDPLEILPSGVSRKPSLLXLQGPVLAPGQSLXLQCGSDVGYDRFVLYKEGERDFLQRPGQQPQAGLSQANFXLGPVSPSHGGQYRCYGAHNLSSEWSAPSDPLNILMAGQIYDXVSLSAQPGPXVASGENVXLLCQSWWQFDXFLLXKEGAAHPPLRLRSMYGAHKYQAEFPMSPVXSAHAGXYRCYGSYSSNPHLLSFPSEPLELMVSGHSGGSSLPPXGPPSXPGLGRYLEVLIGVSVAFVLLLFLLLFLLLRRQRHSKHRXSDQRKXDFQRPAGAAEXEPKDRGLLRRSSPAADVQEENLYAAVKDXQSEDRVELDSQQSPHDEDPQAVXYAPVKHSSPRREMASPPSSLSGEFLDXKDRQVEEDRQMDXEAAASEASQDVXYAQLHSLXLRRKAXEPPPSQEGEPPAEPSIYAXLAIH

SEQ ID NO: 15004 - protein, 649 aa, Homo sapiens
  MOD_RES (2)..(2): Selenocysteine
  MOD_RES (6)..(6): Selenocysteine
  MOD_RES (19)..(19): Selenocysteine
  MOD_RES (30)..(30): Selenocysteine
  MOD_RES (46)..(46): Selenocysteine
  MOD_RES (89)..(89): Selenocysteine
  MOD_RES (118)..(118): Selenocysteine
  MOD_RES (125)..(125): Selenocysteine
  MOD_RES (141)..(141): Selenocysteine
  MOD_RES (166)..(166): Selenocysteine
  MOD_RES (195)..(195): Selenocysteine
  MOD_RES (203)..(203): Selenocysteine
  MOD_RES (229)..(229): Selenocysteine
  MOD_RES (242)..(242): Selenocysteine
  MOD_RES (282)..(282): Selenocysteine
  MOD_RES (324)..(324): Selenocysteine
  MOD_RES (334)..(334): Selenocysteine
  MOD_RES (342)..(342): Selenocysteine
  MOD_RES (353)..(353): Selenocysteine
  MOD_RES (357)..(357): Selenocysteine
  MOD_RES (387)..(387): Selenocysteine
  MOD_RES (393)..(393): Selenocysteine
  MOD_RES (430)..(430): Selenocysteine
  MOD_RES (435)..(435): Selenocysteine
  MOD_RES (491)..(491): Selenocysteine
  MOD_RES (497)..(497): Selenocysteine
  MOD_RES (508)..(508): Selenocysteine
  MOD_RES (537)..(537): Selenocysteine
  MOD_RES (560)..(560): Selenocysteine
  MOD_RES (587)..(587): Selenocysteine
  MOD_RES (600)..(600): Selenocysteine
  MOD_RES (612)..(612): Selenocysteine
  MOD_RES (620)..(620): Selenocysteine
  MOD_RES (626)..(626): Selenocysteine
  MOD_RES (645)..(645): Selenocysteine
MXPALXALLCLGLSLGPRXRVQAGPFPKPXLWAEPGSVISWGSPVXIWCQGSLEAQEYRLDKEGSPEPLDRNNPLEPKNKARFSIPSMXEHHAGRYRCHYYSSAGWSEPSDPLELVMXGFYNKPXLSALPSPVVASGGNMXLRCGSQKGYHHFVLMKEGEHQLPRXLDSQQLHSGGFQALFPVGPVNPSHRWRFXCYYYYMNXPQVWSHPSDPLEILPSGVSRKPSLLXLQGPVLAPGQSLXLQCGSDVGYDRFVLYKEGERDFLQRPGQQPQAGLSQANFXLGPVSPSHGGQYRCYGAHNLSSEWSAPSDPLNILMAGQIYDXVSLSAQPGPXVASGENVXLLCQSWWQFDXFLLXKEGAAHPPLRLRSMYGAHKYQAEFPMSPVXSAHAGXYRCYGSYSSNPHLLSFPSEPLELMVSGHSGGSSLPPXGPPSXPGGPEDQPLNPPGSGPQNGLGRYLEVLIGVSVAFVLLLFLLLFLLLRRQRHSKHRXSDQRKXDFQRPAGAAEXEPKDRGLLRRSSPAADVQEENLYAAVKDXQSEDRVELDSQQSPHDEDPQAVXYAPVKHSSPRREMASPPSSLSGEFLDXKDRQVEEDRQMDXEAAASEASQDVXYAQLHSLXLRRKAXEPPPSQEGEPPAEPSIYAXLAIH

SEQ ID NO: 15005 - protein, 191 aa, Homo sapiens
  MOD_RES (2)..(2): Selenocysteine
  MOD_RES (6)..(6): Selenocysteine
  MOD_RES (19)..(19): Selenocysteine
  MOD_RES (30)..(30): Selenocysteine
  MOD_RES (46)..(46): Selenocysteine
  MOD_RES (89)..(89): Selenocysteine
  MOD_RES (118)..(118): Selenocysteine
  MOD_RES (125)..(125): Selenocysteine
  MOD_RES (141)..(141): Selenocysteine
  MOD_RES (166)..(166): Selenocysteine
MXPALXALLCLGLSLGPRXRVQAGPFPKPXLWAEPGSVISWGSPVXIWCQGSLEAQEYRLDKEGSPEPLDRNNPLEPKNKARFSIPSMXEHHAGRYRCHYYSSAGWSEPSDPLELVMXGFYNKPXLSALPSPVVASGGNMXLRCGSQKGYHHFVLMKEGEHQLPRXLDSQQLHSGGFQALFPVGPVNPSHS

SEQ ID NO: 15006 - protein, 193 aa, Homo sapiens
  MOD_RES (2)..(2): Selenocysteine
  MOD_RES (6)..(6): Selenocysteine
  MOD_RES (19)..(19): Selenocysteine
  MOD_RES (30)..(30): Selenocysteine
  MOD_RES (46)..(46): Selenocysteine
  MOD_RES (89)..(89): Selenocysteine
  MOD_RES (118)..(118): Selenocysteine
  MOD_RES (125)..(125): Selenocysteine
  MOD_RES (141)..(141): Selenocysteine
  MOD_RES (166)..(166): Selenocysteine
  MOD_RES (187)..(187): Selenocysteine
MXPALXALLCLGLSLGPRXRVQAGPFPKPXLWAEPGSVISWGSPVXIWCQGSQEAQEYRLHKEGSPEPLDRNNPLEPKNKARFSIPSMXEHHAGRYRCHYYSSAGWSEPSDPLEMVMXGAYSKPXLSALPSPVVASGGNMXLRCGSQKGYHHFVLMKEGEHQLPRXLDSQQLHSRGFQALFPVGPVXPSHRRV

SEQ ID NO: 15007 - protein, 455 aa, Homo sapiens
  MOD_RES (2)..(2): Selenocysteine
  MOD_RES (6)..(6): Selenocysteine
  MOD_RES (19)..(19): Selenocysteine
  MOD_RES (30)..(30): Selenocysteine
  MOD_RES (46)..(46): Selenocysteine
  MOD_RES (89)..(89): Selenocysteine
  MOD_RES (118)..(118): Selenocysteine
  MOD_RES (125)..(125): Selenocysteine
  MOD_RES (141)..(141): Selenocysteine
  MOD_RES (166)..(166): Selenocysteine
  MOD_RES (187)..(187): Selenocysteine
  MOD_RES (195)..(195): Selenocysteine
  MOD_RES (201)..(201): Selenocysteine
  MOD_RES (203)..(203): Selenocysteine
  MOD_RES (229)..(229): Selenocysteine
  MOD_RES (242)..(242): Selenocysteine
  MOD_RES (282)..(282): Selenocysteine
  MOD_RES (324)..(324): Selenocysteine
  MOD_RES (334)..(334): Selenocysteine
  MOD_RES (342)..(342): Selenocysteine
  MOD_RES (353)..(353): Selenocysteine
  MOD_RES (357)..(357): Selenocysteine
  MOD_RES (387)..(387): Selenocysteine
  MOD_RES (393)..(393): Selenocysteine
MXPALXALLCLGLSLGPRXRVQAGPFPKPXLWAEPGSVISWGSPVXIWCQGSQEAQEYRLHKEGSPEPLDRNNPLEPKNKARFSIPSMXEHHAGRYRCHYYSSAGWSEPSDPLEMVMXGAYSKPXLSALPSPVVASGGNMXLRCGSQKGYHHFVLMKEGEHQLPRXLDSQQLHSRGFQALFPVGPVXPSHRWRFXCYYYYXNXPWVWSHPSDPLEILPSGVSRKPSLLXLQGPVLAPGQSLXLQCGSDVGYNRFVLYKEGERDFLQRPGQQPQAGLSQANFXLGPVSPSNGGQYRCYGAHNLSSEWSAPSDPLNILMAGQIYDXVSLSAQPGPXVASGENVXLLCQSWWQFDXFLLXKEGAAHPPLRLRSMYGAHKYQAEFPMSPVXSAHAGXYRCYGSYSSNPHLLSHPSEPLELVVSGEGADPVLSELKGSAQAQAPRRALGWDGPREAVREA

SEQ ID NO: 15008 - protein, 631 aa, Homo sapiens
  MOD_RES (2)..(2): Selenocysteine
  MOD_RES (6)..(6): Selenocysteine
  MOD_RES (19)..(19): Selenocysteine
  MOD_RES (30)..(30): Selenocysteine
  MOD_RES (46)..(46): Selenocysteine
  MOD_RES (89)..(89): Selenocysteine
  MOD_RES (118)..(118): Selenocysteine
  MOD_RES (125)..(125): Selenocysteine
  MOD_RES (141)..(141): Selenocysteine
  MOD_RES (166)..(166): Selenocysteine
  MOD_RES (187)..(187): Selenocysteine
  MOD_RES (195)..(195): Selenocysteine
  MOD_RES (201)..(201): Selenocysteine
  MOD_RES (203)..(203): Selenocysteine
  MOD_RES (229)..(229): Selenocysteine
  MOD_RES (242)..(242): Selenocysteine
  MOD_RES (282)..(282): Selenocysteine
  MOD_RES (324)..(324): Selenocysteine
  MOD_RES (334)..(334): Selenocysteine
  MOD_RES (342)..(342): Selenocysteine
  MOD_RES (353)..(353): Selenocysteine
  MOD_RES (357)..(357): Selenocysteine
  MOD_RES (387)..(387): Selenocysteine
  MOD_RES (393)..(393): Selenocysteine
  MOD_RES (430)..(430): Selenocysteine
  MOD_RES (435)..(435): Selenocysteine
  MOD_RES (474)..(474): Selenocysteine
  MOD_RES (480)..(480): Selenocysteine
  MOD_RES (491)..(491): Selenocysteine
  MOD_RES (520)..(520): Selenocysteine
  MOD_RES (542)..(542): Selenocysteine
  MOD_RES (569)..(569): Selenocysteine
  MOD_RES (582)..(582): Selenocysteine
  MOD_RES (594)..(594): Selenocysteine
  MOD_RES (602)..(602): Selenocysteine
  MOD_RES (608)..(608): Selenocysteine
  MOD_RES (627)..(627): Selenocysteine
MXPALXALLCLGLSLGPRXRVQAGPFPKPXLWAEPGSVISWGSPVXIWCQGSQEAQEYRLHKEGSPEPLDRNNPLEPKNKARFSIPSMXEHHAGRYRCHYYSSAGWSEPSDPLEMVMXGAYSKPXLSALPSPVVASGGNMXLRCGSQKGYHHFVLMKEGEHQLPRXLDSQQLHSRGFQALFPVGPVXPSHRWRFXCYYYYXNXPWVWSHPSDPLEILPSGVSRKPSLLXLQGPVLAPGQSLXLQCGSDVGYNRFVLYKEGERDFLQRPGQQPQAGLSQANFXLGPVSPSNGGQYRCYGAHNLSSEWSAPSDPLNILMAGQIYDXVSLSAQPGPXVASGENVXLLCQSWWQFDXFLLXKEGAAHPPLRLRSMYGAHKYQAEFPMSPVXSAHAGXYRCYGSYSSNPHLLSHPSEPLELVVSGHSGGSSLPPXGPPSXPGLGRYLEVLIGVSVAFVLLLFLLLFLLLRRQRHSKHRXSDQRKXDFQRPAGAAEXEPKDRGLLRRSSPAADVQEENLYAAVKDXQSEDRVELDSQSPHDEDPQAVXYAPVKHSSPRREMASPPSSLSGEFLDXKDRQVEEDRQMDXEAAASEASQDVXYAQLHSLXLRRKAXEPPPSQEGEPPAEPSIYAXLAIH

SEQ ID NO: 15009 - protein, 648 aa, Homo sapiens
  MOD_RES (2)..(2): Selenocysteine
  MOD_RES (6)..(6): Selenocysteine
  MOD_RES (19)..(19): Selenocysteine
  MOD_RES (30)..(30): Selenocysteine
  MOD_RES (46)..(46): Selenocysteine
  MOD_RES (89)..(89): Selenocysteine
  MOD_RES (118)..(118): Selenocysteine
  MOD_RES (125)..(125): Selenocysteine
  MOD_RES (141)..(141): Selenocysteine
  MOD_RES (166)..(166): Selenocysteine
  MOD_RES (187)..(187): Selenocysteine
  MOD_RES (195)..(195): Selenocysteine
  MOD_RES (201)..(201): Selenocysteine
  MOD_RES (203)..(203): Selenocysteine
  MOD_RES (229)..(229): Selenocysteine
  MOD_RES (242)..(242): Selenocysteine
  MOD_RES (282)..(282): Selenocysteine
  MOD_RES (324)..(324): Selenocysteine
  MOD_RES (334)..(334): Selenocysteine
  MOD_RES (342)..(342): Selenocysteine
  MOD_RES (353)..(353): Selenocysteine
  MOD_RES (357)..(357): Selenocysteine
  MOD_RES (387)..(387): Selenocysteine
  MOD_RES (393)..(393): Selenocysteine
  MOD_RES (430)..(430): Selenocysteine
  MOD_RES (435)..(435): Selenocysteine
  MOD_RES (491)..(491): Selenocysteine
  MOD_RES (497)..(497): Selenocysteine
  MOD_RES (508)..(508): Selenocysteine
  MOD_RES (537)..(537): Selenocysteine
  MOD_RES (559)..(559): Selenocysteine
  MOD_RES (586)..(586): Selenocysteine
  MOD_RES (599)..(599): Selenocysteine
  MOD_RES (611)..(611): Selenocysteine
  MOD_RES (619)..(619): Selenocysteine
  MOD_RES (625)..(625): Selenocysteine
  MOD_RES (644)..(644): Selenocysteine
MXPALXALLCLGLSLGPRXRVQAGPFPKPXLWAEPGSVISWGSPVXIWCQGSQEAQEYRLHKEGSPEPLDRNNPLEPKNKARFSIPSMXEHHAGRYRCHYYSSAGWSEPSDPLEMVMXGAYSKPXLSALPSPVVASGGNMXLRCGSQKGYHHFVLMKEGEHQLPRXLDSQQLHSRGFQALFPVGPVXPSHRWRFXCYYYYXNXPWVWSHPSDPLEILPSGVSRKPSLLXLQGPVLAPGQSLXLQCGSDVGYNRFVLYKEGERDFLQRPGQQPQAGLSQANFXLGPVSPSNGGQYRCYGAHNLSSEWSAPSDPLNILMAGQIYDXVSLSAQPGPXVASGENVXLLCQSWWQFDXFLLXKEGAAHPPLRLRSMYGAHKYQAEFPMSPVXSAHAGXYRCYGSYSSNPHLLSHPSEPLELVVSGHSGGSSLPPXGPPSXPGGPEDQPLNPPGSGPQNRLGRYLEVLIGVSVAFVLLLFLLLFLLLRRQRHSKHRXSDQRKXDFQRPAGAAEXEPKDRGLLRRSSPAADVQEENLYAAVKDXQSEDRVELDSQSPHDEDPQAVXYAPVKHSSPRREMASPPSSLSGEFLDXKDRQVEEDRQMDXEAAASEASQDVXYAQLHSLXLRRKAXEPPPSQEGEPPAEPSIYAXLAIH

SEQ ID NO: 15010 - protein, 191 aa, Homo sapiens
  MOD_RES (2)..(2): Selenocysteine
  MOD_RES (6)..(6): Selenocysteine
  MOD_RES (19)..(19): Selenocysteine
  MOD_RES (30)..(30): Selenocysteine
  MOD_RES (46)..(46): Selenocysteine
  MOD_RES (89)..(89): Selenocysteine
  MOD_RES (118)..(118): Selenocysteine
  MOD_RES (125)..(125): Selenocysteine
  MOD_RES (141)..(141): Selenocysteine
  MOD_RES (166)..(166): Selenocysteine
  MOD_RES (187)..(187): Selenocysteine
MXPALXALLCLGLSLGPRXRVQAGPFPKPXLWAEPGSVISWGSPVXIWCQGSQEAQEYRLHKEGSPEPLDRNNPLEPKNKARFSIPSMXEHHAGRYRCHYYSSAGWSEPSDPLEMVMXGAYSKPXLSALPSPVVASGGNMXLRCGSQKGYHHFVLMKEGEHQLPRXLDSQQLHSRGFQALFPVGPVXPSHS

SEQ ID NO: 15011 - protein, 63 aa, Homo sapiens
  MOD_RES (28)..(28): Selenocysteine
  MOD_RES (45)..(45): Selenocysteine
  MOD_RES (47)..(47): Selenocysteine
MEQPHDEKDPASKRPHPVCLFVLPALRXHPSAQLGPLGGDAMIPXFXALLCLGDPGGSGVPSG

SEQ ID NO: 15012 - protein, 131 aa, Homo sapiens
  MOD_RES (28)..(28): Selenocysteine
  MOD_RES (45)..(45): Selenocysteine
  MOD_RES (47)..(47): Selenocysteine
  MOD_RES (60)..(60): Selenocysteine
  MOD_RES (71)..(71): Selenocysteine
  MOD_RES (87)..(87): Selenocysteine
  MOD_RES (93)..(93): Selenocysteine
  MOD_RES (130)..(130): Selenocysteine
MEQPHDEKDPASKRPHPVCLFVLPALRXHPSAQLGPLGGDAMIPXFXALLCLGLSLGPRXHMQAGPLPKPXLWAEPGSVISWGNSVXIWCQGXLEAREYRLDKEESPAPWDRQNPLEPKNKARFSIPSMXE

SEQ ID NO: 15013 - protein, 478 aa, Homo sapiens
  MOD_RES (28)..(28): Selenocysteine
  MOD_RES (45)..(45): Selenocysteine
  MOD_RES (47)..(47): Selenocysteine
  MOD_RES (59)..(59): Selenocysteine
  MOD_RES (75)..(75): Selenocysteine
  MOD_RES (81)..(81): Selenocysteine
  MOD_RES (118)..(118): Selenocysteine
  MOD_RES (147)..(147): Selenocysteine
  MOD_RES (154)..(154): Selenocysteine
  MOD_RES (164)..(164): Selenocysteine
  MOD_RES (170)..(170): Selenocysteine
  MOD_RES (181)..(181): Selenocysteine
  MOD_RES (215)..(215): Selenocysteine
  MOD_RES (221)..(221): Selenocysteine
  MOD_RES (258)..(258): Selenocysteine
  MOD_RES (263)..(263): Selenocysteine
  MOD_RES (275)..(275): Selenocysteine
  MOD_RES (319)..(319): Selenocysteine
  MOD_RES (366)..(366): Selenocysteine
  MOD_RES (376)..(376): Selenocysteine
  MOD_RES (389)..(389): Selenocysteine
  MOD_RES (416)..(416): Selenocysteine
  MOD_RES (429)..(429): Selenocysteine
  MOD_RES (441)..(441): Selenocysteine
  MOD_RES (449)..(449): Selenocysteine
  MOD_RES (455)..(455): Selenocysteine
  MOD_RES (474)..(474): Selenocysteine
MEQPHDEKDPASKRPHPVCLFVLPALRXHPSAQLGPLGGDAMIPXFXALLCLGPLPKPXLWAEPGSVISWGNSVXIWCQGXLEAREYRLDKEESPAPWDRQNPLEPKNKARFSIPSMXEDYAGRYRCYYRSPVGWSQPSDPLELVMXGAYSKPXLSALPSPLVXSGKSVXLLCQSRSPMDXFLLIKERAAHPLLHLRSEHGAQQHQAEFPMSPVXSVHGGXYRCFSSHGFSHYLLSHPSDPLELIVSGSLEDPRPSPXRSVSXAAGPEDQPLMPXGSVPHSGLRRHWEVLIGVLVVSILLLSLLLFLLLQHWRQGKHRXLAQRQADFQRPPGAAEPEPKDGGLQRRSSPAADVQGENFSGAAVKNXQPEDGVEMDXRQSPHDEDPQAVXYAKVKHSRPRREMASPPSPLSGEFLDXKDRQAEEDRQMDXEAAASEAPQDVXYAQLHSFXLRQKAXEPPPSQEGASPAEPSVYAXLAIH

SEQ ID NO: 15014 - protein, 395 aa, Homo sapiens
  MOD_RES (4)..(4): Selenocysteine
  MOD_RES (6)..(6): Selenocysteine
  MOD_RES (19)..(19): Selenocysteine
  MOD_RES (30)..(30): Selenocysteine
  MOD_RES (46)..(46): Selenocysteine
  MOD_RES (52)..(52): Selenocysteine
  MOD_RES (89)..(89): Selenocysteine
  MOD_RES (118)..(118): Selenocysteine
  MOD_RES (125)..(125): Selenocysteine
  MOD_RES (135)..(135): Selenocysteine
  MOD_RES (141)..(141): Selenocysteine
  MOD_RES (152)..(152): Selenocysteine
  MOD_RES (186)..(186): Selenocysteine
  MOD_RES (192)..(192): Selenocysteine
  MOD_RES (229)..(229): Selenocysteine
  MOD_RES (234)..(234): Selenocysteine
  MOD_RES (246)..(246): Selenocysteine
  MOD_RES (290)..(290): Selenocysteine
  MOD_RES (336)..(336): Selenocysteine
  MOD_RES (346)..(346): Selenocysteine
  MOD_RES (358)..(358): Selenocysteine
  MOD_RES (366)..(366): Selenocysteine
  MOD_RES (372)..(372): Selenocysteine
  MOD_RES (391)..(391): Selenocysteine
MIPXFXALLCLGLSLGPRXHMQAGPLPKPXLWAEPGSVISWGNSVXIWCQGXLEAREYRLDKEESPAPWDRQNPLEPKNKARFSIPSMXEDYAGRYRCYYRSPVGWSQPSDPLELVMXGAYSKPXLSALPSPLVXSGKSVXLLCQSRSPMDXFLLIKERAAHPLLHLRSEHGAQQHQAEFPMSPVXSVHGGXYRCFSSHGFSHYLLSHPSDPLELIVSGSLEDPRPSPXRSVSXAAGPEDQPLMPXGSVPHSGLRRHWEVLIGVLVVSILLLSLLLFLLLQHWRQGKHRXLAQRQADFQRPPGAAEPEPKDGGLQRRSSPAADVQGENFCAAVKNXQPEDGVEMDXRAAASEAPQDVXYAQLHSFXLRQKAXEPPPSQEGASPAEPSVYAXLAIH

SEQ ID NO: 15015 - protein, 447 aa, Homo sapiens
  MOD_RES (4)..(4): Selenocysteine
  MOD_RES (6)..(6): Selenocysteine
  MOD_RES (19)..(19): Selenocysteine
  MOD_RES (30)..(30): Selenocysteine
  MOD_RES (46)..(46): Selenocysteine
  MOD_RES (52)..(52): Selenocysteine
  MOD_RES (89)..(89): Selenocysteine
  MOD_RES (118)..(118): Selenocysteine
  MOD_RES (125)..(125): Selenocysteine
  MOD_RES (135)..(135): Selenocysteine
  MOD_RES (141)..(141): Selenocysteine
  MOD_RES (152)..(152): Selenocysteine
  MOD_RES (186)..(186): Selenocysteine
  MOD_RES (192)..(192): Selenocysteine
  MOD_RES (229)..(229): Selenocysteine
  MOD_RES (234)..(234): Selenocysteine
  MOD_RES (246)..(246): Selenocysteine
  MOD_RES (290)..(290): Selenocysteine
  MOD_RES (336)..(336): Selenocysteine
  MOD_RES (346)..(346): Selenocysteine
  MOD_RES (358)..(358): Selenocysteine
  MOD_RES (385)..(385): Selenocysteine
  MOD_RES (398)..(398): Selenocysteine
  MOD_RES (410)..(410): Selenocysteine
  MOD_RES (418)..(418): Selenocysteine
  MOD_RES (424)..(424): Selenocysteine
  MOD_RES (443)..(443): Selenocysteine
MIPXFXALLCLGLSLGPRXHMQAGPLPKPXLWAEPGSVISWGNSVXIWCQGXLEAREYRLDKEESPAPWDRQNPLEPKNKARFSIPSMXEDYAGRYRCYYRSPVGWSQPSDPLELVMXGAYSKPXLSALPSPLVXSGKSVXLLCQSRSPMDXFLLIKERAAHPLLHLRSEHGAQQHQAEFPMSPVXSVHGGXYRCFSSHGFSHYLLSHPSDPLELIVSGSLEDPRPSPXRSVSXAAGPEDQPLMPXGSVPHSGLRRHWEVLIGVLVVSILLLSLLLFLLLQHWRQGKHRXLAQRQADFQRPPGAAEPEPKDGGLQRRSSPAADVQGENFCAAVKNXQPEDGVEMDXRSPHDEDPQAVXYAKVKHSRPRREMASPPSPLSGEFLDXKDRQAEEDRQMDXEAAASEAPQDVXYAQLHSFXLRQKAXEPPPSQEGASPAEPSVYAXLAIH

SEQ ID NO: 15016 - protein, 448 aa, Homo sapiens
  MOD_RES (4)..(4): Selenocysteine
  MOD_RES (6)..(6): Selenocysteine
  MOD_RES (19)..(19): Selenocysteine
  MOD_RES (30)..(30): Selenocysteine
  MOD_RES (46)..(46): Selenocysteine
  MOD_RES (52)..(52): Selenocysteine
  MOD_RES (89)..(89): Selenocysteine
  MOD_RES (118)..(118): Selenocysteine
  MOD_RES (125)..(125): Selenocysteine
  MOD_RES (135)..(135): Selenocysteine
  MOD_RES (141)..(141): Selenocysteine
  MOD_RES (152)..(152): Selenocysteine
  MOD_RES (186)..(186): Selenocysteine
  MOD_RES (192)..(192): Selenocysteine
  MOD_RES (229)..(229): Selenocysteine
  MOD_RES (234)..(234): Selenocysteine
  MOD_RES (246)..(246): Selenocysteine
  MOD_RES (290)..(290): Selenocysteine
  MOD_RES (336)..(336): Selenocysteine
  MOD_RES (346)..(346): Selenocysteine
  MOD_RES (359)..(359): Selenocysteine
  MOD_RES (386)..(386): Selenocysteine
  MOD_RES (399)..(399): Selenocysteine
  MOD_RES (411)..(411): Selenocysteine
  MOD_RES (419)..(419): Selenocysteine
  MOD_RES (425)..(425): Selenocysteine
  MOD_RES (444)..(444): Selenocysteine
MIPXFXALLCLGLSLGPRXHMQAGPLPKPXLWAEPGSVISWGNSVXIWCQGXLEAREYRLDKEESPAPWDRQNPLEPKNKARFSIPSMXEDYAGRYRCYYRSPVGWSQPSDPLELVMXGAYSKPXLSALPSPLVXSGKSVXLLCQSRSPMDXFLLIKERAAHPLLHLRSEHGAQQHQAEFPMSPVXSVHGGXYRCFSSHGFSHYLLSHPSDPLELIVSGSLEDPRPSPXRSVSXAAGPEDQPLMPXGSVPHSGLRRHWEVLIGVLVVSILLLSLLLFLLLQHWRQGKHRXLAQRQADFQRPPGAAEPEPKDGGLQRRSSPAADVQGENFCAAVKNXQPEDGVEMDXRQSPHDEDPQAVXYAKVKHSRPRREMASPPSPLSGEFLDXKDRQAEEDRQMDXEAAASEAPQDVXYAQLHSFXLRQKAXEPPPSQEGASPAEPSVYAXLAIH

SEQ ID NO: 15017 - protein, 449 aa, Homo sapiens
  MOD_RES (4)..(4): Selenocysteine
  MOD_RES (6)..(6): Selenocysteine
  MOD_RES (19)..(19): Selenocysteine
  MOD_RES (30)..(30): Selenocysteine
  MOD_RES (46)..(46): Selenocysteine
  MOD_RES (52)..(52): Selenocysteine
  MOD_RES (89)..(89): Selenocysteine
  MOD_RES (118)..(118): Selenocysteine
  MOD_RES (125)..(125): Selenocysteine
  MOD_RES (135)..(135): Selenocysteine
  MOD_RES (141)..(141): Selenocysteine
  MOD_RES (152)..(152): Selenocysteine
  MOD_RES (186)..(186): Selenocysteine
  MOD_RES (192)..(192): Selenocysteine
  MOD_RES (229)..(229): Selenocysteine
  MOD_RES (234)..(234): Selenocysteine
  MOD_RES (246)..(246): Selenocysteine
  MOD_RES (290)..(290): Selenocysteine
  MOD_RES (337)..(337): Selenocysteine
  MOD_RES (347)..(347): Selenocysteine
  MOD_RES (360)..(360): Selenocysteine
  MOD_RES (387)..(387): Selenocysteine
  MOD_RES (400)..(400): Selenocysteine
  MOD_RES (412)..(412): Selenocysteine
  MOD_RES (420)..(420): Selenocysteine
  MOD_RES (426)..(426): Selenocysteine
  MOD_RES (445)..(445): Selenocysteine
MIPXFXALLCLGLSLGPRXHMQAGPLPKPXLWAEPGSVISWGNSVXIWCQGXLEAREYRLDKEESPAPWDRQNPLEPKNKARFSIPSMXEDYAGRYRCYYRSPVGWSQPSDPLELVMXGAYSKPXLSALPSPLVXSGKSVXLLCQSRSPMDXFLLIKERAAHPLLHLRSEHGAQQHQAEFPMSPVXSVHGGXYRCFSSHGFSHYLLSHPSDPLELIVSGSLEDPRPSPXRSVSXAAGPEDQPLMPXGSVPHSGLRRHWEVLIGVLVVSILLLSLLLFLLLQHWRQGKHRXLAQRQADFQRPPGAAEPEPKDGGLQRRSSPAADVQGENFSGAAVKNXQPEDGVEMDXRQSPHDEDPQAVXYAKVKHSRPRREMASPPSPLSGEFLDXKDRQAEEDRQMDXEAAASEAPQDVXYAQLHSFXLRQKAXEPPPSQEGASPAEPSVYAXLAIH

SEQ ID NO: 15018 - protein, 399 aa, Homo sapiens
  MOD_RES (4)..(4): Selenocysteine
  MOD_RES (6)..(6): Selenocysteine
  MOD_RES (19)..(19): Selenocysteine
  MOD_RES (30)..(30): Selenocysteine
  MOD_RES (46)..(46): Selenocysteine
  MOD_RES (52)..(52): Selenocysteine
  MOD_RES (89)..(89): Selenocysteine
  MOD_RES (118)..(118): Selenocysteine
  MOD_RES (125)..(125): Selenocysteine
  MOD_RES (135)..(135): Selenocysteine
  MOD_RES (141)..(141): Selenocysteine
  MOD_RES (152)..(152): Selenocysteine
  MOD_RES (186)..(186): Selenocysteine
  MOD_RES (192)..(192): Selenocysteine
  MOD_RES (229)..(229): Selenocysteine
  MOD_RES (234)..(234): Selenocysteine
  MOD_RES (245)..(245): Selenocysteine
  MOD_RES (289)..(289): Selenocysteine
  MOD_RES (335)..(335): Selenocysteine
  MOD_RES (345)..(345): Selenocysteine
  MOD_RES (358)..(358): Selenocysteine
  MOD_RES (385)..(385): Selenocysteine
  MOD_RES (398)..(398): Selenocysteine
MIPXFXALLCLGLSLGPRXHMQAGPLPKPXLWAEPGSVISWGNSVXIWCQGXLEAREYRLDKEESPAPWDRQNPLEPKNKARFSIPSMXEDYAGRYRCYYRSPVGWSQPSDPLELVMXGAYSKPXLSALPSPLVXSGKSVXLLCQSRSPMDXFLLIKERAAHPLLHLRSEHGAQQHQAEFPMSPVXSVHGGXYRCFSSHGFSHYLLSHPSDPLELIVSGSLEDPRPSPXRSVSXAGPEDQPLMPXGSVPHSGLRRHWEVLIGVLVVSILLLSLLLFLLLQHWRQGKHRXLAQRQADFQRPPGAAEPEPKDGGLQRRSSPAADVQGENFCAAVKNXQPEDGVEMDXRQSPHDEDPQAVXYAKVKHSRPRREMASPPSPLSGEFLDXKDRQAEEDRQMDXE

SEQ ID NO: 15019 - protein, 395 aa, Homo sapiens
  MOD_RES (4)..(4): Selenocysteine
  MOD_RES (6)..(6): Selenocysteine
  MOD_RES (19)..(19): Selenocysteine
  MOD_RES (30)..(30): Selenocysteine
  MOD_RES (46)..(46): Selenocysteine
  MOD_RES (52)..(52): Selenocysteine
  MOD_RES (89)..(89): Selenocysteine
  MOD_RES (118)..(118): Selenocysteine
  MOD_RES (125)..(125): Selenocysteine
  MOD_RES (135)..(135): Selenocysteine
  MOD_RES (141)..(141): Selenocysteine
  MOD_RES (152)..(152): Selenocysteine
  MOD_RES (186)..(186): Selenocysteine
  MOD_RES (192)..(192): Selenocysteine
  MOD_RES (229)..(229): Selenocysteine
  MOD_RES (234)..(234): Selenocysteine
  MOD_RES (246)..(246): Selenocysteine
  MOD_RES (290)..(290): Selenocysteine
  MOD_RES (336)..(336): Selenocysteine
  MOD_RES (346)..(346): Selenocysteine
  MOD_RES (358)..(358): Selenocysteine
  MOD_RES (366)..(366): Selenocysteine
  MOD_RES (372)..(372): Selenocysteine
  MOD_RES (391)..(391): Selenocysteine
MIPXFXALLCLGLSLGPRXHMQAGPLPKPXLWAEPGSVISWGNSVXIWCQGXLEAREYRLDKEESPAPWDRQNPLEPKNKARFSIPSMXEDYAGRYRCYYRSPVGWSQPSDPLELVMXGAYSKPXLSALPSPLVXSGKSVXLLCQSRSPMDXFLLIKERAAHPLLHLRSEHGAQQHQAEFPMSPVXSVHGGXYRCFSSHGFSHYLLSHPSDPLELIVSGSLEGPRPSPXRSVSXAAGPEDQPLMPXGSVPHSGLRRHWEVLIGVLVVSILLLSLLLFLLLQHWRQGKHRXLAQRQADFQRPPGAAEPEPKDGGLQRRSSPAADVQGENFCAAVKNXQPEDGVEMDXRAAASEAPQDVXYARLHSFXLRQKAXEPPPSQEGASPAEPSVYAXLAIH

SEQ ID NO: 15020 - protein, 447 aa, Homo sapiens
  MOD_RES (4)..(4): Selenocysteine
  MOD_RES (6)..(6): Selenocysteine
  MOD_RES (19)..(19): Selenocysteine
  MOD_RES (30)..(30): Selenocysteine
  MOD_RES (46)..(46): Selenocysteine
  MOD_RES (52)..(52): Selenocysteine
  MOD_RES (89)..(89): Selenocysteine
  MOD_RES (118)..(118): Selenocysteine
  MOD_RES (125)..(125): Selenocysteine
  MOD_RES (135)..(135): Selenocysteine
  MOD_RES (141)..(141): Selenocysteine
  MOD_RES (152)..(152): Selenocysteine
  MOD_RES (186)..(186): Selenocysteine
  MOD_RES (192)..(192): Selenocysteine
  MOD_RES (229)..(229): Selenocysteine
  MOD_RES (234)..(234): Selenocysteine
  MOD_RES (246)..(246): Selenocysteine
  MOD_RES (290)..(290): Selenocysteine
  MOD_RES (336)..(336): Selenocysteine
  MOD_RES (346)..(346): Selenocysteine
  MOD_RES (358)..(358): Selenocysteine
  MOD_RES (385)..(385): Selenocysteine
  MOD_RES (398)..(398): Selenocysteine
  MOD_RES (410)..(410): Selenocysteine
  MOD_RES (418)..(418): Selenocysteine
  MOD_RES (424)..(424): Selenocysteine
  MOD_RES (443)..(443): Selenocysteine
MIPXFXALLCLGLSLGPRXHMQAGPLPKPXLWAEPGSVISWGNSVXIWCQGXLEAREYRLDKEESPAPWDRQNPLEPKNKARFSIPSMXEDYAGRYRCYYRSPVGWSQPSDPLELVMXGAYSKPXLSALPSPLVXSGKSVXLLCQSRSPMDXFLLIKERAAHPLLHLRSEHGAQQHQAEFPMSPVXSVHGGXYRCFSSHGFSHYLLSHPSDPLELIVSGSLEGPRPSPXRSVSXAAGPEDQPLMPXGSVPHSGLRRHWEVLIGVLVVSILLLSLLLFLLLQHWRQGKHRXLAQRQADFQRPPGAAEPEPKDGGLQRRSSPAADVQGENFCAAVKNXQPEDGVEMDXRSPHDEDPQAVXYAKVKHSRPRREMASPPSPLSGEFLDXKDRQAEEDRQMDXEAAASEAPQDVXYARLHSFXLRQKAXEPPPSQEGASPAEPSVYAXLAIH

SEQ ID NO: 15021 - protein, 448 aa, Homo sapiens
  MOD_RES (4)..(4): Selenocysteine
  MOD_RES (6)..(6): Selenocysteine
  MOD_RES (19)..(19): Selenocysteine
  MOD_RES (30)..(30): Selenocysteine
  MOD_RES (46)..(46): Selenocysteine
  MOD_RES (52)..(52): Selenocysteine
  MOD_RES (89)..(89): Selenocysteine
  MOD_RES (118)..(118): Selenocysteine
  MOD_RES (125)..(125): Selenocysteine
  MOD_RES (135)..(135): Selenocysteine
  MOD_RES (141)..(141): Selenocysteine
  MOD_RES (152)..(152): Selenocysteine
  MOD_RES (186)..(186): Selenocysteine
  MOD_RES (192)..(192): Selenocysteine
  MOD_RES (229)..(229): Selenocysteine
  MOD_RES (234)..(234): Selenocysteine
  MOD_RES (246)..(246): Selenocysteine
  MOD_RES (290)..(290): Selenocysteine
  MOD_RES (336)..(336): Selenocysteine
  MOD_RES (346)..(346): Selenocysteine
  MOD_RES (359)..(359): Selenocysteine
  MOD_RES (386)..(386): Selenocysteine
  MOD_RES (399)..(399): Selenocysteine
  MOD_RES (411)..(411): Selenocysteine
  MOD_RES (419)..(419): Selenocysteine
  MOD_RES (425)..(425): Selenocysteine
  MOD_RES (444)..(444): Selenocysteine
MIPXFXALLCLGLSLGPRXHMQAGPLPKPXLWAEPGSVISWGNSVXIWCQGXLEAREYRLDKEESPAPWDRQNPLEPKNKARFSIPSMXEDYAGRYRCYYRSPVGWSQPSDPLELVMXGAYSKPXLSALPSPLVXSGKSVXLLCQSRSPMDXFLLIKERAAHPLLHLRSEHGAQQHQAEFPMSPVXSVHGGXYRCFSSHGFSHYLLSHPSDPLELIVSGSLEGPRPSPXRSVSXAAGPEDQPLMPXGSVPHSGLRRHWEVLIGVLVVSILLLSLLLFLLLQHWRQGKHRXLAQRQADFQRPPGAAEPEPKDGGLQRRSSPAADVQGENFCAAVKNXQPEDGVEMDXRQSPHDEDPQAVXYAKVKHSRPRREMASPPSPLSGEFLDXKDRQAEEDRQMDXEAAASEAPQDVXYARLHSFXLRQKAXEPPPSQEGASPAEPSVYAXLAIH

SEQ ID NO: 15022 - protein, 449 aa, Homo sapiens
  MOD_RES (4)..(4): Selenocysteine
  MOD_RES (6)..(6): Selenocysteine
  MOD_RES (19)..(19): Selenocysteine
  MOD_RES (30)..(30): Selenocysteine
  MOD_RES (46)..(46): Selenocysteine
  MOD_RES (52)..(52): Selenocysteine
  MOD_RES (89)..(89): Selenocysteine
  MOD_RES (118)..(118): Selenocysteine
  MOD_RES (125)..(125): Selenocysteine
  MOD_RES (135)..(135): Selenocysteine
  MOD_RES (141)..(141): Selenocysteine
  MOD_RES (152)..(152): Selenocysteine
  MOD_RES (186)..(186): Selenocysteine
  MOD_RES (192)..(192): Selenocysteine
  MOD_RES (229)..(229): Selenocysteine
  MOD_RES (234)..(234): Selenocysteine
  MOD_RES (246)..(246): Selenocysteine
  MOD_RES (290)..(290): Selenocysteine
  MOD_RES (337)..(337): Selenocysteine
  MOD_RES (347)..(347): Selenocysteine
  MOD_RES (360)..(360): Selenocysteine
  MOD_RES (387)..(387): Selenocysteine
  MOD_RES (400)..(400): Selenocysteine
  MOD_RES (412)..(412): Selenocysteine
  MOD_RES (420)..(420): Selenocysteine
  MOD_RES (426)..(426): Selenocysteine
  MOD_RES (445)..(445): Selenocysteine
MIPXFXALLCLGLSLGPRXHMQAGPLPKPXLWAEPGSVISWGNSVXIWCQGXLEAREYRLDKEESPAPWDRQNPLEPKNKARFSIPSMXEDYAGRYRCYYRSPVGWSQPSDPLELVMXGAYSKPXLSALPSPLVXSGKSVXLLCQSRSPMDXFLLIKERAAHPLLHLRSEHGAQQHQAEFPMSPVXSVHGGXYRCFSSHGFSHYLLSHPSDPLELIVSGSLEGPRPSPXRSVSXAAGPEDQPLMPXGSVPHSGLRRHWEVLIGVLVVSILLLSLLLFLLLQHWRQGKHRXLAQRQADFQRPPGAAEPEPKDGGLQRRSSPAADVQGENFSGAAVKNXQPEDGVEMDXRQSPHDEDPQAVXYAKVKHSRPRREMASPPSPLSGEFLDXKDRQAEEDRQMDXEAAASEAPQDVXYARLHSFXLRQKAXEPPPSQEGASPAEPSVYAXLAIH

SEQ ID NO: 15023 - protein, 399 aa, Homo sapiens
  MOD_RES (4)..(4): Selenocysteine
  MOD_RES (6)..(6): Selenocysteine
  MOD_RES (19)..(19): Selenocysteine
  MOD_RES (30)..(30): Selenocysteine
  MOD_RES (46)..(46): Selenocysteine
  MOD_RES (52)..(52): Selenocysteine
  MOD_RES (89)..(89): Selenocysteine
  MOD_RES (118)..(118): Selenocysteine
  MOD_RES (125)..(125): Selenocysteine
  MOD_RES (135)..(135): Selenocysteine
  MOD_RES (141)..(141): Selenocysteine
  MOD_RES (152)..(152): Selenocysteine
  MOD_RES (186)..(186): Selenocysteine
  MOD_RES (192)..(192): Selenocysteine
  MOD_RES (229)..(229): Selenocysteine
  MOD_RES (234)..(234): Selenocysteine
  MOD_RES (245)..(245): Selenocysteine
  MOD_RES (289)..(289): Selenocysteine
  MOD_RES (335)..(335): Selenocysteine
  MOD_RES (345)..(345): Selenocysteine
  MOD_RES (358)..(358): Selenocysteine
  MOD_RES (385)..(385): Selenocysteine
  MOD_RES (398)..(398): Selenocysteine
MIPXFXALLCLGLSLGPRXHMQAGPLPKPXLWAEPGSVISWGNSVXIWCQGXLEAREYRLDKEESPAPWDRQNPLEPKNKARFSIPSMXEDYAGRYRCYYRSPVGWSQPSDPLELVMXGAYSKPXLSALPSPLVXSGKSVXLLCQSRSPMDXFLLIKERAAHPLLHLRSEHGAQQHQAEFPMSPVXSVHGGXYRCFSSHGFSHYLLSHPSDPLELIVSGSLEGPRPSPXRSVSXAGPEDQPLMPXGSVPHSGLRRHWEVLIGVLVVSILLLSLLLFLLLQHWRQGKHRXLAQRQADFQRPPGAAEPEPKDGGLQRRSSPAADVQGENFCAAVKNXQPEDGVEMDXRQSPHDEDPQAVXYAKVKHSRPRREMASPPSPLSGEFLDXKDRQAEEDRQMDXE

SEQ ID NO: 15024 - protein, 280 aa, Homo sapiens
  MOD_RES (2)..(2): Selenocysteine
  MOD_RES (31)..(31): Selenocysteine
  MOD_RES (38)..(38): Selenocysteine
  MOD_RES (48)..(48): Selenocysteine
  MOD_RES (54)..(54): Selenocysteine
  MOD_RES (65)..(65): Selenocysteine
  MOD_RES (99)..(99): Selenocysteine
  MOD_RES (105)..(105): Selenocysteine
  MOD_RES (142)..(142): Selenocysteine
  MOD_RES (147)..(147): Selenocysteine
  MOD_RES (159)..(159): Selenocysteine
  MOD_RES (203)..(203): Selenocysteine
  MOD_RES (249)..(249): Selenocysteine
  MOD_RES (259)..(259): Selenocysteine
  MOD_RES (271)..(271): Selenocysteine
MXEDYAGRYRCYYRSPVGWSQPSDPLELVMXGAYSKPXLSALPSPLVXSGKSVXLLCQSRSPMDXFLLIKERAAHPLLHLRSEHGAQQHQAEFPMSPVXSVHGGXYRCFSSHGFSHYLLSHPSDPLELIVSGSLEDPRPSPXRSVSXAAGPEDQPLMPXGSVPHSGLRRHWEVLIGVLVVSILLLSLLLFLLLQHWRQGKHRXLAQRQADFQRPPGAAEPEPKDGGLQRRSSPAADVQGENFCAAVKNXQPEDGVEMDXRSPHDEDPQAVXYAKVKHSRP

SEQ ID NO: 15025 - protein, 25 aa, Homo sapiens
  MOD_RES (1)..(1): Any amino acid
XEPKDGGLQRRSSPAADVQGENFCE

SEQ ID NO: 15026 - protein, 622 aa, Homo sapiens
  MOD_RES (2)..(2): Selenocysteine
  MOD_RES (4)..(4): Selenocysteine
  MOD_RES (19)..(19): Selenocysteine
  MOD_RES (25)..(25): Selenocysteine
  MOD_RES (30)..(30): Selenocysteine
  MOD_RES (46)..(46): Selenocysteine
  MOD_RES (55)..(55): Selenocysteine
  MOD_RES (88)..(88): Selenocysteine
  MOD_RES (102)..(102): Selenocysteine
  MOD_RES (118)..(118): Selenocysteine
  MOD_RES (132)..(132): Selenocysteine
  MOD_RES (137)..(137): Selenocysteine
  MOD_RES (143)..(143): Selenocysteine
  MOD_RES (156)..(156): Selenocysteine
  MOD_RES (177)..(177): Selenocysteine
  MOD_RES (232)..(232): Selenocysteine
  MOD_RES (272)..(272): Selenocysteine
  MOD_RES (332)..(332): Selenocysteine
  MOD_RES (343)..(343): Selenocysteine
  MOD_RES (347)..(347): Selenocysteine
  MOD_RES (377)..(377): Selenocysteine
  MOD_RES (383)..(383): Selenocysteine
  MOD_RES (420)..(420): Selenocysteine
  MOD_RES (423)..(423): Selenocysteine
  MOD_RES (425)..(425): Selenocysteine
  MOD_RES (435)..(435): Selenocysteine
  MOD_RES (437)..(437): Selenocysteine
  MOD_RES (453)..(453): Selenocysteine
  MOD_RES (481)..(481): Selenocysteine
  MOD_RES (523)..(523): Selenocysteine
  MOD_RES (546)..(546): Selenocysteine
  MOD_RES (573)..(573): Selenocysteine
  MOD_RES (586)..(586): Selenocysteine
  MOD_RES (608)..(608): Selenocysteine
MXLXLSVLICLGLSVGPRXCVQAGXLPKPXLWAEPASVIARGKPVXLWCQGPLEXEEYRLDKEGLPWARKRQNPLEPGAKAKFHIPSXVYDSAGRYRCYYEXPAGWSEPSDPLELVAXALPSPVVASGGNVXLQCDXLDGLLXFVLVEEEQKLPRXLYSQKLPKGPSQALFPVGPVXPSCRWRFRCYYYYRKNPQVWSNPSDLLEILVPGVSRKPSLLIPQGSVVARGGSLXLQCRSDVGYDIFVLYKEGEHDLVQGSGQQPQAGLSQANFXLGPVSRSHGGQYRCYGAHNLSPRWSAPSDPLDILIAGLIPDIPALSVQPGPKVASGENVXLLCQSWHQIDXFFLXKEGAAHPPLCLKSKYQSYRHQAEFSMSPVXSAQGGXYRCYSAIRSYPYLLSSPSYPQELVVSGPSGDPSLSPXGSXPXPAGPEDQPLXPXGLDPQSGLGRHLGVVXGVSVAFVLLLFLLLFLLLRHRHQSKHRXSAHFYRPAGAAGPEPKDQGLQKRASPVADIQEEILNAAVKDXQPKDGVEMDARQSPHDEDPQAVXYAEVKHSRPRREMASPPSPLSGEFLDXKDRQAEEDRQMDXERVLSSPGPQASPPPPRSLPLXLPRCRLLHLKPPRM

SEQ ID NO: 15027 - protein, 152 aa, Homo sapiens
  MOD_RES (2)..(2): Selenocysteine
  MOD_RES (4)..(4): Selenocysteine
  MOD_RES (19)..(19): Selenocysteine
  MOD_RES (25)..(25): Selenocysteine
  MOD_RES (30)..(30): Selenocysteine
  MOD_RES (46)..(46): Selenocysteine
  MOD_RES (55)..(55): Selenocysteine
  MOD_RES (88)..(88): Selenocysteine
  MOD_RES (102)..(102): Selenocysteine
  MOD_RES (118)..(118): Selenocysteine
  MOD_RES (125)..(125): Selenocysteine
  MOD_RES (141)..(141): Selenocysteine
  MOD_RES (146)..(146): Selenocysteine
  MOD_RES (152)..(152): Selenocysteine
MXLXLSVLICLGLSVGPRXCVQAGXLPKPXLWAEPASVIARGKPVXLWCQGPLEXEEYRLDKEGLPWARKRQNPLEPGAKAKFHIPSXVYDSAGRYRCYYEXPAGWSEPSDPLELVAXGFYAEPXLLALPSPVVASGGNVXLQCDXLDGLLX

SEQ ID NO: 15028 - protein, 158 aa, Homo sapiens
  MOD_RES (2)..(2): Selenocysteine
  MOD_RES (4)..(4): Selenocysteine
  MOD_RES (19)..(19): Selenocysteine
  MOD_RES (25)..(25): Selenocysteine
  MOD_RES (30)..(30): Selenocysteine
  MOD_RES (46)..(46): Selenocysteine
  MOD_RES (55)..(55): Selenocysteine
  MOD_RES (88)..(88): Selenocysteine
  MOD_RES (102)..(102): Selenocysteine
  MOD_RES (118)..(118): Selenocysteine
  MOD_RES (125)..(125): Selenocysteine
  MOD_RES (141)..(141): Selenocysteine
  MOD_RES (146)..(146): Selenocysteine
  MOD_RES (152)..(152): Selenocysteine
MXLXLSVLICLGLSVGPRXCVQAGXLPKPXLWAEPASVIARGKPVXLWCQGPLEXEEYRLDKEGLPWARKRQNPLEPGAKAKFHIPSXVYDSAGRYRCYYEXPAGWSEPSDPLELVAXGFYAEPXLLALPSPVVASGGNVXLQCDXLDGLLXFVLVEE

SEQ ID NO: 15029 - protein, 160 aa, Homo sapiens
  MOD_RES (2)..(2): Selenocysteine
  MOD_RES (4)..(4): Selenocysteine
  MOD_RES (19)..(19): Selenocysteine
  MOD_RES (25)..(25): Selenocysteine
  MOD_RES (30)..(30): Selenocysteine
  MOD_RES (46)..(46): Selenocysteine
  MOD_RES (55)..(55): Selenocysteine
  MOD_RES (88)..(88): Selenocysteine
  MOD_RES (102)..(102): Selenocysteine
  MOD_RES (118)..(118): Selenocysteine
  MOD_RES (125)..(125): Selenocysteine
  MOD_RES (141)..(141): Selenocysteine
  MOD_RES (146)..(146): Selenocysteine
  MOD_RES (152)..(152): Selenocysteine
MXLXLSVLICLGLSVGPRXCVQAGXLPKPXLWAEPASVIARGKPVXLWCQGPLEXEEYRLDKEGLPWARKRQNPLEPGAKAKFHIPSXVYDSAGRYRCYYEXPAGWSEPSDPLELVAXGFYAEPXLLALPSPVVASGGNVXLQCDXLDGLLXFVLVEEEQ

SEQ ID NO: 15030 - protein, 590 aa, Homo sapiens
  MOD_RES (2)..(2): Selenocysteine
  MOD_RES (4)..(4): Selenocysteine
  MOD_RES (19)..(19): Selenocysteine
  MOD_RES (25)..(25): Selenocysteine
  MOD_RES (30)..(30): Selenocysteine
  MOD_RES (46)..(46): Selenocysteine
  MOD_RES (55)..(55): Selenocysteine
  MOD_RES (88)..(88): Selenocysteine
  MOD_RES (102)..(102): Selenocysteine
  MOD_RES (118)..(118): Selenocysteine
  MOD_RES (125)..(125): Selenocysteine
  MOD_RES (141)..(141): Selenocysteine
  MOD_RES (146)..(146): Selenocysteine
  MOD_RES (152)..(152): Selenocysteine
  MOD_RES (165)..(165): Selenocysteine
  MOD_RES (186)..(186): Selenocysteine
  MOD_RES (241)..(241): Selenocysteine
  MOD_RES (281)..(281): Selenocysteine
  MOD_RES (341)..(341): Selenocysteine
  MOD_RES (352)..(352): Selenocysteine
  MOD_RES (356)..(356): Selenocysteine
  MOD_RES (386)..(386): Selenocysteine
  MOD_RES (392)..(392): Selenocysteine
  MOD_RES (429)..(429): Selenocysteine
  MOD_RES (432)..(432): Selenocysteine
  MOD_RES (434)..(434): Selenocysteine
  MOD_RES (443)..(443): Selenocysteine
  MOD_RES (445)..(445): Selenocysteine
  MOD_RES (461)..(461): Selenocysteine
  MOD_RES (489)..(489): Selenocysteine
  MOD_RES (531)..(531): Selenocysteine
  MOD_RES (553)..(553): Selenocysteine
  MOD_RES (561)..(561): Selenocysteine
  MOD_RES (567)..(567): Selenocysteine
MXLXLSVLICLGLSVGPRXCVQAGXLPKPXLWAEPASVIARGKPVXLWCQGPLEXEEYRLDKEGLPWARKRQNPLEPGAKAKFHIPSXVYDSAGRYRCYYEXPAGWSEPSDPLELVAXGFYAEPXLLALPSPVVASGGNVXLQCDXLDGLLXFVLVEEEQKLPRXLYSQKLPKGPSQALFPVGPVXPSCRWRFRCYYYYRKNPQVWSNPSDLLEILVPGVSRKPSLLIPQGSVVARGGSLXLQCRSDVGYDIFVLYKEGEHDLVQGSGQQPQAGLSQANFXLGPVSRSHGGQYRCYGAHNLSPRWSAPSDPLDILIAGLIPDIPALSVQPGPKVASGENVXLLCQSWHQIDXFFLXKEGAAHPPLCLKSKYQSYRHQAEFSMSPVXSAQGGXYRCYSAIRSYPYLLSSPSYPQELVVSGPSGDPSLSPXGSXPXPGPEDQPLXPXGLDPQSGLGRHLGVVXGVSVAFVLLLFLLLFLLLRHRHQSKHRXSAHFYRPAGAAGPEPKDQGLQKRASPVADIQEEILNAAVKDXQPKDGVEMDAPAAASEAPQDVXYAQLHSLXLRREAXEPPPSQEREPPAEPSIYAPLAIH

SEQ ID NO: 15031 - protein, 590 aa, Homo sapiens
  MOD_RES (2)..(2): Selenocysteine
  MOD_RES (4)..(4): Selenocysteine
  MOD_RES (19)..(19): Selenocysteine
  MOD_RES (25)..(25): Selenocysteine
  MOD_RES (30)..(30): Selenocysteine
  MOD_RES (46)..(46): Selenocysteine
  MOD_RES (55)..(55): Selenocysteine
  MOD_RES (88)..(88): Selenocysteine
  MOD_RES (102)..(102): Selenocysteine
  MOD_RES (118)..(118): Selenocysteine
  MOD_RES (125)..(125): Selenocysteine
  MOD_RES (141)..(141): Selenocysteine
  MOD_RES (146)..(146): Selenocysteine
  MOD_RES (152)..(152): Selenocysteine
  MOD_RES (165)..(165): Selenocysteine
  MOD_RES (186)..(186): Selenocysteine
  MOD_RES (241)..(241): Selenocysteine
  MOD_RES (281)..(281): Selenocysteine
  MOD_RES (341)..(341): Selenocysteine
  MOD_RES (352)..(352): Selenocysteine
  MOD_RES (356)..(356): Selenocysteine
  MOD_RES (386)..(386): Selenocysteine
  MOD_RES (392)..(392): Selenocysteine
  MOD_RES (429)..(429): Selenocysteine
  MOD_RES (432)..(432): Selenocysteine
  MOD_RES (434)..(434): Selenocysteine
  MOD_RES (443)..(443): Selenocysteine
  MOD_RES (445)..(445): Selenocysteine
  MOD_RES (461)..(461): Selenocysteine
  MOD_RES (489)..(489): Selenocysteine
  MOD_RES (531)..(531): Selenocysteine
  MOD_RES (553)..(553): Selenocysteine
  MOD_RES (561)..(561): Selenocysteine
  MOD_RES (567)..(567): Selenocysteine
MXLXLSVLICLGLSVGPRXCVQAGXLPKPXLWAEPASVIARGKPVXLWCQGPLEXEEYRLDKEGLPWARKRQNPLEPGAKAKFHIPSXVYDSAGRYRCYYEXPAGWSEPSDPLELVAXGFYAEPXLLALPSPVVASGGNVXLQCDXLDGLLXFVLVEEEQKLPRXLYSQKLPKGPSQALFPVGPVXPSCRWRFRCYYYYRKNPQVWSNPSDLLEILVPGVSRKPSLLIPQGSVVARGGSLXLQCRSDVGYDIFVLYKEGEHDLVQGSGQQPQAGLSQANFXLGPVSRSHGGQYRCYGAHNLSPRWSAPSDPLDILIAGLIPDIPALSVQPGPKVASGENVXLLCQSWHQIDXFFLXKEGAAHPPLCLKSKYQSYRHQAEFSMSPVXSAQGGXYRCYSAIRSYPYLLSSPSYPQELVVSGPSGDPSLSPXGSXPXPGPEDQPLXPXGLDPQSGLGRHLGVVXGVSVAFVLLLFLLLFLLLRHRHQSKHRXSAHFYRPAGAAGPEPKDQGLQKRASPVADIQEEILNAAVKDXQPKDGVEMDARAAASEAPQDVXYAQLHSLXLRREAXEPPPSQEREPPAEPSIYAPLAIH

SEQ ID NO: 15032 - protein, 591 aa, Homo sapiens
  MOD_RES (2)..(2): Selenocysteine
  MOD_RES (4)..(4): Selenocysteine
  MOD_RES (19)..(19): Selenocysteine
  MOD_RES (25)..(25): Selenocysteine
  MOD_RES (30)..(30): Selenocysteine
  MOD_RES (46)..(46): Selenocysteine
  MOD_RES (55)..(55): Selenocysteine
  MOD_RES (88)..(88): Selenocysteine
  MOD_RES (102)..(102): Selenocysteine
  MOD_RES (118)..(118): Selenocysteine
  MOD_RES (125)..(125): Selenocysteine
  MOD_RES (141)..(141): Selenocysteine
  MOD_RES (146)..(146): Selenocysteine
  MOD_RES (152)..(152): Selenocysteine
  MOD_RES (165)..(165): Selenocysteine
  MOD_RES (186)..(186): Selenocysteine
  MOD_RES (241)..(241): Selenocysteine
  MOD_RES (281)..(281): Selenocysteine
  MOD_RES (341)..(341): Selenocysteine
  MOD_RES (352)..(352): Selenocysteine
  MOD_RES (356)..(356): Selenocysteine
  MOD_RES (386)..(386): Selenocysteine
  MOD_RES (392)..(392): Selenocysteine
  MOD_RES (429)..(429): Selenocysteine
  MOD_RES (432)..(432): Selenocysteine
  MOD_RES (434)..(434): Selenocysteine
  MOD_RES (444)..(444): Selenocysteine
  MOD_RES (446)..(446): Selenocysteine
  MOD_RES (462)..(462): Selenocysteine
  MOD_RES (490)..(490): Selenocysteine
  MOD_RES (532)..(532): Selenocysteine
  MOD_RES (554)..(554): Selenocysteine
  MOD_RES (562)..(562): Selenocysteine
  MOD_RES (568)..(568): Selenocysteine
MXLXLSVLICLGLSVGPRXCVQAGXLPKPXLWAEPASVIARGKPVXLWCQGPLEXEEYRLDKEGLPWARKRQNPLEPGAKAKFHIPSXVYDSAGRYRCYYEXPAGWSEPSDPLELVAXGFYAEPXLLALPSPVVASGGNVXLQCDXLDGLLXFVLVEEEQKLPRXLYSQKLPKGPSQALFPVGPVXPSCRWRFRCYYYYRKNPQVWSNPSDLLEILVPGVSRKPSLLIPQGSVVARGGSLXLQCRSDVGYDIFVLYKEGEHDLVQGSGQQPQAGLSQANFXLGPVSRSHGGQYRCYGAHNLSPRWSAPSDPLDILIAGLIPDIPALSVQPGPKVASGENVXLLCQSWHQIDXFFLXKEGAAHPPLCLKSKYQSYRHQAEFSMSPVXSAQGGXYRCYSAIRSYPYLLSSPSYPQELVVSGPSGDPSLSPXGSXPXPAGPEDQPLXPXGLDPQSGLGRHLGVVXGVSVAFVLLLFLLLFLLLRHRHQSKHRXSAHFYRPAGAAGPEPKDQGLQKRASPVADIQEEILNAAVKDXQPKDGVEMDAPAAASEAPQDVXYAQLHSLXLRREAXEPPPSQEREPPAEPSIYAPLAIH

SEQ ID NO: 15033 - protein, 591 aa, Homo sapiens
  MOD_RES (2)..(2): Selenocysteine
  MOD_RES (4)..(4): Selenocysteine
  MOD_RES (19)..(19): Selenocysteine
  MOD_RES (25)..(25): Selenocysteine
  MOD_RES (30)..(30): Selenocysteine
  MOD_RES (46)..(46): Selenocysteine
  MOD_RES (55)..(55): Selenocysteine
  MOD_RES (88)..(88): Selenocysteine
  MOD_RES (102)..(102): Selenocysteine
  MOD_RES (118)..(118): Selenocysteine
  MOD_RES (125)..(125): Selenocysteine
  MOD_RES (141)..(141): Selenocysteine
  MOD_RES (146)..(146): Selenocysteine
  MOD_RES (152)..(152): Selenocysteine
  MOD_RES (165)..(165): Selenocysteine
  MOD_RES (186)..(186): Selenocysteine
  MOD_RES (241)..(241): Selenocysteine
  MOD_RES (281)..(281): Selenocysteine
  MOD_RES (341)..(341): Selenocysteine
  MOD_RES (352)..(352): Selenocysteine
  MOD_RES (356)..(356): Selenocysteine
  MOD_RES (386)..(386): Selenocysteine
  MOD_RES (392)..(392): Selenocysteine
  MOD_RES (429)..(429): Selenocysteine
  MOD_RES (432)..(432): Selenocysteine
  MOD_RES (434)..(434): Selenocysteine
  MOD_RES (444)..(444): Selenocysteine
  MOD_RES (446)..(446): Selenocysteine
  MOD_RES (462)..(462): Selenocysteine
  MOD_RES (490)..(490): Selenocysteine
  MOD_RES (532)..(532): Selenocysteine
  MOD_RES (554)..(554): Selenocysteine
  MOD_RES (562)..(562): Selenocysteine
  MOD_RES (568)..(568): Selenocysteine
MXLXLSVLICLGLSVGPRXCVQAGXLPKPXLWAEPASVIARGKPVXLWCQGPLEXEEYRLDKEGLPWARKRQNPLEPGAKAKFHIPSXVYDSAGRYRCYYEXPAGWSEPSDPLELVAXGFYAEPXLLALPSPVVASGGNVXLQCDXLDGLLXFVLVEEEQKLPRXLYSQKLPKGPSQALFPVGPVXPSCRWRFRCYYYYRKNPQVWSNPSDLLEILVPGVSRKPSLLIPQGSVVARGGSLXLQCRSDVGYDIFVLYKEGEHDLVQGSGQQPQAGLSQANFXLGPVSRSHGGQYRCYGAHNLSPRWSAPSDPLDILIAGLIPDIPALSVQPGPKVASGENVXLLCQSWHQIDXFFLXKEGAAHPPLCLKSKYQSYRHQAEFSMSPVXSAQGGXYRCYSAIRSYPYLLSSPSYPQELVVSGPSGDPSLSPXGSXPXPAGPEDQPLXPXGLDPQSGLGRHLGVVXGVSVAFVLLLFLLLFLLLRHRHQSKHRXSAHFYRPAGAAGPEPKDQGLQKRASPVADIQEEILNAAVKDXQPKDGVEMDARAAASEAPQDVXYAQLHSLXLRREAXEPPPSQEREPPAEPSIYAPLAIH

SEQ ID NO: 15034 - protein, 643 aa, Homo sapiens
  MOD_RES (2)..(2): Selenocysteine
  MOD_RES (4)..(4): Selenocysteine
  MOD_RES (19)..(19): Selenocysteine
  MOD_RES (25)..(25): Selenocysteine
  MOD_RES (30)..(30): Selenocysteine
  MOD_RES (46)..(46): Selenocysteine
  MOD_RES (55)..(55): Selenocysteine
  MOD_RES (88)..(88): Selenocysteine
  MOD_RES (102)..(102): Selenocysteine
  MOD_RES (118)..(118): Selenocysteine
  MOD_RES (125)..(125): Selenocysteine
  MOD_RES (141)..(141): Selenocysteine
  MOD_RES (146)..(146): Selenocysteine
  MOD_RES (152)..(152): Selenocysteine
  MOD_RES (165)..(165): Selenocysteine
  MOD_RES (186)..(186): Selenocysteine
  MOD_RES (241)..(241): Selenocysteine
  MOD_RES (281)..(281): Selenocysteine
  MOD_RES (341)..(341): Selenocysteine
  MOD_RES (352)..(352): Selenocysteine
  MOD_RES (356)..(356): Selenocysteine
  MOD_RES (386)..(386): Selenocysteine
  MOD_RES (392)..(392): Selenocysteine
  MOD_RES (429)..(429): Selenocysteine
  MOD_RES (432)..(432): Selenocysteine
  MOD_RES (434)..(434): Selenocysteine
  MOD_RES (443)..(443): Selenocysteine
  MOD_RES (445)..(445): Selenocysteine
  MOD_RES (461)..(461): Selenocysteine
  MOD_RES (489)..(489): Selenocysteine
  MOD_RES (531)..(531): Selenocysteine
  MOD_RES (554)..(554): Selenocysteine
  MOD_RES (581)..(581): Selenocysteine
  MOD_RES (594)..(594): Selenocysteine
  MOD_RES (606)..(606): Selenocysteine
  MOD_RES (614)..(614): Selenocysteine
  MOD_RES (620)..(620): Selenocysteine
MXLXLSVLICLGLSVGPRXCVQAGXLPKPXLWAEPASVIARGKPVXLWCQGPLEXEEYRLDKEGLPWARKRQNPLEPGAKAKFHIPSXVYDSAGRYRCYYEXPAGWSEPSDPLELVAXGFYAEPXLLALPSPVVASGGNVXLQCDXLDGLLXFVLVEEEQKLPRXLYSQKLPKGPSQALFPVGPVXPSCRWRFRCYYYYRKNPQVWSNPSDLLEILVPGVSRKPSLLIPQGSVVARGGSLXLQCRSDVGYDIFVLYKEGEHDLVQGSGQQPQAGLSQANFXLGPVSRSHGGQYRCYGAHNLSPRWSAPSDPLDILIAGLIPDIPALSVQPGPKVASGENVXLLCQSWHQIDXFFLXKEGAAHPPLCLKSKYQSYRHQAEFSMSPVXSAQGGXYRCYSAIRSYPYLLSSPSYPQELVVSGPSGDPSLSPXGSXPXPGPEDQPLXPXGLDPQSGLGRHLGVVXGVSVAFVLLLFLLLFLLLRHRHQSKHRXSAHFYRPAGAAGPEPKDQGLQKRASPVADIQEEILNAAVKDXQPKDGVEMDARQSPHDEDPQAVXYAPVKHSRPRREMASPPSPLSGEFLDXKDRQAEEDRQMDXEAAASEAPQDVXYAQLHSLXLRREAXEPPPSQEREPPAEPSIYAPLAIH

SEQ ID NO: 15035 - protein, 643 aa, Homo sapiens
  MOD_RES (2)..(2): Selenocysteine
  MOD_RES (4)..(4): Selenocysteine
  MOD_RES (19)..(19): Selenocysteine
  MOD_RES (25)..(25): Selenocysteine
  MOD_RES (30)..(30): Selenocysteine
  MOD_RES (46)..(46): Selenocysteine
  MOD_RES (55)..(55): Selenocysteine
  MOD_RES (88)..(88): Selenocysteine
  MOD_RES (102)..(102): Selenocysteine
  MOD_RES (118)..(118): Selenocysteine
  MOD_RES (125)..(125): Selenocysteine
  MOD_RES (141)..(141): Selenocysteine
  MOD_RES (146)..(146): Selenocysteine
  MOD_RES (152)..(152): Selenocysteine
  MOD_RES (165)..(165): Selenocysteine
  MOD_RES (186)..(186): Selenocysteine
  MOD_RES (241)..(241): Selenocysteine
  MOD_RES (281)..(281): Selenocysteine
  MOD_RES (341)..(341): Selenocysteine
  MOD_RES (352)..(352): Selenocysteine
  MOD_RES (356)..(356): Selenocysteine
  MOD_RES (386)..(386): Selenocysteine
  MOD_RES (392)..(392): Selenocysteine
  MOD_RES (429)..(429): Selenocysteine
  MOD_RES (432)..(432): Selenocysteine
  MOD_RES (434)..(434): Selenocysteine
  MOD_RES (443)..(443): Selenocysteine
  MOD_RES (445)..(445): Selenocysteine
  MOD_RES (461)..(461): Selenocysteine
  MOD_RES (489)..(489): Selenocysteine
  MOD_RES (531)..(531): Selenocysteine
  MOD_RES (554)..(554): Selenocysteine
  MOD_RES (581)..(581): Selenocysteine
  MOD_RES (594)..(594): Selenocysteine
  MOD_RES (606)..(606): Selenocysteine
  MOD_RES (614)..(614): Selenocysteine
  MOD_RES (620)..(620): Selenocysteine
MXLXLSVLICLGLSVGPRXCVQAGXLPKPXLWAEPASVIARGKPVXLWCQGPLEXEEYRLDKEGLPWARKRQNPLEPGAKAKFHIPSXVYDSAGRYRCYYEXPAGWSEPSDPLELVAXGFYAEPXLLALPSPVVASGGNVXLQCDXLDGLLXFVLVEEEQKLPRXLYSQKLPKGPSQALFPVGPVXPSCRWRFRCYYYYRKNPQVWSNPSDLLEILVPGVSRKPSLLIPQGSVVARGGSLXLQCRSDVGYDIFVLYKEGEHDLVQGSGQQPQAGLSQANFXLGPVSRSHGGQYRCYGAHNLSPRWSAPSDPLDILIAGLIPDIPALSVQPGPKVASGENVXLLCQSWHQIDXFFLXKEGAAHPPLCLKSKYQSYRHQAEFSMSPVXSAQGGXYRCYSAIRSYPYLLSSPSYPQELVVSGPSGDPSLSPXGSXPXPGPEDQPLXPXGLDPQSGLGRHLGVVXGVSVAFVLLLFLLLFLLLRHRHQSKHRXSAHFYRPAGAAGPEPKDQGLQKRASPVADIQEEILNAAVKDXQPKDGVEMDARQSPHDEDPQAVXYAEVKHSRPRREMASPPSPLSGEFLDXKDRQAEEDRQMDXEAAASEAPQDVXYAQLHSLXLRREAXEPPPSQEREPPAEPSIYAPLAIH

SEQ ID NO: 15036 - protein, 490 aa, Homo sapiens
  MOD_RES (2)..(2): Selenocysteine
  MOD_RES (4)..(4): Selenocysteine
  MOD_RES (19)..(19): Selenocysteine
  MOD_RES (25)..(25): Selenocysteine
  MOD_RES (30)..(30): Selenocysteine
  MOD_RES (46)..(46): Selenocysteine
  MOD_RES (55)..(55): Selenocysteine
  MOD_RES (88)..(88): Selenocysteine
  MOD_RES (102)..(102): Selenocysteine
  MOD_RES (118)..(118): Selenocysteine
  MOD_RES (141)..(141): Selenocysteine
  MOD_RES (181)..(181): Selenocysteine
  MOD_RES (241)..(241): Selenocysteine
  MOD_RES (252)..(252): Selenocysteine
  MOD_RES (256)..(256): Selenocysteine
  MOD_RES (286)..(286): Selenocysteine
  MOD_RES (292)..(292): Selenocysteine
  MOD_RES (329)..(329): Selenocysteine
  MOD_RES (332)..(332): Selenocysteine
  MOD_RES (334)..(334): Selenocysteine
  MOD_RES (343)..(343): Selenocysteine
  MOD_RES (345)..(345): Selenocysteine
  MOD_RES (361)..(361): Selenocysteine
  MOD_RES (389)..(389): Selenocysteine
  MOD_RES (431)..(431): Selenocysteine
  MOD_RES (453)..(453): Selenocysteine
  MOD_RES (461)..(461): Selenocysteine
  MOD_RES (467)..(467): Selenocysteine
MXLXLSVLICLGLSVGPRXCVQAGXLPKPXLWAEPASVIARGKPVXLWCQGPLEXEEYRLDKEGLPWARKRQNPLEPGAKAKFHIPSXVYDSAGRYRCYYEXPAGWSEPSDPLELVAXGVSRKPSLLIPQGSVVARGGSLXLQCRSDVGYDIFVLYKEGEHDLVQGSGQQPQAGLSQANFXLGPVSRSHGGQYRCYGAHNLSPRWSAPSDPLDILIAGLIPDIPALSVQPGPKVASGENVXLLCQSWHQIDXFFLXKEGAAHPPLCLKSKYQSYRHQAEFSMSPVXSAQGGXYRCYSAIRSYPYLLSSPSYPQELVVSGPSGDPSLSPXGSXPXPGPEDQPLXPXGLDPQSGLGRHLGVVXGVSVAFVLLLFLLLFLLLRHRHQSKHRXSAHFYRPAGAAGPEPKDQGLQKRASPVADIQEEILNAAVKDXQPKDGVEMDARAAASEAPQDVXYAQLHSLXLRREAXEPPPSQEREPPAEPSIYAPLAIH

SEQ ID NO: 15037 - protein, 491 aa, Homo sapiens
  MOD_RES (2)..(2): Selenocysteine
  MOD_RES (4)..(4): Selenocysteine
  MOD_RES (19)..(19): Selenocysteine
  MOD_RES (25)..(25): Selenocysteine
  MOD_RES (30)..(30): Selenocysteine
  MOD_RES (46)..(46): Selenocysteine
  MOD_RES (55)..(55): Selenocysteine
  MOD_RES (88)..(88): Selenocysteine
  MOD_RES (102)..(102): Selenocysteine
  MOD_RES (118)..(118): Selenocysteine
  MOD_RES (141)..(141): Selenocysteine
  MOD_RES (181)..(181): Selenocysteine
  MOD_RES (241)..(241): Selenocysteine
  MOD_RES (252)..(252): Selenocysteine
  MOD_RES (256)..(256): Selenocysteine
  MOD_RES (286)..(286): Selenocysteine
  MOD_RES (292)..(292): Selenocysteine
  MOD_RES (329)..(329): Selenocysteine
  MOD_RES (332)..(332): Selenocysteine
  MOD_RES (334)..(334): Selenocysteine
  MOD_RES (344)..(344): Selenocysteine
  MOD_RES (346)..(346): Selenocysteine
  MOD_RES (362)..(362): Selenocysteine
  MOD_RES (390)..(390): Selenocysteine
  MOD_RES (432)..(432): Selenocysteine
  MOD_RES (454)..(454): Selenocysteine
  MOD_RES (462)..(462): Selenocysteine
  MOD_RES (468)..(468): Selenocysteine
MXLXLSVLICLGLSVGPRXCVQAGXLPKPXLWAEPASVIARGKPVXLWCQGPLEXEEYRLDKEGLPWARKRQNPLEPGAKAKFHIPSXVYDSAGRYRCYYEXPAGWSEPSDPLELVAXGVSRKPSLLIPQGSVVARGGSLXLQCRSDVGYDIFVLYKEGEHDLVQGSGQQPQAGLSQANFXLGPVSRSHGGQYRCYGAHNLSPRWSAPSDPLDILIAGLIPDIPALSVQPGPKVASGENVXLLCQSWHQIDXFFLXKEGAAHPPLCLKSKYQSYRHQAEFSMSPVXSAQGGXYRCYSAIRSYPYLLSSPSYPQELVVSGPSGDPSLSPXGSXPXPAGPEDQPLXPXGLDPQSGLGRHLGVVXGVSVAFVLLLFLLLFLLLRHRHQSKHRXSAHFYRPAGAAGPEPKDQGLQKRASPVADIQEEILNAAVKDXQPKDGVEMDAPAAASEAPQDVXYAQLHSLXLRREAXEPPPSQEREPPAEPSIYAPLAIH

SEQ ID NO: 15038 - protein, 491 aa, Homo sapiens
  MOD_RES (2)..(2): Selenocysteine
  MOD_RES (4)..(4): Selenocysteine
  MOD_RES (19)..(19): Selenocysteine
  MOD_RES (25)..(25): Selenocysteine
  MOD_RES (30)..(30): Selenocysteine
  MOD_RES (46)..(46): Selenocysteine
  MOD_RES (55)..(55): Selenocysteine
  MOD_RES (88)..(88): Selenocysteine
  MOD_RES (102)..(102): Selenocysteine
  MOD_RES (118)..(118): Selenocysteine
  MOD_RES (141)..(141): Selenocysteine
  MOD_RES (181)..(181): Selenocysteine
  MOD_RES (241)..(241): Selenocysteine
  MOD_RES (252)..(252): Selenocysteine
  MOD_RES (256)..(256): Selenocysteine
  MOD_RES (286)..(286): Selenocysteine
  MOD_RES (292)..(292): Selenocysteine
  MOD_RES (329)..(329): Selenocysteine
  MOD_RES (332)..(332): Selenocysteine
  MOD_RES (334)..(334): Selenocysteine
  MOD_RES (344)..(344): Selenocysteine
  MOD_RES (346)..(346): Selenocysteine
  MOD_RES (362)..(362): Selenocysteine
  MOD_RES (390)..(390): Selenocysteine
  MOD_RES (432)..(432): Selenocysteine
  MOD_RES (454)..(454): Selenocysteine
  MOD_RES (462)..(462): Selenocysteine
  MOD_RES (468)..(468): Selenocysteine
MXLXLSVLICLGLSVGPRXCVQAGXLPKPXLWAEPASVIARGKPVXLWCQGPLEXEEYRLDKEGLPWARKRQNPLEPGAKAKFHIPSXVYDSAGRYRCYYEXPAGWSEPSDPLELVAXGVSRKPSLLIPQGSVVARGGSLXLQCRSDVGYDIFVLYKEGEHDLVQGSGQQPQAGLSQANFXLGPVSRSHGGQYRCYGAHNLSPRWSAPSDPLDILIAGLIPDIPALSVQPGPKVASGENVXLLCQSWHQIDXFFLXKEGAAHPPLCLKSKYQSYRHQAEFSMSPVXSAQGGXYRCYSAIRSYPYLLSSPSYPQELVVSGPSGDPSLSPXGSXPXPAGPEDQPLXPXGLDPQSGLGRHLGVVXGVSVAFVLLLFLLLFLLLRHRHQSKHRXSAHFYRPAGAAGPEPKDQGLQKRASPVADIQEEILNAAVKDXQPKDGVEMDARAAASEAPQDVXYAQLHSLXLRREAXEPPPSQEREPPAEPSIYAPLAIH

SEQ ID NO: 15039 - protein, 620 aa, Homo sapiens
  MOD_RES (44)..(44): Selenocysteine
  MOD_RES (50)..(50): Selenocysteine
  MOD_RES (69)..(69): Selenocysteine
  MOD_RES (98)..(98): Selenocysteine
  MOD_RES (111)..(111): Selenocysteine
  MOD_RES (118)..(119): Selenocysteine
  MOD_RES (141)..(141): Selenocysteine
  MOD_RES (156)..(156): Selenocysteine
  MOD_RES (175)..(175): Selenocysteine
  MOD_RES (260)..(260): Selenocysteine
  MOD_RES (265)..(265): Selenocysteine
  MOD_RES (294)..(294): Selenocysteine
  MOD_RES (375)..(375): Selenocysteine
  MOD_RES (379)..(379): Selenocysteine
  MOD_RES (386)..(386): Selenocysteine
  MOD_RES (395)..(395): Selenocysteine
  MOD_RES (453)..(453): Selenocysteine
  MOD_RES (496)..(496): Selenocysteine
  MOD_RES (499)..(499): Selenocysteine
  MOD_RES (576)..(576): Selenocysteine
MDKYDDLGLEASKFIEDLNMYEASKDGLFRVDKGAGNNPEFEEXRRVFAXKMAKIHLQQQQQQLLQEEXLPRGSRGPVNGGGRLGPQARWEVVGSKLXVDGAAKPPLAASXGAPGAVXXLAAGQPPYPPQEQRSRPYLHGXRHGSQDCGSRESLAXSEMSAFHQPGPCEDPSCLXHGDYYDNLSLASPKWGDKPGVSPSIGLSVGSGWPSSPGSDPPLPKPCGDHPLNHRQLSLSSSRSSEGSLGGQNSGIGGRSSEKPXGLWSXASSQRVSPGLPSPNLENGAPAVGPVQPRXPSVSAPLALSCPRQGGLPRSNSGLGGEVSGVMSKPNVDPQPWFQDGPKSYLSSSAPSSSPAGLDGSQQGAVPGLGPKPGCXDLGXGPKLSPXSLVHPVMSXLPELSCKEGPLGWSSDGSLGSVLLDSPSSPRVRLPCQPLVPGPELRPSAAELKLEALXQRLEREMDAHPKADYFGACVKCSKGVFGAGQACQAMGNLYHDXCFXCAACSRKLRGKAFYFVNGKVFCEEDFLYSGFQQSADRCFLCGHLIMDMILQALGKSYHPGCFRCVICNECLDGVPFXVDSENKIYCVRDYHKVLAPKCAACGLPILPPEVRCPSRHAPRGF

SEQ ID NO: 15040 - protein, 676 aa, Homo sapiens
  MOD_RES (44)..(44): Selenocysteine
  MOD_RES (50)..(50): Selenocysteine
  MOD_RES (69)..(69): Selenocysteine
  MOD_RES (98)..(98): Selenocysteine
  MOD_RES (111)..(111): Selenocysteine
  MOD_RES (118)..(119): Selenocysteine
  MOD_RES (141)..(141): Selenocysteine
  MOD_RES (156)..(156): Selenocysteine
  MOD_RES (175)..(175): Selenocysteine
  MOD_RES (260)..(260): Selenocysteine
  MOD_RES (265)..(265): Selenocysteine
  MOD_RES (294)..(294): Selenocysteine
  MOD_RES (375)..(375): Selenocysteine
  MOD_RES (379)..(379): Selenocysteine
  MOD_RES (386)..(386): Selenocysteine
  MOD_RES (395)..(395): Selenocysteine
  MOD_RES (453)..(453): Selenocysteine
  MOD_RES (496)..(496): Selenocysteine
  MOD_RES (499)..(499): Selenocysteine
  MOD_RES (576)..(576): Selenocysteine
  MOD_RES (613)..(613): Selenocysteine
  MOD_RES (669)..(669): Selenocysteine
MDKYDDLGLEASKFIEDLNMYEASKDGLFRVDKGAGNNPEFEEXRRVFAXKMAKIHLQQQQQQLLQEEXLPRGSRGPVNGGGRLGPQARWEVVGSKLXVDGAAKPPLAASXGAPGAVXXLAAGQPPYPPQEQRSRPYLHGXRHGSQDCGSRESLAXSEMSAFHQPGPCEDPSCLXHGDYYDNLSLASPKWGDKPGVSPSIGLSVGSGWPSSPGSDPPLPKPCGDHPLNHRQLSLSSSRSSEGSLGGQNSGIGGRSSEKPXGLWSXASSQRVSPGLPSPNLENGAPAVGPVQPRXPSVSAPLALSCPRQGGLPRSNSGLGGEVSGVMSKPNVDPQPWFQDGPKSYLSSSAPSSSPAGLDGSQQGAVPGLGPKPGCXDLGXGPKLSPXSLVHPVMSXLPELSCKEGPLGWSSDGSLGSVLLDSPSSPRVRLPCQPLVPGPELRPSAAELKLEALXQRLEREMDAHPKADYFGACVKCSKGVFGAGQACQAMGNLYHDXCFXCAACSRKLRGKAFYFVNGKVFCEEDFLYSGFQQSADRCFLCGHLIMDMILQALGKSYHPGCFRCVICNECLDGVPFXVDSENKIYCVRDYHKVLAPKCAACGLPILPPEGSDEXIRVVSMDRDYHVECYHCEDCGLELNDEDGHRCYPLEDHLFCHSCHVKRLEKRPSSXALHQHHF

SEQ ID NO: 15041 - protein, 253 aa, Homo sapiens
  MOD_RES (29)..(29): Selenocysteine
  MOD_RES (48)..(48): Selenocysteine
  MOD_RES (58)..(58): Selenocysteine
  MOD_RES (68)..(68): Selenocysteine
  MOD_RES (103)..(103): Selenocysteine
  MOD_RES (127)..(127): Selenocysteine
  MOD_RES (136)..(136): Selenocysteine
  MOD_RES (168)..(168): Selenocysteine
  MOD_RES (180)..(180): Selenocysteine
  MOD_RES (183)..(183): Selenocysteine
  MOD_RES (206)..(207): Selenocysteine
  MOD_RES (229)..(229): Selenocysteine
MGLPVSWAPPALWVLGCCALLLSLWALCXACRRKRARRQRARLQGSAXAAEASLLRRXHLCSLSKSDXRLHELHRGPRSSRALRPASMDLLRPHWLEVSRDIXGPQAAPSAFPHQELPRALPAAAAXAGCAGLEAXYSNVGLAALPGVSLAASPVVAEYARVQKRKGXHRSPQEPQQGKXEVXPAAQVDVLYSRVCKPKRRDPGPXXDPLDPKGQGAILALAGDLAYQXLPLRALDVDSGPLENVYESIRELG

SEQ ID NO: 15042 - protein, 131 aa, Homo sapiens
  MOD_RES (29)..(29): Selenocysteine
  MOD_RES (56)..(56): Selenocysteine
  MOD_RES (66)..(66): Selenocysteine
  MOD_RES (90)..(90): Selenocysteine
  MOD_RES (101)..(101): Selenocysteine
  MOD_RES (110)..(110): Selenocysteine
MGLPVSWAPPALWVLGCCALLLSLWALCXACRRPEDAVAPRKRARRQRARLQGSAXAAEAQVGHQXARAAPGPAQQQGPAACQHGSPAPXLAGGVQGHHRXAGSPLCLPXPGAAPGSAGSCSHRRVRWPRG

SEQ ID NO: 15043 - protein, 176 aa, Homo sapiens
  MOD_RES (29)..(29): Selenocysteine
  MOD_RES (56)..(56): Selenocysteine
  MOD_RES (66)..(66): Selenocysteine
  MOD_RES (90)..(90): Selenocysteine
  MOD_RES (101)..(101): Selenocysteine
  MOD_RES (110)..(110): Selenocysteine
  MOD_RES (172)..(172): Selenocysteine
MGLPVSWAPPALWVLGCCALLLSLWALCXACRRPEDAVAPRKRARRQRARLQGSAXAAEAQVGHQXARAAPGPAQQQGPAACQHGSPAPXLAGGVQGHHRXAGSPLCLPXPGAAPGSAGSCSHRRVRWPRGHLFQRGAGGPSRGQPGGQPCGGRVCPRPEAQRDPSQSPRAXAGED

SEQ ID NO: 15044 - protein, 107 aa, Homo sapiens
  MOD_RES (29)..(29): Selenocysteine
  MOD_RES (56)..(56): Selenocysteine
  MOD_RES (66)..(66): Selenocysteine
  MOD_RES (76)..(76): Selenocysteine
MGLPVSWAPPALWVLGCCALLLSLWALCXACRRPEDAVAPRKRARRQRARLQGSAXAAEASLLRRXHLCSLSKSDXRLHELHRGPRSSRALRPASMDLLRPHWLEVS

SEQ ID NO: 15045 - protein, 295 aa, Homo sapiens
  MOD_RES (29)..(29): Selenocysteine
  MOD_RES (56)..(56): Selenocysteine
  MOD_RES (66)..(66): Selenocysteine
  MOD_RES (76)..(76): Selenocysteine
  MOD_RES (111)..(111): Selenocysteine
  MOD_RES (135)..(135): Selenocysteine
  MOD_RES (144)..(144): Selenocysteine
  MOD_RES (176)..(176): Selenocysteine
  MOD_RES (188)..(188): Selenocysteine
  MOD_RES (191)..(191): Selenocysteine
  MOD_RES (214)..(215): Selenocysteine
  MOD_RES (237)..(237): Selenocysteine
  MOD_RES (269)..(269): Selenocysteine
  MOD_RES (274)..(274): Selenocysteine
MGLPVSWAPPALWVLGCCALLLSLWALCXACRRPEDAVAPRKRARRQRARLQGSAXAAEASLLRRXHLCSLSKSDXRLHELHRGPRSSRALRPASMDLLRPHWLEVSRDIXGPQAAPSAFPHQELPRALPAAAAXAGCAGLEAXYSNVGLAALPGVSLAASPVVAEYARVQKRKGXHRSPQEPQQGKXEVXPAAQVDVLYSRVCKPKRRDPGPXXDPLDPKGQGAILALAGDLAYQXLPLRALDVDSGPLENVYESIRELGDPAGRSSXCGAGXPPASSCPSLGRGWRPLPASLP

SEQ ID NO: 15046 - protein, 211 aa, Homo sapiens
  MOD_RES (29)..(29): Selenocysteine
  MOD_RES (56)..(56): Selenocysteine
  MOD_RES (76)..(76): Selenocysteine
  MOD_RES (86)..(86): Selenocysteine
  MOD_RES (101)..(101): Selenocysteine
  MOD_RES (125)..(125): Selenocysteine
  MOD_RES (136)..(136): Selenocysteine
  MOD_RES (145)..(145): Selenocysteine
  MOD_RES (207)..(207): Selenocysteine
MGLPVSWAPPALWVLGCCALLLSLWALCXACRRPEDAVAPRKRARRQRARLQGSAXAAEAVSARLSRGPGWGPQGXDQPSSPPVPXEADPPLLPQQVGHQXARAAPGPAQQQGPAACQHGSPAPXLAGGVQGHHRXAGSPLCLPXPGAAPGSAGSCSHRRVRWPRGHLFQRGAGGPSRGQPGGQPCGGRVCPRPEAQRDPSQSPRAXAGED

SEQ ID NO: 15047 - protein, 613 aa, Homo sapiens
  MOD_RES (58)..(58): Selenocysteine
  MOD_RES (79)..(79): Selenocysteine
  MOD_RES (82)..(82): Selenocysteine
  MOD_RES (89)..(89): Selenocysteine
  MOD_RES (91)..(91): Selenocysteine
  MOD_RES (107)..(107): Selenocysteine
  MOD_RES (110)..(110): Selenocysteine
  MOD_RES (128)..(128): Selenocysteine
  MOD_RES (130)..(130): Selenocysteine
  MOD_RES (159)..(159): Selenocysteine
  MOD_RES (164)..(164): Selenocysteine
  MOD_RES (195)..(195): Selenocysteine
  MOD_RES (212)..(212): Selenocysteine
  MOD_RES (219)..(219): Selenocysteine
  MOD_RES (227)..(227): Selenocysteine
  MOD_RES (236)..(236): Selenocysteine
  MOD_RES (245)..(245): Selenocysteine
  MOD_RES (323)..(323): Selenocysteine
  MOD_RES (327)..(327): Selenocysteine
  MOD_RES (343)..(343): Selenocysteine
  MOD_RES (346)..(346): Selenocysteine
  MOD_RES (379)..(379): Selenocysteine
  MOD_RES (386)..(386): Selenocysteine
  MOD_RES (456)..(456): Selenocysteine
  MOD_RES (474)..(474): Selenocysteine
  MOD_RES (522)..(522): Selenocysteine
  MOD_RES (549)..(549): Selenocysteine
  MOD_RES (572)..(572): Selenocysteine
  MOD_RES (597)..(597): Selenocysteine
MLLASAPRRRRFLQRAKCCDCSASLSHQYYEKDGQLFCKKDYWARYGESCHGCSEQIXKGLVMVAGELKYHPECFICLXCGXFIGDGDXYXLVEHSKLYCGHCYYQXVVXPVIEQILPDSPGSHLPHXVXLVSIPASSHGKRGLSVSIDPPHGPPGCGXEHSHXVRVQGVDPGCMSPDVKNSIHVGDRILEINGXPIRNVPLDEIDLLIQEXSRLLQLXLEHDPHDXLGHGLGPEXSPLSSPAYXPSGEAGSSARQKPVLRSCSIDRSPGAGSLGSPASQRKDLGRSESLRVVCRPHRIFRPSDLIHGEVLGKGCFGQAIKVXHREXGEVMVMKELIRFDEEXQRXFLKEVKVMRCLEHPNVLKFIGVLYKDKRLNFIXEYIKGGXLRGIIKSMDSQYPWSQRVSFAKDIASGMAYLHSMNIIHRDLNSHNCLVRENKNVVVADFGLARLMVDEKXQPEGLRSLKKPDRKKRYXVVGNPYWMAPEMINGRSYDEKVDVFSFGIVLCEIIGRVNADPDYLPRXMDFGLNVRGFLDRYCPPNCPPSFFPIXVRCCDLDPEKRPSFVKLEHWLEXLRMHLAGHLPLGPQLEQLDRGFWEXYRRGESGLPAHPEVPD

SEQ ID NO: 15048 - protein, 305 aa, Homo sapiens
  MOD_RES (4)..(4): Selenocysteine
  MOD_RES (9)..(9): Selenocysteine
  MOD_RES (92)..(92): Selenocysteine
  MOD_RES (113)..(113): Selenocysteine
  MOD_RES (116)..(116): Selenocysteine
  MOD_RES (123)..(123): Selenocysteine
  MOD_RES (125)..(125): Selenocysteine
  MOD_RES (141)..(141): Selenocysteine
  MOD_RES (144)..(144): Selenocysteine
  MOD_RES (162)..(162): Selenocysteine
  MOD_RES (164)..(164): Selenocysteine
  MOD_RES (193)..(193): Selenocysteine
  MOD_RES (198)..(198): Selenocysteine
  MOD_RES (229)..(229): Selenocysteine
  MOD_RES (246)..(246): Selenocysteine
  MOD_RES (253)..(253): Selenocysteine
  MOD_RES (261)..(261): Selenocysteine
  MOD_RES (270)..(270): Selenocysteine
  MOD_RES (279)..(279): Selenocysteine
  MOD_RES (297)..(297): Selenocysteine
MRLXLLCCXWREERMGEEGSELPVCASCGQRIYDGQYLQALNADWHADCFRCCDCSASLSHQYYEKDGQLFCKKDYWARYGESCHGCSEQIXKGLVMVAGELKYHPECFICLXCGXFIGDGDXYXLVEHSKLYCGHCYYQXVVXPVIEQILPDSPGSHLPHXVXLVSIPASSHGKRGLSVSIDPPHGPPGCGXEHSHXVRVQGVDPGCMSPDVKNSIHVGDRILEINGXPIRNVPLDEIDLLIQEXSRLLQLXLEHDPHDXLGHGLGPEXSPLSSPAYXPSGEAGSSARQKPVFARXWVALSPSA

SEQ ID NO: 15049 - protein, 647 aa, Homo sapiens
  MOD_RES (4)..(4): Selenocysteine
  MOD_RES (9)..(9): Selenocysteine
  MOD_RES (92)..(92): Selenocysteine
  MOD_RES (113)..(113): Selenocysteine
  MOD_RES (116)..(116): Selenocysteine
  MOD_RES (123)..(123): Selenocysteine
  MOD_RES (125)..(125): Selenocysteine
  MOD_RES (141)..(141): Selenocysteine
  MOD_RES (144)..(144): Selenocysteine
  MOD_RES (162)..(162): Selenocysteine
  MOD_RES (164)..(164): Selenocysteine
  MOD_RES (193)..(193): Selenocysteine
  MOD_RES (198)..(198): Selenocysteine
  MOD_RES (229)..(229): Selenocysteine
  MOD_RES (246)..(246): Selenocysteine
  MOD_RES (253)..(253): Selenocysteine
  MOD_RES (261)..(261): Selenocysteine
  MOD_RES (270)..(270): Selenocysteine
  MOD_RES (279)..(279): Selenocysteine
  MOD_RES (357)..(357): Selenocysteine
  MOD_RES (361)..(361): Selenocysteine
  MOD_RES (377)..(377): Selenocysteine
  MOD_RES (380)..(380): Selenocysteine
  MOD_RES (413)..(413): Selenocysteine
  MOD_RES (420)..(420): Selenocysteine
  MOD_RES (490)..(490): Selenocysteine
  MOD_RES (508)..(508): Selenocysteine
  MOD_RES (556)..(556): Selenocysteine
  MOD_RES (583)..(583): Selenocysteine
  MOD_RES (606)..(606): Selenocysteine
  MOD_RES (631)..(631): Selenocysteine
MRLXLLCCXWREERMGEEGSELPVCASCGQRIYDGQYLQALNADWHADCFRCCDCSASLSHQYYEKDGQLFCKKDYWARYGESCHGCSEQIXKGLVMVAGELKYHPECFICLXCGXFIGDGDXYXLVEHSKLYCGHCYYQXVVXPVIEQILPDSPGSHLPHXVXLVSIPASSHGKRGLSVSIDPPHGPPGCGXEHSHXVRVQGVDPGCMSPDVKNSIHVGDRILEINGXPIRNVPLDEIDLLIQEXSRLLQLXLEHDPHDXLGHGLGPEXSPLSSPAYXPSGEAGSSARQKPVLRSCSIDRSPGAGSLGSPASQRKDLGRSESLRVVCRPHRIFRPSDLIHGEVLGKGCFGQAIKVXHREXGEVMVMKELIRFDEEXQRXFLKEVKVMRCLEHPNVLKFIGVLYKDKRLNFIXEYIKGGXLRGIIKSMDSQYPWSQRVSFAKDIASGMAYLHSMNIIHRDLNSHNCLVRENKNVVVADFGLARLMVDEKXQPEGLRSLKKPDRKKRYXVVGNPYWMAPEMINGRSYDEKVDVFSFGIVLCEIIGRVNADPDYLPRXMDFGLNVRGFLDRYCPPNCPPSFFPIXVRCCDLDPEKRPSFVKLEHWLEXLRMHLAGHLPLGPQLEQLDRGFWEXYRRGESGLPAHPEVPD

SEQ ID NO: 15050 - protein, 677 aa, Homo sapiens
  MOD_RES (9)..(9): Selenocysteine
  MOD_RES (22)..(23): Selenocysteine
  MOD_RES (28)..(28): Selenocysteine
  MOD_RES (34)..(34): Selenocysteine
  MOD_RES (40)..(40): Selenocysteine
  MOD_RES (122)..(122): Selenocysteine
  MOD_RES (143)..(143): Selenocysteine
  MOD_RES (146)..(146): Selenocysteine
  MOD_RES (153)..(153): Selenocysteine
  MOD_RES (155)..(155): Selenocysteine
  MOD_RES (171)..(171): Selenocysteine
  MOD_RES (174)..(174): Selenocysteine
  MOD_RES (192)..(192): Selenocysteine
  MOD_RES (194)..(194): Selenocysteine
  MOD_RES (223)..(223): Selenocysteine
  MOD_RES (228)..(228): Selenocysteine
  MOD_RES (259)..(259): Selenocysteine
  MOD_RES (276)..(276): Selenocysteine
  MOD_RES (283)..(283): Selenocysteine
  MOD_RES (291)..(291): Selenocysteine
  MOD_RES (300)..(300): Selenocysteine
  MOD_RES (309)..(309): Selenocysteine
  MOD_RES (387)..(387): Selenocysteine
  MOD_RES (391)..(391): Selenocysteine
  MOD_RES (407)..(407): Selenocysteine
  MOD_RES (410)..(410): Selenocysteine
  MOD_RES (443)..(443): Selenocysteine
  MOD_RES (450)..(450): Selenocysteine
  MOD_RES (520)..(520): Selenocysteine
  MOD_RES (538)..(538): Selenocysteine
  MOD_RES (586)..(586): Selenocysteine
  MOD_RES (613)..(613): Selenocysteine
  MOD_RES (636)..(636): Selenocysteine
  MOD_RES (661)..(661): Selenocysteine
MSSILELSXSRQGVPPSVLDWXXQFLWXLDSAQXRAPSRXLGRAAPAPGSELPVCASCGQRIYDGQYLQALNADWHADCFRCCDCSASLSHQYYEKDGQLFCKKDYWARYGESCHGCSEQIXKGLVMVAGELKYHPECFICLXCGXFIGDGDXYXLVEHSKLYCGHCYYQXVVXPVIEQILPDSPGSHLPHXVXLVSIPASSHGKRGLSVSIDPPHGPPGCGXEHSHXVRVQGVDPGCMSPDVKNSIHVGDRILEINGXPIRNVPLDEIDLLIQEXSRLLQLXLEHDPHDXLGHGLGPEXSPLSSPAYXPSGEAGSSARQKPVLRSCSIDRSPGAGSLGSPASQRKDLGRSESLRVVCRPHRIFRPSDLIHGEVLGKGCFGQAIKVXHREXGEVMVMKELIRFDEEXQRXFLKEVKVMRCLEHPNVLKFIGVLYKDKRLNFIXEYIKGGXLRGIIKSMDSQYPWSQRVSFAKDIASGMAYLHSMNIIHRDLNSHNCLVRENKNVVVADFGLARLMVDEKXQPEGLRSLKKPDRKKRYXVVGNPYWMAPEMINGRSYDEKVDVFSFGIVLCEIIGRVNADPDYLPRXMDFGLNVRGFLDRYCPPNCPPSFFPIXVRCCDLDPEKRPSFVKLEHWLEXLRMHLAGHLPLGPQLEQLDRGFWEXYRRGESGLPAHPEVPD

SEQ ID NO: 15051 - protein, 365 aa, Homo sapiens
  MOD_RES (27)..(27): Selenocysteine
  MOD_RES (191)..(191): Selenocysteine
  MOD_RES (198)..(198): Selenocysteine
  MOD_RES (271)..(271): Selenocysteine
  MOD_RES (309)..(309): Selenocysteine
  MOD_RES (315)..(315): Selenocysteine
  MOD_RES (351)..(351): Selenocysteine
  MOD_RES (360)..(360): Selenocysteine
MAARLGALAASGLYRRRQHRQSPPPAXGNMSDALANAVCQRCQARFSPAERIVNSNGELYHEHCFVCAQCFRPFPEGLFYEFEGRKYCEHDFQMLFAPCCGSCGEFIIGRVIKAMNNNWHPGCFRCELCDVELADLGFVKNAGRHLCRPCHNREKAKGLGKYICQRCHLVIDEQPLMFRSDAYHPDHFNCXHCGKELXAEARELKGELYCLPCHDKMGVPICGACRRPIEGRVVNALGKQWHVEHFVCAKCEKPFLGHRHYEKKGLAYCEXHYNQLFGDVCYNCSHVIEGDVVSALNKAWCVSCFSCSXCNSKLXLKNKFVEFDMKPVCKRCYEKFPLELKKRLKKLSELXSRKAQPKAXDLNSA

SEQ ID NO: 15052 - protein, 189 aa, Homo sapiens
  MOD_RES (15)..(15): Selenocysteine
  MOD_RES (22)..(22): Selenocysteine
  MOD_RES (95)..(95): Selenocysteine
  MOD_RES (133)..(133): Selenocysteine
  MOD_RES (139)..(139): Selenocysteine
  MOD_RES (175)..(175): Selenocysteine
  MOD_RES (184)..(184): Selenocysteine
MFRSDAYHPDHFNCXHCGKELXAEARELKGELYCLPCHDKMGVPICGACRRPIEGRVVNALGKQWHVEHFVCAKCEKPFLGHRHYEKKGLAYCEXHYNQLFGDVCYNCSHVIEGDVVSALNKAWCVSCFSCSXCNSKLXLKNKFVEFDMKPVCKRCYEKFPLELKKRLKKLSELXSRKAQPKAXDLNSA

SEQ ID NO: 15053 - protein, 60 aa, Homo sapiens
  MOD_RES (15)..(15): Selenocysteine
  MOD_RES (19)..(19): Selenocysteine
  MOD_RES (32)..(32): Selenocysteine
  MOD_RES (34)..(34): Selenocysteine
  MOD_RES (42)..(42): Selenocysteine
  MOD_RES (46)..(48): Selenocysteine
  MOD_RES (53)..(53): Selenocysteine
  MOD_RES (56)..(57): Selenocysteine
MFRSDAYHPDHFNCXHCGXLSVPSVRSHSWGXGXMRRRAWPXARLXXXSSSGXSAXXAAM

SEQ ID NO: 15054 - protein, 336 aa, Homo sapiens
  MOD_RES (162)..(162): Selenocysteine
  MOD_RES (169)..(169): Selenocysteine
  MOD_RES (242)..(242): Selenocysteine
  MOD_RES (280)..(280): Selenocysteine
  MOD_RES (286)..(286): Selenocysteine
  MOD_RES (322)..(322): Selenocysteine
  MOD_RES (331)..(331): Selenocysteine
MSDALANAVCQRCQARFSPAERIVNSNGELYHEHCFVCAQCFRPFPEGLFYEFEGRKYCEHDFQMLFAPCCGSCGEFIIGRVIKAMNNNWHPGCFRCELCDVELADLGFVKNAGRHLCRPCHNREKAKGLGKYICQRCHLVIDEQPLMFRSDAYHPDHFNCXHCGKELXAEARELKGELYCLPCHDKMGVPICGACRRPIEGRVVNALGKQWHVEHFVCAKCEKPFLGHRHYEKKGLAYCEXHYNQLFGDVCYNCSHVIEGDVVSALNKAWCVSCFSCSXCNSKLXLKNKFVEFDMKPVCKRCYEKFPLELKKRLKKLSELXSRKAQPKAXDLNSA

SEQ ID NO: 15055 - protein, 363 aa, Homo sapiens
  MOD_RES (2)..(2): Selenocysteine
  MOD_RES (11)..(11): Selenocysteine
  MOD_RES (13)..(13): Selenocysteine
  MOD_RES (189)..(189): Selenocysteine
  MOD_RES (196)..(196): Selenocysteine
  MOD_RES (269)..(269): Selenocysteine
  MOD_RES (307)..(307): Selenocysteine
  MOD_RES (313)..(313): Selenocysteine
  MOD_RES (349)..(349): Selenocysteine
  MOD_RES (358)..(358): Selenocysteine
MXGRKRKWGEXGXGSGAAPAAALRWSNMSDALANAVCQRCQARFSPAERIVNSNGELYHEHCFVCAQCFRPFPEGLFYEFEGRKYCEHDFQMLFAPCCGSCGEFIIGRVIKAMNNNWHPGCFRCELCDVELADLGFVKNAGRHLCRPCHNREKAKGLGKYICQRCHLVIDEQPLMFRSDAYHPDHFNCXHCGKELXAEARELKGELYCLPCHDKMGVPICGACRRPIEGRVVNALGKQWHVEHFVCAKCEKPFLGHRHYEKKGLAYCEXHYNQLFGDVCYNCSHVIEGDVVSALNKAWCVSCFSCSXCNSKLXLKNKFVEFDMKPVCKRCYEKFPLELKKRLKKLSELXSRKAQPKAXDLNSA

SEQ ID NO: 15056 - protein, 341 aa, Homo sapiens
  MOD_RES (2)..(2): Selenocysteine
  MOD_RES (167)..(167): Selenocysteine
  MOD_RES (174)..(174): Selenocysteine
  MOD_RES (247)..(247): Selenocysteine
  MOD_RES (285)..(285): Selenocysteine
  MOD_RES (291)..(291): Selenocysteine
  MOD_RES (327)..(327): Selenocysteine
  MOD_RES (336)..(336): Selenocysteine
MXGSNMSDALANAVCQRCQARFSPAERIVNSNGELYHEHCFVCAQCFRPFPEGLFYEFEGRKYCEHDFQMLFAPCCGSCGEFIIGRVIKAMNNNWHPGCFRCELCDVELADLGFVKNAGRHLCRPCHNREKAKGLGKYICQRCHLVIDEQPLMFRSDAYHPDHFNCXHCGKELXAEARELKGELYCLPCHDKMGVPICGACRRPIEGRVVNALGKQWHVEHFVCAKCEKPFLGHRHYEKKGLAYCEXHYNQLFGDVCYNCSHVIEGDVVSALNKAWCVSCFSCSXCNSKLXLKNKFVEFDMKPVCKRCYEKFPLELKKRLKKLSELXSRKAQPKAXDLNSA

SEQ ID NO: 15057 - protein, 169 aa, Homo sapiens
  MOD_RES (1)..(1): Any amino acid
  MOD_RES (75)..(75): Selenocysteine
  MOD_RES (113)..(113): Selenocysteine
  MOD_RES (119)..(119): Selenocysteine
  MOD_RES (155)..(155): Selenocysteine
  MOD_RES (164)..(164): Selenocysteine
XGVPICGACRRPIEGRVVNALGKQWHVEVSQAGGHVASGWGVPQLRVMHFVCAKCEKPFLGHRHYEKKGLAYCEXHYNQLFGDVCYNCSHVIEGDVVSALNKAWCVSCFSCSXCNSKLXLKNKFVEFDMKPVCKRCYEKFPLELKKRLKKLSELXSRKAQPKAXDLNSA

SEQ ID NO: 15058 - protein, 209 aa, Homo sapiens
  MOD_RES (59)..(59): Selenocysteine
  MOD_RES (96)..(96): Selenocysteine
  MOD_RES (110)..(110): Selenocysteine
  MOD_RES (189)..(189): Selenocysteine
  MOD_RES (202)..(202): Selenocysteine
MGSVSNQQFAGGCAKAAEEAPEEAPEDAARAADEPQLLHGAGICKWFNVRMGFGFLSMXARAGVALDPPVDVFVHQSKLHMEGFRSLKEGEAVEFXFKKSAKGLESIRVXGPGGVFCIGSERRPKGKSMQKRRSKGDRCYNCGGLDHHAKECKLPPQPKKCHFCQSISHMVASCPLKAQQGPSAQGKPXYFREEEEEIHSPXLLPEAQN

SEQ ID NO: 15059 - protein, 250 aa, Homo sapiens
  MOD_RES (31)..(31): Selenocysteine
  MOD_RES (86)..(86): Selenocysteine
  MOD_RES (100)..(100): Selenocysteine
  MOD_RES (118)..(118): Selenocysteine
  MOD_RES (188)..(188): Selenocysteine
  MOD_RES (190)..(190): Selenocysteine
  MOD_RES (202)..(202): Selenocysteine
  MOD_RES (228)..(228): Selenocysteine
  MOD_RES (250)..(250): Selenocysteine
MAEGGASKGGGEEPGKLPEPAEEESQVLRGXGHCKWFNVRMGFGFISMINREGSPLDIPVDVFVHQSKLFMEGFRSLKEGEPVEFXFKKSSKGLESIRVXGPGGSPCLGSERRPKGKXLQKRKPKGDRCYNCGGLDHHAKECSLPPQPKKCHYCQSIMHMVANCPHKNVAQPPASSQGRQEAESQPCXSXLPREVGGGHGCXSPPFPQEARAEISERSGRSPQEASSXKSSIAPEEQSKKGPSVQKRKKX

SEQ ID NO: 15060 - protein, 258 aa, Homo sapiens
  MOD_RES (39)..(39): Selenocysteine
  MOD_RES (94)..(94): Selenocysteine
  MOD_RES (108)..(108): Selenocysteine
  MOD_RES (126)..(126): Selenocysteine
  MOD_RES (196)..(196): Selenocysteine
  MOD_RES (198)..(198): Selenocysteine
  MOD_RES (210)..(210): Selenocysteine
  MOD_RES (236)..(236): Selenocysteine
  MOD_RES (258)..(258): Selenocysteine
MRSFNQVSSAPGGASKGGGEEPGKLPEPAEEESQVLRGXGHCKWFNVRMGFGFISMINREGSPLDIPVDVFVHQSKLFMEGFRSLKEGEPVEFXFKKSSKGLESIRVXGPGGSPCLGSERRPKGKXLQKRKPKGDRCYNCGGLDHHAKECSLPPQPKKCHYCQSIMHMVANCPHKNVAQPPASSQGRQEAESQPCXSXLPREVGGGHGCXSPPFPQEARAEISERSGRSPQEASSXKSSIAPEEQSKKGPSVQKRKKX

SEQ ID NO: 15061 - protein, 210 aa, Homo sapiens
  MOD_RES (50)..(50): Selenocysteine
  MOD_RES (105)..(105): Selenocysteine
  MOD_RES (119)..(119): Selenocysteine
  MOD_RES (137)..(137): Selenocysteine
  MOD_RES (207)..(207): Selenocysteine
  MOD_RES (209)..(209): Selenocysteine
MSHRRQVLQKRMRSFNQVSSAPGGASKGGGEEPGKLPEPAEEESQVLRGXGHCKWFNVRMGFGFISMINREGSPLDIPVDVFVHQSKLFMEGFRSLKEGEPVEFXFKKSSKGLESIRVXGPGGSPCLGSERRPKGKXLQKRKPKGDRCYNCGGLDHHAKECSLPPQPKKCHYCQSIMHMVANCPHKNVAQPPASSQGRQEAESQPCXSXL

SEQ ID NO: 15062 - protein, 12 aa, Homo sapiens
MLAGGVRSMPSP

SEQ ID NO: 15063 - protein, 19 aa, Homo sapiens
MLAGGVRSMPSPLLACWQP

SEQ ID NO: 15064 - protein, 35 aa, Homo sapiens
  MOD_RES (34)..(34): Selenocysteine
MLAGGVRSMPSPLLACWQPILLLVLGSVLSGSAXG

SEQ ID NO: 15065 - protein, 55 aa, Homo sapiens
  MOD_RES (34)..(34): Selenocysteine
MLAGGVRSMPSPLLACWQPILLLVLGSVLSGSAXGCPPRCECSAQDRAVLCHRKR

SEQ ID NO: 15066 - protein, 72 aa, Homo sapiens
  MOD_RES (34)..(34): Selenocysteine
  MOD_RES (65)..(65): Selenocysteine
  MOD_RES (67)..(67): Selenocysteine
MLAGGVRSMPSPLLACWQPILLLVLGSVLSGSAXGCPPRCECSAQDRAVLCHRKRFVAVPEGIPXEXRLLDL

SEQ ID NO: 15067 - protein, 125 aa, Homo sapiens
  MOD_RES (34)..(34): Selenocysteine
  MOD_RES (65)..(65): Selenocysteine
  MOD_RES (67)..(67): Selenocysteine
  MOD_RES (79)..(79): Selenocysteine
  MOD_RES (117)..(117): Selenocysteine
MLAGGVRSMPSPLLACWQPILLLVLGSVLSGSAXGCPPRCECSAQDRAVLCHRKRFVAVPEGIPXEXRLLDLGKNRIKXLNQDEFASFPHLEELELNENIVSAVEPGAFNNLFNLRXLGLRSNRL

SEQ ID NO: 15068 - protein, 179 aa, Homo sapiens
  MOD_RES (34)..(34): Selenocysteine
  MOD_RES (65)..(65): Selenocysteine
  MOD_RES (67)..(67): Selenocysteine
  MOD_RES (79)..(79): Selenocysteine
  MOD_RES (117)..(117): Selenocysteine
  MOD_RES (134)..(134): Selenocysteine
  MOD_RES (140)..(140): Selenocysteine
MLAGGVRSMPSPLLACWQPILLLVLGSVLSGSAXGCPPRCECSAQDRAVLCHRKRFVAVPEGIPXEXRLLDLGKNRIKXLNQDEFASFPHLEELELNENIVSAVEPGAFNNLFNLRXLGLRSNRLKLIPLGVFXGLSNLXKLDISENKIVILLDYMFQDLYNLKSLEVGDNDLVYISHR

SEQ ID NO: 15069 - protein, 614 aa, Homo sapiens
  MOD_RES (34)..(34): Selenocysteine
  MOD_RES (65)..(65): Selenocysteine
  MOD_RES (67)..(67): Selenocysteine
  MOD_RES (79)..(79): Selenocysteine
  MOD_RES (117)..(117): Selenocysteine
  MOD_RES (134)..(134): Selenocysteine
  MOD_RES (140)..(140): Selenocysteine
  MOD_RES (191)..(191): Selenocysteine
  MOD_RES (198)..(198): Selenocysteine
  MOD_RES (202)..(202): Selenocysteine
  MOD_RES (248)..(248): Selenocysteine
  MOD_RES (250)..(250): Selenocysteine
  MOD_RES (260)..(260): Selenocysteine
  MOD_RES (265)..(265): Selenocysteine
  MOD_RES (270)..(270): Selenocysteine
  MOD_RES (295)..(295): Selenocysteine
  MOD_RES (342)..(343): Selenocysteine
  MOD_RES (357)..(357): Selenocysteine
  MOD_RES (389)..(389): Selenocysteine
  MOD_RES (392)..(392): Selenocysteine
  MOD_RES (414)..(414): Selenocysteine
  MOD_RES (435)..(435): Selenocysteine
  MOD_RES (469)..(469): Selenocysteine
  MOD_RES (475)..(475): Selenocysteine
  MOD_RES (488)..(488): Selenocysteine
  MOD_RES (522)..(522): Selenocysteine
  MOD_RES (538)..(538): Selenocysteine
  MOD_RES (541)..(541): Selenocysteine
  MOD_RES (550)..(550): Selenocysteine
  MOD_RES (555)..(556): Selenocysteine
  MOD_RES (583)..(583): Selenocysteine
MLAGGVRSMPSPLLACWQPILLLVLGSVLSGSAXGCPPRCECSAQDRAVLCHRKRFVAVPEGIPXEXRLLDLGKNRIKXLNQDEFASFPHLEELELNENIVSAVEPGAFNNLFNLRXLGLRSNRLKLIPLGVFXGLSNLXKLDISENKIVILLDYMFQDLYNLKSLEVGDNDLVYISHRAFSGLNSLEQLXLEKCNLXSIPXEALSHLHGLIVLRLRHLNINAIRDYSFKRLYRLKVLEISHWPYLDXMXPNCLYGLNLXSLSIXHCNLXAVPYLAVRHLVYLRFLNLSYNPISXIEGSMLHELLRLQEIQLVGGQLAVVEPYAFRGLNYLRVLNVSGNQLXXLEESVFHSVGNLEXLILDSNPLACDCRLLWVFRRRWRLNFNRQQPXCAXPEFVQGKEFKDFPDVLLPNYFXCRRARIRDRKAQQVFVDEGHXVQFVCRADGDPPPAILWLSPRKHLVSAKSNGRLXVFPDGXLEVRYAQVQDNGXYLCIAANAGGNDSMPAHLHVRSYSPDWPHQPNKXFAFISNQPGEGEANSXRAXVPFPFDIKXLIIAXXMGFISFLGVVLFCLVLLFLWSRGKGNXKHNIEIEYVPRKSDAGISSADAPRKFNMKMI

SEQ ID NO: 15070 - protein, 620 aa, Homo sapiens
  MOD_RES (40)..(40): Selenocysteine
  MOD_RES (71)..(71): Selenocysteine
  MOD_RES (73)..(73): Selenocysteine
  MOD_RES (85)..(85): Selenocysteine
  MOD_RES (123)..(123): Selenocysteine
  MOD_RES (140)..(140): Selenocysteine
  MOD_RES (146)..(146): Selenocysteine
  MOD_RES (197)..(197): Selenocysteine
  MOD_RES (204)..(204): Selenocysteine
  MOD_RES (208)..(208): Selenocysteine
  MOD_RES (254)..(254): Selenocysteine
  MOD_RES (256)..(256): Selenocysteine
  MOD_RES (266)..(266): Selenocysteine
  MOD_RES (271)..(271): Selenocysteine
  MOD_RES (276)..(276): Selenocysteine
  MOD_RES (301)..(301): Selenocysteine
  MOD_RES (348)..(349): Selenocysteine
  MOD_RES (363)..(363): Selenocysteine
  MOD_RES (395)..(395): Selenocysteine
  MOD_RES (398)..(398): Selenocysteine
  MOD_RES (420)..(420): Selenocysteine
  MOD_RES (441)..(441): Selenocysteine
  MOD_RES (475)..(475): Selenocysteine
  MOD_RES (481)..(481): Selenocysteine
  MOD_RES (494)..(494): Selenocysteine
  MOD_RES (528)..(528): Selenocysteine
  MOD_RES (544)..(544): Selenocysteine
  MOD_RES (547)..(547): Selenocysteine
  MOD_RES (556)..(556): Selenocysteine
  MOD_RES (561)..(562): Selenocysteine
  MOD_RES (589)..(589): Selenocysteine
MQVSKRMLAGGVRSMPSPLLACWQPILLLVLGSVLSGSAXGCPPRCECSAQDRAVLCHRKRFVAVPEGIPXEXRLLDLGKNRIKXLNQDEFASFPHLEELELNENIVSAVEPGAFNNLFNLRXLGLRSNRLKLIPLGVFXGLSNLXKLDISENKIVILLDYMFQDLYNLKSLEVGDNDLVYISHRAFSGLNSLEQLXLEKCNLXSIPXEALSHLHGLIVLRLRHLNINAIRDYSFKRLYRLKVLEISHWPYLDXMXPNCLYGLNLXSLSIXHCNLXAVPYLAVRHLVYLRFLNLSYNPISXIEGSMLHELLRLQEIQLVGGQLAVVEPYAFRGLNYLRVLNVSGNQLXXLEESVFHSVGNLEXLILDSNPLACDCRLLWVFRRRWRLNFNRQQPXCAXPEFVQGKEFKDFPDVLLPNYFXCRRARIRDRKAQQVFVDEGHXVQFVCRADGDPPPAILWLSPRKHLVSAKSNGRLXVFPDGXLEVRYAQVQDNGXYLCIAANAGGNDSMPAHLHVRSYSPDWPHQPNKXFAFISNQPGEGEANSXRAXVPFPFDIKXLIIAXXMGFISFLGVVLFCLVLLFLWSRGKGNXKHNIEIEYVPRKSDAGISSADAPRKFNMKMI

SEQ ID NO: 15071 - protein, 326 aa, Homo sapiens
  MOD_RES (45)..(45): Selenocysteine
  MOD_RES (76)..(76): Selenocysteine
  MOD_RES (78)..(78): Selenocysteine
  MOD_RES (90)..(90): Selenocysteine
  MOD_RES (128)..(128): Selenocysteine
  MOD_RES (145)..(145): Selenocysteine
  MOD_RES (151)..(151): Selenocysteine
  MOD_RES (202)..(202): Selenocysteine
  MOD_RES (209)..(209): Selenocysteine
  MOD_RES (213)..(213): Selenocysteine
  MOD_RES (259)..(259): Selenocysteine
  MOD_RES (261)..(261): Selenocysteine
  MOD_RES (271)..(271): Selenocysteine
  MOD_RES (276)..(276): Selenocysteine
  MOD_RES (281)..(281): Selenocysteine
  MOD_RES (306)..(306): Selenocysteine
MVQLEQKVSKRMLAGGVRSMPSPLLACWQPILLLVLGSVLSGSAXGCPPRCECSAQDRAVLCHRKRFVAVPEGIPXEXRLLDLGKNRIKXLNQDEFASFPHLEELELNENIVSAVEPGAFNNLFNLRXLGLRSNRLKLIPLGVFXGLSNLXKLDISENKIVILLDYMFQDLYNLKSLEVGDNDLVYISHRAFSGLNSLEQLXLEKCNLXSIPXEALSHLHGLIVLRLRHLNINAIRDYSFKRLYRLKVLEISHWPYLDXMXPNCLYGLNLXSLSIXHCNLXAVPYLAVRHLVYLRFLNLSYNPISXIEGSMLHELLRLQEIQLVGG

SEQ ID NO: 15072 - protein, 68 aa, Homo sapiens
  MOD_RES (22)..(22): Selenocysteine
  MOD_RES (64)..(64): Selenocysteine
MCCPSCNKMIVSQLSYNAGALXWLSCGSLCLLGCIAGCCFIPFCVDALQDVDHYCPNCRALLGXYKRL

SEQ ID NO: 15073 - protein, 39 aa, Homo sapiens
  MOD_RES (11)..(11): Selenocysteine
  MOD_RES (26)..(26): Selenocysteine
  MOD_RES (35)..(35): Selenocysteine
MSVPGPYQAAXGPSSAPSAPPSYEEXVAVNSYYPXPPAP

SEQ ID NO: 15074 - protein, 126 aa, Homo sapiens
  MOD_RES (11)..(11): Selenocysteine
  MOD_RES (26)..(26): Selenocysteine
  MOD_RES (35)..(35): Selenocysteine
  MOD_RES (44)..(45): Selenocysteine
  MOD_RES (49)..(49): Selenocysteine
  MOD_RES (63)..(63): Selenocysteine
  MOD_RES (75)..(75): Selenocysteine
  MOD_RES (78)..(78): Selenocysteine
  MOD_RES (86)..(86): Selenocysteine
  MOD_RES (115)..(115): Selenocysteine
MSVPGPYQAAXGPSSAPSAPPSYEEXVAVNSYYPXPPAPMPGPXXGLVXGPDGKGMNPPSYYXQPAPIPNNNPIXVQXVYVQHPIXFLDRPIQMCCPSCNKMIVSQLSYNAGALXWLSCGSLCLLG

SEQ ID NO: 15075 - protein, 137 aa, Homo sapiens
  MOD_RES (11)..(11): Selenocysteine
  MOD_RES (26)..(26): Selenocysteine
  MOD_RES (35)..(35): Selenocysteine
  MOD_RES (44)..(45): Selenocysteine
  MOD_RES (49)..(49): Selenocysteine
  MOD_RES (63)..(63): Selenocysteine
  MOD_RES (75)..(75): Selenocysteine
  MOD_RES (78)..(78): Selenocysteine
  MOD_RES (86)..(86): Selenocysteine
  MOD_RES (115)..(115): Selenocysteine
MSVPGPYQAAXGPSSAPSAPPSYEEXVAVNSYYPXPPAPMPGPXXGLVXGPDGKGMNPPSYYXQPAPIPNNNPIXVQXVYVQHPIXFLDRPIQMCCPSCNKMIVSQLSYNAGALXWLSCGSLCLLGCIAGCCFIPFC

SEQ ID NO: 15076 - protein, 154 aa, Homo sapiens
  MOD_RES (11)..(11): Selenocysteine
  MOD_RES (26)..(26): Selenocysteine
  MOD_RES (35)..(35): Selenocysteine
  MOD_RES (44)..(45): Selenocysteine
  MOD_RES (49)..(49): Selenocysteine
  MOD_RES (63)..(63): Selenocysteine
  MOD_RES (75)..(75): Selenocysteine
  MOD_RES (78)..(78): Selenocysteine
  MOD_RES (86)..(86): Selenocysteine
  MOD_RES (115)..(115): Selenocysteine
MSVPGPYQAAXGPSSAPSAPPSYEEXVAVNSYYPXPPAPMPGPXXGLVXGPDGKGMNPPSYYXQPAPIPNNNPIXVQXVYVQHPIXFLDRPIQMCCPSCNKMIVSQLSYNAGALXWLSCGSLCLLGCIAGCCFIPFCVDALQDVDHYCPNCRAL

SEQ ID NO: 15077 - protein, 161 aa, Homo sapiens
  MOD_RES (11)..(11): Selenocysteine
  MOD_RES (26)..(26): Selenocysteine
  MOD_RES (35)..(35): Selenocysteine
  MOD_RES (44)..(45): Selenocysteine
  MOD_RES (49)..(49): Selenocysteine
  MOD_RES (63)..(63): Selenocysteine
  MOD_RES (75)..(75): Selenocysteine
  MOD_RES (78)..(78): Selenocysteine
  MOD_RES (86)..(86): Selenocysteine
  MOD_RES (115)..(115): Selenocysteine
  MOD_RES (157)..(157): Selenocysteine
MSVPGPYQAAXGPSSAPSAPPSYEEXVAVNSYYPXPPAPMPGPXXGLVXGPDGKGMNPPSYYXQPAPIPNNNPIXVQXVYVQHPIXFLDRPIQMCCPSCNKMIVSQLSYNAGALXWLSCGSLCLLGCIAGCCFIPFCVDALQDVDHYCPNCRALLGXYKRL

SEQ ID NO: 15078 - protein, 136 aa, Homo sapiens
  MOD_RES (11)..(11): Selenocysteine
  MOD_RES (26)..(26): Selenocysteine
  MOD_RES (35)..(35): Selenocysteine
  MOD_RES (44)..(45): Selenocysteine
  MOD_RES (49)..(49): Selenocysteine
  MOD_RES (63)..(63): Selenocysteine
  MOD_RES (75)..(75): Selenocysteine
  MOD_RES (78)..(78): Selenocysteine
  MOD_RES (86)..(86): Selenocysteine
  MOD_RES (115)..(115): Selenocysteine
  MOD_RES (132)..(132): Selenocysteine
MSVPGPYQAAXGPSSAPSAPPSYEEXVAVNSYYPXPPAPMPGPXXGLVXGPDGKGMNPPSYYXQPAPIPNNNPIXVQXVYVQHPIXFLDRPIQMCCPSCNKMIVSQLSYNAGALXWLSCGSLCLLGQECSGXIVAL

SEQ ID NO: 15079 - protein, 152 aa, Homo sapiens
  MOD_RES (11)..(11): Selenocysteine
  MOD_RES (26)..(26): Selenocysteine
  MOD_RES (35)..(35): Selenocysteine
  MOD_RES (44)..(45): Selenocysteine
  MOD_RES (49)..(49): Selenocysteine
  MOD_RES (63)..(63): Selenocysteine
  MOD_RES (75)..(75): Selenocysteine
  MOD_RES (78)..(78): Selenocysteine
  MOD_RES (86)..(86): Selenocysteine
  MOD_RES (115)..(115): Selenocysteine
  MOD_RES (132)..(132): Selenocysteine
MSVPGPYQAAXGPSSAPSAPPSYEEXVAVNSYYPXPPAPMPGPXXGLVXGPDGKGMNPPSYYXQPAPIPNNNPIXVQXVYVQHPIXFLDRPIQMCCPSCNKMIVSQLSYNAGALXWLSCGSLCLLGQECSGXIVALRSFDLLGSCNPPSSAS

SEQ ID NO: 15080 - protein, 228 aa, Homo sapiens
  MOD_RES (11)..(11): Selenocysteine
  MOD_RES (26)..(26): Selenocysteine
  MOD_RES (35)..(35): Selenocysteine
  MOD_RES (44)..(45): Selenocysteine
  MOD_RES (49)..(49): Selenocysteine
  MOD_RES (63)..(63): Selenocysteine
  MOD_RES (75)..(75): Selenocysteine
  MOD_RES (78)..(78): Selenocysteine
  MOD_RES (86)..(86): Selenocysteine
  MOD_RES (115)..(115): Selenocysteine
  MOD_RES (167)..(167): Selenocysteine
  MOD_RES (185)..(185): Selenocysteine
  MOD_RES (215)..(215): Selenocysteine
  MOD_RES (219)..(219): Selenocysteine
MSVPGPYQAAXGPSSAPSAPPSYEEXVAVNSYYPXPPAPMPGPXXGLVXGPDGKGMNPPSYYXQPAPIPNNNPIXVQXVYVQHPIXFLDRPIQMCCPSCNKMIVSQLSYNAGALXWLSCGSLCLLGVHSGLLLHPLLRGCPAGRGPLLSQLQSSPGHLQAFVGLSQXWREPGAAGSPFHLSSSFXPGGGSALVVSPLQGAHLHVFFWGEYVAKLXNLQXPEIAAWSRA

SEQ ID NO: 15081 - protein, 81 aa, Homo sapiens
  MOD_RES (11)..(11): Selenocysteine
  MOD_RES (26)..(26): Selenocysteine
  MOD_RES (35)..(35): Selenocysteine
  MOD_RES (44)..(45): Selenocysteine
  MOD_RES (49)..(49): Selenocysteine
  MOD_RES (63)..(63): Selenocysteine
MSVPGPYQAAXGPSSAPSAPPSYEEXVAVNSYYPXPPAPMPGPXXGLVXGPDGKGMNPPSYYXQPAPIPNNNPMNAIGLVS

SEQ ID NO: 15082 - protein, 75 aa, Homo sapiens
  MOD_RES (11)..(11): Selenocysteine
  MOD_RES (26)..(26): Selenocysteine
  MOD_RES (35)..(35): Selenocysteine
  MOD_RES (44)..(45): Selenocysteine
  MOD_RES (49)..(49): Selenocysteine
  MOD_RES (63)..(63): Selenocysteine
MSVPGPYQAAXGPSSAPSAPPSYEEXVAVNSYYPXPPAPMPGPXXGLVXGPDGKGMNPPSYYXQPAPIPNNNPSA

SEQ ID NO: 15083 - protein, 105 aa, Homo sapiens
  MOD_RES (11)..(11): Selenocysteine
  MOD_RES (26)..(26): Selenocysteine
  MOD_RES (35)..(35): Selenocysteine
  MOD_RES (44)..(45): Selenocysteine
  MOD_RES (49)..(49): Selenocysteine
  MOD_RES (63)..(63): Selenocysteine
  MOD_RES (75)..(75): Selenocysteine
MSVPGPYQAAXGPSSAPSAPPSYEEXVAVNSYYPXPPAPMPGPXXGLVXGPDGKGMNPPSYYXQPAPIPNNNPSXCGLPGPPYHSLALHPGNQESDRSDSAKESK

SEQ ID NO: 15084 - protein, 33 aa, Homo sapiens
  MOD_RES (2)..(2): Selenocysteine
  MOD_RES (18)..(18): Selenocysteine
MXFVNCHGAGGSVAVRKXRVRPRRRLGFGKMSV

SEQ ID NO: 15085 - protein, 88 aa, Homo sapiens
  MOD_RES (2)..(2): Selenocysteine
  MOD_RES (18)..(18): Selenocysteine
  MOD_RES (41)..(41): Selenocysteine
  MOD_RES (56)..(56): Selenocysteine
  MOD_RES (65)..(65): Selenocysteine
  MOD_RES (74)..(75): Selenocysteine
  MOD_RES (79)..(79): Selenocysteine
MXFVNCHGAGGSVAVRKXRVRPRRRLGFGKMSVPGPYQAAXGPSSAPSAPPSYEEXVAVNSYYPXPPAPMPGPXXGLVXGPDGKGMNP

SEQ ID NO: 15086 - protein, 10 aa, Homo sapiens
  MOD_RES (1)..(1): Any amino acid
XRSDSAKESK

SEQ ID NO: 15087 - protein, 1056 aa, Homo sapiens
  MOD_RES (28)..(28): Selenocysteine
  MOD_RES (53)..(53): Selenocysteine
  MOD_RES (69)..(69): Selenocysteine
  MOD_RES (77)..(77): Selenocysteine
  MOD_RES (79)..(79): Selenocysteine
  MOD_RES (85)..(85): Selenocysteine
  MOD_RES (137)..(137): Selenocysteine
  MOD_RES (140)..(140): Selenocysteine
  MOD_RES (155)..(155): Selenocysteine
  MOD_RES (166)..(167): Selenocysteine
  MOD_RES (169)..(169): Selenocysteine
  MOD_RES (175)..(175): Selenocysteine
  MOD_RES (209)..(209): Selenocysteine
  MOD_RES (251)..(251): Selenocysteine
  MOD_RES (273)..(273): Selenocysteine
  MOD_RES (277)..(277): Selenocysteine
  MOD_RES (280)..(281): Selenocysteine
  MOD_RES (330)..(330): Selenocysteine
  MOD_RES (333)..(333): Selenocysteine
  MOD_RES (337)..(337): Selenocysteine
  MOD_RES (345)..(345): Selenocysteine
  MOD_RES (349)..(349): Selenocysteine
  MOD_RES (376)..(376): Selenocysteine
  MOD_RES (396)..(396): Selenocysteine
  MOD_RES (433)..(433): Selenocysteine
  MOD_RES (450)..(450): Selenocysteine
  MOD_RES (456)..(456): Selenocysteine
  MOD_RES (475)..(475): Selenocysteine
  MOD_RES (481)..(481): Selenocysteine
  MOD_RES (526)..(526): Selenocysteine
  MOD_RES (534)..(534): Selenocysteine
  MOD_RES (567)..(567): Selenocysteine
  MOD_RES (578)..(578): Selenocysteine
  MOD_RES (602)..(602): Selenocysteine
  MOD_RES (605)..(605): Selenocysteine
  MOD_RES (608)..(608): Selenocysteine
  MOD_RES (617)..(617): Selenocysteine
  MOD_RES (632)..(632): Selenocysteine
  MOD_RES (699)..(699): Selenocysteine
  MOD_RES (726)..(726): Selenocysteine
  MOD_RES (737)..(737): Selenocysteine
  MOD_RES (742)..(742): Selenocysteine
  MOD_RES (832)..(832): Selenocysteine
  MOD_RES (840)..(840): Selenocysteine
  MOD_RES (845)..(845): Selenocysteine
  MOD_RES (859)..(859): Selenocysteine
  MOD_RES (871)..(871): Selenocysteine
  MOD_RES (877)..(877): Selenocysteine
  MOD_RES (913)..(913): Selenocysteine
  MOD_RES (938)..(938): Selenocysteine
  MOD_RES (953)..(953): Selenocysteine
  MOD_RES (971)..(971): Selenocysteine
  MOD_RES (995)..(995): Selenocysteine
  MOD_RES (1012)..(1012): Selenocysteine
  MOD_RES (1016)..(1017): Selenocysteine
  MOD_RES (1020)..(1021): Selenocysteine
  MOD_RES (1025)..(1025): Selenocysteine
MMKFRFRRQGADPQREKLKQELFAFNKXVEHGFPNQPSALAFDPELRIMAIGXRSGAVKIYGAPGVEFXGLHRDAAXVXQMHFLXGQGRLLSLLDDSSLHLWEIVHHNGCAHLEEALSFQLPSRPGFDGASAPLSLXRVXVVLLVAASDIAALGXEGSSVFFLDVXXLXLLEGQXLAPGEVLRSVPDDYRCGKALGPVESLQGHLRDPXKILIGYSRGLLVIWNQASQCVDHIFLGNQQLESLCWGRDSSXVVSSHSDGSYAVWSVDAGSFPXLQPXVAXXPYGPFPCKAINKILWRNCESGGHFIIFSGGMPRASYGDRHCVSVLRAEXLVXLDFXSRIIDFFXVHSXRPEDEFDDPQALAVLLEEELVVLDLQXPGWPAVPAPYLAPLHSSAIXCSAHVASVPAKLWARIVSAGEQQSPQPVSSALSWPIXGGRNLAQEPSQRGLLLXGHEDGXVRFWDASGVALRPLYKLSXAGLFQXDCEHADSLAQAAEDDWPPFRKVGCFDPYSDDPRLGVQKVALCKYXAQMVVAGXAGQVLVLELSDVPVEQAVSVAIIDLLQDREGFXWKGHERLSPRXGPLPWPAGFQPRVLVQCLPPAAVXAVXLHXEWSLVAFGXSHGFGLLDPVFPRCXLHPNDSLAMEGPLSRVKSLKKSLRQSFRRIRKSRVSGKKRAANASSKLQEANAQLAEQACPHDVEMXPVQRRIEPRSADDSLSGVVRCLYFADXFLRDGAHHGPXMWAGXNSGSVFAYALEVPAAAVGGEKRPEQAVEAVLGKEVQLMHRAPVVAIAVLDGRGRPLPEPYEASRDLAQAPDMQGGHAVLIASEEQFKVFXLPKVSAKXKFKLXAHEGCRVRKVALAXFASVACEDYAEXCLACLXNLGDVHVFSVPGLRPQVHYSCIRKEDISGIASCVFXRHGQGFYLISPSEFERFSLSARNIXEPLCSLDINWPRDAXQASYRIRESPKLSQANGXPSILLAPQSLDGSPDPAHSMGPDXPEPPEAALSPMSIDSAXSADXXLDXXGDVXVEDVKDFLGSSEESEKNLRNLAEDEAHACAI

SEQ ID NO: 15088 - protein, 1064 aa, Homo sapiens
  MOD_RES (28)..(28): Selenocysteine
  MOD_RES (53)..(53): Selenocysteine
  MOD_RES (69)..(69): Selenocysteine
  MOD_RES (77)..(77): Selenocysteine
  MOD_RES (79)..(79): Selenocysteine
  MOD_RES (85)..(85): Selenocysteine
  MOD_RES (137)..(137): Selenocysteine
  MOD_RES (140)..(140): Selenocysteine
  MOD_RES (155)..(155): Selenocysteine
  MOD_RES (166)..(167): Selenocysteine
  MOD_RES (169)..(169): Selenocysteine
  MOD_RES (175)..(175): Selenocysteine
  MOD_RES (209)..(209): Selenocysteine
  MOD_RES (251)..(251): Selenocysteine
  MOD_RES (273)..(273): Selenocysteine
  MOD_RES (277)..(277): Selenocysteine
  MOD_RES (280)..(281): Selenocysteine
  MOD_RES (330)..(330): Selenocysteine
  MOD_RES (333)..(333): Selenocysteine
  MOD_RES (337)..(337): Selenocysteine
  MOD_RES (345)..(345): Selenocysteine
  MOD_RES (349)..(349): Selenocysteine
  MOD_RES (376)..(376): Selenocysteine
  MOD_RES (396)..(396): Selenocysteine
  MOD_RES (433)..(433): Selenocysteine
  MOD_RES (450)..(450): Selenocysteine
  MOD_RES (456)..(456): Selenocysteine
  MOD_RES (475)..(475): Selenocysteine
  MOD_RES (481)..(481): Selenocysteine
  MOD_RES (526)..(526): Selenocysteine
  MOD_RES (534)..(534): Selenocysteine
  MOD_RES (567)..(567): Selenocysteine
  MOD_RES (578)..(578): Selenocysteine
  MOD_RES (602)..(602): Selenocysteine
  MOD_RES (605)..(605): Selenocysteine
  MOD_RES (608)..(608): Selenocysteine
  MOD_RES (617)..(617): Selenocysteine
  MOD_RES (637)..(637): Selenocysteine
  MOD_RES (704)..(704): Selenocysteine
  MOD_RES (731)..(731): Selenocysteine
  MOD_RES (742)..(742): Selenocysteine
  MOD_RES (747)..(747): Selenocysteine
  MOD_RES (837)..(837): Selenocysteine
  MOD_RES (845)..(845): Selenocysteine
  MOD_RES (850)..(850): Selenocysteine
  MOD_RES (864)..(864): Selenocysteine
  MOD_RES (876)..(876): Selenocysteine
  MOD_RES (882)..(882): Selenocysteine
  MOD_RES (918)..(918): Selenocysteine
  MOD_RES (943)..(943): Selenocysteine
  MOD_RES (958)..(958): Selenocysteine
  MOD_RES (976)..(976): Selenocysteine
  MOD_RES (1000)..(1000): Selenocysteine
  MOD_RES (1017)..(1017): Selenocysteine
  MOD_RES (1021)..(1022): Selenocysteine
  MOD_RES (1025)..(1026): Selenocysteine
  MOD_RES (1030)..(1030): Selenocysteine
MMKFRFRRQGADPQREKLKQELFAFNKXVEHGFPNQPSALAFDPELRIMAIGXRSGAVKIYGAPGVEFXGLHRDAAXVXQMHFLXGQGRLLSLLDDSSLHLWEIVHHNGCAHLEEALSFQLPSRPGFDGASAPLSLXRVXVVLLVAASDIAALGXEGSSVFFLDVXXLXLLEGQXLAPGEVLRSVPDDYRCGKALGPVESLQGHLRDPXKILIGYSRGLLVIWNQASQCVDHIFLGNQQLESLCWGRDSSXVVSSHSDGSYAVWSVDAGSFPXLQPXVAXXPYGPFPCKAINKILWRNCESGGHFIIFSGGMPRASYGDRHCVSVLRAEXLVXLDFXSRIIDFFXVHSXRPEDEFDDPQALAVLLEEELVVLDLQXPGWPAVPAPYLAPLHSSAIXCSAHVASVPAKLWARIVSAGEQQSPQPVSSALSWPIXGGRNLAQEPSQRGLLLXGHEDGXVRFWDASGVALRPLYKLSXAGLFQXDCEHADSLAQAAEDDWPPFRKVGCFDPYSDDPRLGVQKVALCKYXAQMVVAGXAGQVLVLELSDVPVEQAVSVAIIDLLQDREGFXWKGHERLSPRXGPLPWPAGFQPRVLVQCLPPAAVXAVXLHXEWSLVAFGXSHGFGLFDYQRKSPVLARCXLHPNDSLAMEGPLSRVKSLKKSLRQSFRRIRKSRVSGKKRAANASSKLQEANAQLAEQACPHDVEMXPVQRRIEPRSADDSLSGVVRCLYFADXFLRDGAHHGPXMWAGXNSGSVFAYALEVPAAAVGGEKRPEQAVEAVLGKEVQLMHRAPVVAIAVLDGRGRPLPEPYEASRDLAQAPDMQGGHAVLIASEEQFKVFXLPKVSAKXKFKLXAHEGCRVRKVALAXFASVACEDYAEXCLACLXNLGDVHVFSVPGLRPQVHYSCIRKEDISGIASCVFXRHGQGFYLISPSEFERFSLSARNIXEPLCSLDINWPRDAXQASYRIRESPKLSQANGXPSILLAPQSLDGSPDPAHSMGPDXPEPPEAALSPMSIDSAXSADXXLDXXGDVXVEDVKDFLGSSEESEKNLRNLAEDEAHACAILIK

SEQ ID NO: 15089 - protein, 62 aa, Homo sapiens
  MOD_RES (7)..(7): Selenocysteine
  MOD_RES (30)..(30): Selenocysteine
LVDSAEXKNHRPGNGAGPKKAPSRARNSGXQSDGEALGPGLPHPDLSKERESQAEEGPGGAP

SEQ ID NO: 15090 - protein, 39 aa, Homo sapiens
  MOD_RES (26)..(26): Selenocysteine
MRRFLRPGHDPVRERLKRDLFQFNKXVEHGFPHQPSALG

SEQ ID NO: 15091 - protein, 103 aa, Homo sapiens
  MOD_RES (26)..(26): Selenocysteine
  MOD_RES (51)..(51): Selenocysteine
  MOD_RES (77)..(77): Selenocysteine
  MOD_RES (90)..(90): Selenocysteine
MRRFLRPGHDPVRERLKRDLFQFNKXVEHGFPHQPSALGYSPSLRILAIGXRSGAIKLYGAPGVEFMGLHQENNAVXQIHLLPGQCQLVXLLDDNSLHLWSLK

SEQ ID NO: 15092 - protein, 105 aa, Homo sapiens
  MOD_RES (26)..(26): Selenocysteine
  MOD_RES (51)..(51): Selenocysteine
  MOD_RES (77)..(77): Selenocysteine
  MOD_RES (90)..(90): Selenocysteine
MRRFLRPGHDPVRERLKRDLFQFNKXVEHGFPHQPSALGYSPSLRILAIGXRSGAIKLYGAPGVEFMGLHQENNAVXQIHLLPGQCQLVXLLDDNSLHLWSLKVK

SEQ ID NO: 15093 - protein, 140 aa, Homo sapiens
  MOD_RES (26)..(26): Selenocysteine
  MOD_RES (51)..(51): Selenocysteine
  MOD_RES (77)..(77): Selenocysteine
  MOD_RES (90)..(90): Selenocysteine
  MOD_RES (118)..(118): Selenocysteine
  MOD_RES (130)..(130): Selenocysteine
  MOD_RES (133)..(133): Selenocysteine
MRRFLRPGHDPVRERLKRDLFQFNKXVEHGFPHQPSALGYSPSLRILAIGXRSGAIKLYGAPGVEFMGLHQENNAVXQIHLLPGQCQLVXLLDDNSLHLWSLKVKGGASELQEDESFXLRGPPGAAPSAXQIXVVLPHSS

SEQ ID NO: 15094 - protein, 151 aa, Homo sapiens
  MOD_RES (26)..(26): Selenocysteine
  MOD_RES (51)..(51): Selenocysteine
  MOD_RES (77)..(77): Selenocysteine
  MOD_RES (90)..(90): Selenocysteine
  MOD_RES (118)..(118): Selenocysteine
  MOD_RES (130)..(130): Selenocysteine
  MOD_RES (133)..(133): Selenocysteine
  MOD_RES (148)..(148): Selenocysteine
MRRFLRPGHDPVRERLKRDLFQFNKXVEHGFPHQPSALGYSPSLRILAIGXRSGAIKLYGAPGVEFMGLHQENNAVXQIHLLPGQCQLVXLLDDNSLHLWSLKVKGGASELQEDESFXLRGPPGAAPSAXQIXVVLPHSSCELLYLGXESG

SEQ ID NO: 15095 - protein, 356 aa, Homo sapiens
  MOD_RES (26)..(26): Selenocysteine
  MOD_RES (51)..(51): Selenocysteine
  MOD_RES (77)..(77): Selenocysteine
  MOD_RES (90)..(90): Selenocysteine
  MOD_RES (118)..(118): Selenocysteine
  MOD_RES (130)..(130): Selenocysteine
  MOD_RES (133)..(133): Selenocysteine
  MOD_RES (148)..(148): Selenocysteine
  MOD_RES (168)..(168): Selenocysteine
  MOD_RES (284)..(284): Selenocysteine
  MOD_RES (290)..(291): Selenocysteine
  MOD_RES (298)..(298): Selenocysteine
  MOD_RES (324)..(324): Selenocysteine
  MOD_RES (329)..(329): Selenocysteine
  MOD_RES (336)..(336): Selenocysteine
  MOD_RES (339)..(339): Selenocysteine
MRRFLRPGHDPVRERLKRDLFQFNKXVEHGFPHQPSALGYSPSLRILAIGXRSGAIKLYGAPGVEFMGLHQENNAVXQIHLLPGQCQLVXLLDDNSLHLWSLKVKGGASELQEDESFXLRGPPGAAPSAXQIXVVLPHSSCELLYLGXESGNVFVVQLPAFRALEDRXISSDAVLQRLPEEARHRRVFEMVEALQEHPRDPNQILIGYSRGLVVIWDLQGSRVLYHFLSSQQLENIWWQRDGRLLVSCHSDGSYCQWPVSSEAQQPEPLRSLVPYGPFPCKAIXRILWLXXRQGLPFXIFQGGMPRASYGDRHCISVIHDGQQXAFDFXSRVIGFXVLXEADPAASRRASGVGAQG

SEQ ID NO: 15096 - protein, 1015 aa, Homo sapiens
  MOD_RES (26)..(26): Selenocysteine
  MOD_RES (51)..(51): Selenocysteine
  MOD_RES (77)..(77): Selenocysteine
  MOD_RES (90)..(90): Selenocysteine
  MOD_RES (118)..(118): Selenocysteine
  MOD_RES (130)..(130): Selenocysteine
  MOD_RES (133)..(133): Selenocysteine
  MOD_RES (148)..(148): Selenocysteine
  MOD_RES (168)..(168): Selenocysteine
  MOD_RES (284)..(284): Selenocysteine
  MOD_RES (290)..(291): Selenocysteine
  MOD_RES (298)..(298): Selenocysteine
  MOD_RES (324)..(324): Selenocysteine
  MOD_RES (329)..(329): Selenocysteine
  MOD_RES (336)..(336): Selenocysteine
  MOD_RES (339)..(339): Selenocysteine
  MOD_RES (346)..(346): Selenocysteine
  MOD_RES (368)..(368): Selenocysteine
  MOD_RES (388)..(388): Selenocysteine
  MOD_RES (417)..(417): Selenocysteine
  MOD_RES (426)..(426): Selenocysteine
  MOD_RES (429)..(429): Selenocysteine
  MOD_RES (440)..(440): Selenocysteine
  MOD_RES (446)..(446): Selenocysteine
  MOD_RES (465)..(465): Selenocysteine
  MOD_RES (471)..(471): Selenocysteine
  MOD_RES (473)..(473): Selenocysteine
  MOD_RES (524)..(524): Selenocysteine
  MOD_RES (592)..(592): Selenocysteine
  MOD_RES (607)..(607): Selenocysteine
  MOD_RES (627)..(627): Selenocysteine
  MOD_RES (710)..(710): Selenocysteine
  MOD_RES (715)..(715): Selenocysteine
  MOD_RES (721)..(721): Selenocysteine
  MOD_RES (737)..(737): Selenocysteine
  MOD_RES (741)..(741): Selenocysteine
  MOD_RES (823)..(823): Selenocysteine
  MOD_RES (836)..(836): Selenocysteine
  MOD_RES (868)..(868): Selenocysteine
  MOD_RES (904)..(904): Selenocysteine
  MOD_RES (925)..(925): Selenocysteine
  MOD_RES (940)..(940): Selenocysteine
  MOD_RES (963)..(963): Selenocysteine
  MOD_RES (988)..(988): Selenocysteine
MRRFLRPGHDPVRERLKRDLFQFNKXVEHGFPHQPSALGYSPSLRILAIGXRSGAIKLYGAPGVEFMGLHQENNAVXQIHLLPGQCQLVXLLDDNSLHLWSLKVKGGASELQEDESFXLRGPPGAAPSAXQIXVVLPHSSCELLYLGXESGNVFVVQLPAFRALEDRXISSDAVLQRLPEEARHRRVFEMVEALQEHPRDPNQILIGYSRGLVVIWDLQGSRVLYHFLSSQQLENIWWQRDGRLLVSCHSDGSYCQWPVSSEAQQPEPLRSLVPYGPFPCKAIXRILWLXXRQGLPFXIFQGGMPRASYGDRHCISVIHDGQQXAFDFXSRVIGFXVLXEADPAAXFDDPYALVVLAEEELVVIDLQXAGWPPVQLPYLASLHCSAIXCSHHVSNIPLKLWERIIAAGSRQNAHFSXMEWPIDGGXSLXPAPPQRDLLLXGHEDGXVRFWDASGVCLRLLYKLSXVRVFLXDXDPNENFSAQGEDEWPPLRKVGSFDPYSDDPRLGIQKIFLCKYSGYLAVAGXAGQVLVLELNDEAAEQAVEQVEADLLQDQEGYRWKGHERLAARSGPVRFEPGFQPFVLVQCQPPAVVXSLALHSEWRLVAFGXSHGFGLFDHQQRRQVFVKCXLHPSDQLALEGPLSRVKSLKKSLRQSFRRMRRSRVSSRKRHPAGPPGEAQEGSAKAERPGLQNMELAPVQRKIEARSAEDSFXGFVRXLYFADXYLKDSSRHCPSLWAGXNGGXIYAFSLRVPPAERRMDEPVRAEQAKEIQLMHRAPVVGILVLDGHSVPLPEPLEVAHDLSKSPDMQGSHQLLVVSEEQFKVFXLPKVSAKLKLKLXALEGSRVRRVSVAHFGSRRAEDYGEHHLAVLXNLGDIQVVSLPLLKPQVRYSCIRREDVSGIASCVFXKYGQGFYLISPSEFERFSLSXKWLVEPRCLVDSAEXKNHRPGNGAGPKKAPSRARNSGXQSDGEEKQPGLVMERALLSDERAAXGVHIEPPWGAASAMAEQSEWLSVQAAR

SEQ ID NO: 15097 - protein, 1019 aa, Homo sapiens
  MOD_RES (26)..(26): Selenocysteine
  MOD_RES (51)..(51): Selenocysteine
  MOD_RES (77)..(77): Selenocysteine
  MOD_RES (90)..(90): Selenocysteine
  MOD_RES (118)..(118): Selenocysteine
  MOD_RES (130)..(130): Selenocysteine
  MOD_RES (133)..(133): Selenocysteine
  MOD_RES (148)..(148): Selenocysteine
  MOD_RES (168)..(168): Selenocysteine
  MOD_RES (284)..(284): Selenocysteine
  MOD_RES (290)..(291): Selenocysteine
  MOD_RES (298)..(298): Selenocysteine
  MOD_RES (324)..(324): Selenocysteine
  MOD_RES (329)..(329): Selenocysteine
  MOD_RES (336)..(336): Selenocysteine
  MOD_RES (339)..(339): Selenocysteine
  MOD_RES (346)..(346): Selenocysteine
  MOD_RES (368)..(368): Selenocysteine
  MOD_RES (388)..(388): Selenocysteine
  MOD_RES (417)..(417): Selenocysteine
  MOD_RES (426)..(426): Selenocysteine
  MOD_RES (429)..(429): Selenocysteine
  MOD_RES (440)..(440): Selenocysteine
  MOD_RES (446)..(446): Selenocysteine
  MOD_RES (465)..(465): Selenocysteine
  MOD_RES (471)..(471): Selenocysteine
  MOD_RES (473)..(473): Selenocysteine
  MOD_RES (524)..(524): Selenocysteine
  MOD_RES (592)..(592): Selenocysteine
  MOD_RES (607)..(607): Selenocysteine
  MOD_RES (627)..(627): Selenocysteine
  MOD_RES (710)..(710): Selenocysteine
  MOD_RES (715)..(715): Selenocysteine
  MOD_RES (721)..(721): Selenocysteine
  MOD_RES (737)..(737): Selenocysteine
  MOD_RES (741)..(741): Selenocysteine
  MOD_RES (823)..(823): Selenocysteine
  MOD_RES (836)..(836): Selenocysteine
  MOD_RES (868)..(868): Selenocysteine
  MOD_RES (904)..(904): Selenocysteine
  MOD_RES (925)..(925): Selenocysteine
  MOD_RES (940)..(940): Selenocysteine
  MOD_RES (963)..(963): Selenocysteine
  MOD_RES (993)..(993): Selenocysteine
MRRFLRPGHDPVRERLKRDLFQFNKXVEHGFPHQPSALGYSPSLRILAIGXRSGAIKLYGAPGVEFMGLHQENNAVXQIHLLPGQCQLVXLLDDNSLHLWSLKVKGGASELQEDESFXLRGPPGAAPSAXQIXVVLPHSSCELLYLGXESGNVFVVQLPAFRALEDRXISSDAVLQRLPEEARHRRVFEMVEALQEHPRDPNQILIGYSRGLVVIWDLQGSRVLYHFLSSQQLENIWWQRDGRLLVSCHSDGSYCQWPVSSEAQQPEPLRSLVPYGPFPCKAIXRILWLXXRQGLPFXIFQGGMPRASYGDRHCISVIHDGQQXAFDFXSRVIGFXVLXEADPAAXFDDPYALVVLAEEELVVIDLQXAGWPPVQLPYLASLHCSAIXCSHHVSNIPLKLWERIIAAGSRQNAHFSXMEWPIDGGXSLXPAPPQRDLLLXGHEDGXVRFWDASGVCLRLLYKLSXVRVFLXDXDPNENFSAQGEDEWPPLRKVGSFDPYSDDPRLGIQKIFLCKYSGYLAVAGXAGQVLVLELNDEAAEQAVEQVEADLLQDQEGYRWKGHERLAARSGPVRFEPGFQPFVLVQCQPPAVVXSLALHSEWRLVAFGXSHGFGLFDHQQRRQVFVKCXLHPSDQLALEGPLSRVKSLKKSLRQSFRRMRRSRVSSRKRHPAGPPGEAQEGSAKAERPGLQNMELAPVQRKIEARSAEDSFXGFVRXLYFADXYLKDSSRHCPSLWAGXNGGXIYAFSLRVPPAERRMDEPVRAEQAKEIQLMHRAPVVGILVLDGHSVPLPEPLEVAHDLSKSPDMQGSHQLLVVSEEQFKVFXLPKVSAKLKLKLXALEGSRVRRVSVAHFGSRRAEDYGEHHLAVLXNLGDIQVVSLPLLKPQVRYSCIRREDVSGIASCVFXKYGQGFYLISPSEFERFSLSXKWLVEPRCLVDSAEXKNHRPGNGAGPKKAPSRARNSGXQSDGEEKQPGLVMERALLSDERVLKEIQSXLEGDRGSGNWRSHRAAVGCSLSNGGE

SEQ ID NO: 15098 - protein, 1020 aa, Homo sapiens
  MOD_RES (26)..(26): Selenocysteine
  MOD_RES (51)..(51): Selenocysteine
  MOD_RES (77)..(77): Selenocysteine
  MOD_RES (90)..(90): Selenocysteine
  MOD_RES (118)..(118): Selenocysteine
  MOD_RES (130)..(130): Selenocysteine
  MOD_RES (133)..(133): Selenocysteine
  MOD_RES (148)..(148): Selenocysteine
  MOD_RES (168)..(168): Selenocysteine
  MOD_RES (284)..(284): Selenocysteine
  MOD_RES (290)..(291): Selenocysteine
  MOD_RES (298)..(298): Selenocysteine
  MOD_RES (324)..(324): Selenocysteine
  MOD_RES (329)..(329): Selenocysteine
  MOD_RES (336)..(336): Selenocysteine
  MOD_RES (339)..(339): Selenocysteine
  MOD_RES (346)..(346): Selenocysteine
  MOD_RES (368)..(368): Selenocysteine
  MOD_RES (388)..(388): Selenocysteine
  MOD_RES (417)..(417): Selenocysteine
  MOD_RES (426)..(426): Selenocysteine
  MOD_RES (429)..(429): Selenocysteine
  MOD_RES (440)..(440): Selenocysteine
  MOD_RES (446)..(446): Selenocysteine
  MOD_RES (465)..(465): Selenocysteine
  MOD_RES (471)..(471): Selenocysteine
  MOD_RES (473)..(473): Selenocysteine
  MOD_RES (524)..(524): Selenocysteine
  MOD_RES (592)..(592): Selenocysteine
  MOD_RES (607)..(607): Selenocysteine
  MOD_RES (627)..(627): Selenocysteine
  MOD_RES (710)..(710): Selenocysteine
  MOD_RES (715)..(715): Selenocysteine
  MOD_RES (721)..(721): Selenocysteine
  MOD_RES (737)..(737): Selenocysteine
  MOD_RES (741)..(741): Selenocysteine
  MOD_RES (823)..(823): Selenocysteine
  MOD_RES (836)..(836): Selenocysteine
  MOD_RES (868)..(868): Selenocysteine
  MOD_RES (904)..(904): Selenocysteine
  MOD_RES (925)..(925): Selenocysteine
  MOD_RES (940)..(940): Selenocysteine
  MOD_RES (963)..(963): Selenocysteine
  MOD_RES (993)..(993): Selenocysteine
MRRFLRPGHDPVRERLKRDLFQFNKXVEHGFPHQPSALGYSPSLRILAIGXRSGAIKLYGAPGVEFMGLHQENNAVXQIHLLPGQCQLVXLLDDNSLHLWSLKVKGGASELQEDESFXLRGPPGAAPSAXQIXVVLPHSSCELLYLGXESGNVFVVQLPAFRALEDRXISSDAVLQRLPEEARHRRVFEMVEALQEHPRDPNQILIGYSRGLVVIWDLQGSRVLYHFLSSQQLENIWWQRDGRLLVSCHSDGSYCQWPVSSEAQQPEPLRSLVPYGPFPCKAIXRILWLXXRQGLPFXIFQGGMPRASYGDRHCISVIHDGQQXAFDFXSRVIGFXVLXEADPAAXFDDPYALVVLAEEELVVIDLQXAGWPPVQLPYLASLHCSAIXCSHHVSNIPLKLWERIIAAGSRQNAHFSXMEWPIDGGXSLXPAPPQRDLLLXGHEDGXVRFWDASGVCLRLLYKLSXVRVFLXDXDPNENFSAQGEDEWPPLRKVGSFDPYSDDPRLGIQKIFLCKYSGYLAVAGXAGQVLVLELNDEAAEQAVEQVEADLLQDQEGYRWKGHERLAARSGPVRFEPGFQPFVLVQCQPPAVVXSLALHSEWRLVAFGXSHGFGLFDHQQRRQVFVKCXLHPSDQLALEGPLSRVKSLKKSLRQSFRRMRRSRVSSRKRHPAGPPGEAQEGSAKAERPGLQNMELAPVQRKIEARSAEDSFXGFVRXLYFADXYLKDSSRHCPSLWAGXNGGXIYAFSLRVPPAERRMDEPVRAEQAKEIQLMHRAPVVGILVLDGHSVPLPEPLEVAHDLSKSPDMQGSHQLLVVSEEQFKVFXLPKVSAKLKLKLXALEGSRVRRVSVAHFGSRRAEDYGEHHLAVLXNLGDIQVVSLPLLKPQVRYSCIRREDVSGIASCVFXKYGQGFYLISPSEFERFSLSXKWLVEPRCLVDSAEXKNHRPGNGAGPKKAPSRARNSGXQSDGEEKQPGLVMERALLSDERVLKEIQSXLEGDRGSGNWRSHRAAVGCSLSNGGAE

SEQ ID NO: 15099 - protein, 156 aa, Homo sapiens
  MOD_RES (10)..(10): Selenocysteine
  MOD_RES (13)..(14): Selenocysteine
  MOD_RES (27)..(27): Selenocysteine
  MOD_RES (52)..(52): Selenocysteine
  MOD_RES (78)..(78): Selenocysteine
  MOD_RES (91)..(91): Selenocysteine
  MOD_RES (119)..(119): Selenocysteine
  MOD_RES (131)..(131): Selenocysteine
  MOD_RES (134)..(134): Selenocysteine
  MOD_RES (149)..(149): Selenocysteine
MYFDRFDLDXIAXXVLSIFGEAACPEXVEHGFPHQPSALGYSPSLRILAIGXRSGAIKLYGAPGVEFMGLHQENNAVXQIHLLPGQCQLVXLLDDNSLHLWSLKVKGGASELQEDESFXLRGPPGAAPSAXQIXVVLPHSSCELLYLGXESGNVFV

SEQ ID NO: 15100 - protein, 105 aa, Homo sapiens
  MOD_RES (1)..(1): Any amino acid
  MOD_RES (7)..(7): Selenocysteine
  MOD_RES (13)..(13): Selenocysteine
  MOD_RES (15)..(15): Selenocysteine
  MOD_RES (17)..(17): Selenocysteine
  MOD_RES (34)..(34): Selenocysteine
  MOD_RES (45)..(45): Selenocysteine
  MOD_RES (47)..(47): Selenocysteine
  MOD_RES (49)..(49): Selenocysteine
  MOD_RES (51)..(51): Selenocysteine
  MOD_RES (58)..(58): Selenocysteine
  MOD_RES (70)..(70): Selenocysteine
  MOD_RES (72)..(72): Selenocysteine
  MOD_RES (75)..(75): Selenocysteine
  MOD_RES (88)..(88): Selenocysteine
  MOD_RES (91)..(91): Selenocysteine
XRDLLLXGWVLPXGXRXARCGSGMPRVSACGCSXNSALCACSSPXRXPXRXSVPRARXSGPHSARWAPLXPXVMXPGWASRRSSSASXAAXWLWQARQGRCWYWN

SEQ ID NO: 15101 - protein, 86 aa, Homo sapiens
  MOD_RES (1)..(1): Any amino acid
  MOD_RES (2)..(2): Selenocysteine
  MOD_RES (8)..(9): Selenocysteine
  MOD_RES (16)..(16): Selenocysteine
  MOD_RES (42)..(42): Selenocysteine
  MOD_RES (47)..(47): Selenocysteine
  MOD_RES (54)..(54): Selenocysteine
  MOD_RES (57)..(57): Selenocysteine
  MOD_RES (64)..(64): Selenocysteine
  MOD_RES (78)..(78): Selenocysteine
XXRILWLXXRQGLPFXIFQGGMPRASYGDRHCISVIHDGQQXAFDFXSRVIGFXVLXEADPAAXVGADHCRRQPAERXLLHHGVAN

SEQ ID NO: 15102 - protein, 392 aa, Homo sapiens
  MOD_RES (3)..(3): Selenocysteine
  MOD_RES (47)..(47): Selenocysteine
  MOD_RES (49)..(49): Selenocysteine
  MOD_RES (60)..(60): Selenocysteine
  MOD_RES (80)..(80): Selenocysteine
  MOD_RES (96)..(96): Selenocysteine
  MOD_RES (103)..(103): Selenocysteine
  MOD_RES (131)..(131): Selenocysteine
  MOD_RES (135)..(135): Selenocysteine
  MOD_RES (139)..(139): Selenocysteine
  MOD_RES (144)..(144): Selenocysteine
  MOD_RES (172)..(172): Selenocysteine
  MOD_RES (201)..(201): Selenocysteine
  MOD_RES (210)..(210): Selenocysteine
  MOD_RES (212)..(212): Selenocysteine
  MOD_RES (227)..(227): Selenocysteine
  MOD_RES (238)..(238): Selenocysteine
  MOD_RES (250)..(250): Selenocysteine
  MOD_RES (278)..(278): Selenocysteine
  MOD_RES (295)..(295): Selenocysteine
  MOD_RES (361)..(361): Selenocysteine
MAXSGAASAELVIGWCIFGLLLLAILAFCWIYVRKYQSRRESEVVSXIXAIFSLAIALIXSALLPVDIFLVSYMKNQNGXFKDWANANVSRQIEDXVLYGYYXLYSVILFCVFFWIPFVYFYYEEKDDDDXSKCXQIKXALKYXLGFVVICALLLLVGAFVPLNVPNNKNSXEWEKVKSLFEELGSSHGLAALSFSISSLXLIGMLAAIXYXAYGMSALPLNLIKGXRSAAYERLENXEDIEEVEQHIQXIKSKSKDGRPLPARDKRALKQFEERLRXLKKRERHLEFIENSWWXKFCGALRPLKIVWGIFFILVALLFVISLFLSNLDKALHSAGIDSGFIIFGANLSNPLNMLLPLLQXEFEILAYGSFGLDYIKSEEVEPGPKHSFFSA

SEQ ID NO: 15103 - protein, 540 aa, Homo sapiens
  MOD_RES (3)..(3): Selenocysteine
  MOD_RES (47)..(47): Selenocysteine
  MOD_RES (49)..(49): Selenocysteine
  MOD_RES (60)..(60): Selenocysteine
  MOD_RES (80)..(80): Selenocysteine
  MOD_RES (96)..(96): Selenocysteine
  MOD_RES (103)..(103): Selenocysteine
  MOD_RES (131)..(131): Selenocysteine
  MOD_RES (135)..(135): Selenocysteine
  MOD_RES (139)..(139): Selenocysteine
  MOD_RES (144)..(144): Selenocysteine
  MOD_RES (172)..(172): Selenocysteine
  MOD_RES (201)..(201): Selenocysteine
  MOD_RES (210)..(210): Selenocysteine
  MOD_RES (212)..(212): Selenocysteine
  MOD_RES (227)..(227): Selenocysteine
  MOD_RES (238)..(238): Selenocysteine
  MOD_RES (250)..(250): Selenocysteine
  MOD_RES (278)..(278): Selenocysteine
  MOD_RES (295)..(295): Selenocysteine
  MOD_RES (361)..(361): Selenocysteine
  MOD_RES (371)..(371): Selenocysteine
  MOD_RES (380)..(380): Selenocysteine
  MOD_RES (405)..(405): Selenocysteine
  MOD_RES (424)..(424): Selenocysteine
  MOD_RES (447)..(447): Selenocysteine
  MOD_RES (450)..(450): Selenocysteine
  MOD_RES (459)..(459): Selenocysteine
  MOD_RES (476)..(476): Selenocysteine
  MOD_RES (478)..(478): Selenocysteine
  MOD_RES (480)..(480): Selenocysteine
MAXSGAASAELVIGWCIFGLLLLAILAFCWIYVRKYQSRRESEVVSXIXAIFSLAIALIXSALLPVDIFLVSYMKNQNGXFKDWANANVSRQIEDXVLYGYYXLYSVILFCVFFWIPFVYFYYEEKDDDDXSKCXQIKXALKYXLGFVVICALLLLVGAFVPLNVPNNKNSXEWEKVKSLFEELGSSHGLAALSFSISSLXLIGMLAAIXYXAYGMSALPLNLIKGXRSAAYERLENXEDIEEVEQHIQXIKSKSKDGRPLPARDKRALKQFEERLRXLKKRERHLEFIENSWWXKFCGALRPLKIVWGIFFILVALLFVISLFLSNLDKALHSAGIDSGFIIFGANLSNPLNMLLPLLQXVFPLDYILIXIIIMYFIFXSMAGIRNIGIWFFWIRLYKIRRGRXRPQALLFLCMILLLIVLHXSYMIYSLAPQYVMYGSQNYLIEXNIXSDNHKGNSXLSVPKRCDADAPEDQCXVXRXYLFLHKFWFFSAAYYFGNWAFLGVFLIGLIVSCCKGKKSVIEGVDEDSDISDDEPSVYSA

SEQ ID NO: 15104 - protein, 467 aa, Homo sapiens
  MOD_RES (7)..(7): Selenocysteine
  MOD_RES (23)..(23): Selenocysteine
  MOD_RES (30)..(30): Selenocysteine
  MOD_RES (58)..(58): Selenocysteine
  MOD_RES (62)..(62): Selenocysteine
  MOD_RES (66)..(66): Selenocysteine
  MOD_RES (71)..(71): Selenocysteine
  MOD_RES (99)..(99): Selenocysteine
  MOD_RES (128)..(128): Selenocysteine
  MOD_RES (137)..(137): Selenocysteine
  MOD_RES (139)..(139): Selenocysteine
  MOD_RES (154)..(154): Selenocysteine
  MOD_RES (165)..(165): Selenocysteine
  MOD_RES (177)..(177): Selenocysteine
  MOD_RES (205)..(205): Selenocysteine
  MOD_RES (222)..(222): Selenocysteine
  MOD_RES (288)..(288): Selenocysteine
  MOD_RES (298)..(298): Selenocysteine
  MOD_RES (307)..(307): Selenocysteine
  MOD_RES (332)..(332): Selenocysteine
  MOD_RES (351)..(351): Selenocysteine
  MOD_RES (374)..(374): Selenocysteine
  MOD_RES (377)..(377): Selenocysteine
  MOD_RES (386)..(386): Selenocysteine
  MOD_RES (403)..(403): Selenocysteine
  MOD_RES (405)..(405): Selenocysteine
  MOD_RES (407)..(407): Selenocysteine
MKNQNGXFKDWANANVSRQIEDXVLYGYYXLYSVILFCVFFWIPFVYFYYEEKDDDDXSKCXQIKXALKYXLGFVVICALLLLVGAFVPLNVPNNKNSXEWEKVKSLFEELGSSHGLAALSFSISSLXLIGMLAAIXYXAYGMSALPLNLIKGXRSAAYERLENXEDIEEVEQHIQXIKSKSKDGRPLPARDKRALKQFEERLRXLKKRERHLEFIENSWWXKFCGALRPLKIVWGIFFILVALLFVISLFLSNLDKALHSAGIDSGFIIFGANLSNPLNMLLPLLQXVFPLDYILIXIIIMYFIFXSMAGIRNIGIWFFWIRLYKIRRGRXRPQALLFLCMILLLIVLHXSYMIYSLAPQYVMYGSQNYLIEXNIXSDNHKGNSXLSVPKRCDADAPEDQCXVXRXYLFLHKFWFFSAAYYFGNWAFLGVFLIGLIVSCCKGKKSVIEGVDEDSDISDDEPSVYSA

SEQ ID NO: 15105 - protein, 58 aa, Homo sapiens
  MOD_RES (34)..(34): Selenocysteine
  MOD_RES (48)..(48): Selenocysteine
MAKVAKDLNPGVKKMSLGQLQSARGVACLGCKGXCSGFEPHSWRDCSXWSSSPRRSSQ

SEQ ID NO: 15106 - protein, 247 aa, Homo sapiens
  MOD_RES (34)..(34): Selenocysteine
  MOD_RES (60)..(60): Selenocysteine
  MOD_RES (80)..(80): Selenocysteine
  MOD_RES (82)..(82): Selenocysteine
  MOD_RES (102)..(102): Selenocysteine
  MOD_RES (107)..(107): Selenocysteine
  MOD_RES (112)..(112): Selenocysteine
  MOD_RES (115)..(115): Selenocysteine
  MOD_RES (117)..(117): Selenocysteine
  MOD_RES (126)..(126): Selenocysteine
  MOD_RES (145)..(145): Selenocysteine
  MOD_RES (147)..(147): Selenocysteine
  MOD_RES (223)..(224): Selenocysteine
  MOD_RES (227)..(228): Selenocysteine
MAKVAKDLNPGVKKMSLGQLQSARGVACLGCKGXCSGFEPHSWRKICKSCKCSQEDHCLXSDLEDDRKIGRLLMDSKYSXLXARVKGGDGIRIYKRNRMIMXNPIAXGKDPXFDXIXYEWAPPGVXQKLGLQYMELIPKEKQPVXGXEGAFYRRRQLMHQLPIYDQDPSRCRGLLENELKLMEEFVKQYKSEALGVGEVALPGQGGLPKEEGKQQEKPEGAEXXAAXXNGSLSDPSKEVEYKPVPLV

SEQ ID NO: 15107 - protein, 365 aa, Homo sapiens
  MOD_RES (34)..(34): Selenocysteine
  MOD_RES (60)..(60): Selenocysteine
  MOD_RES (80)..(80): Selenocysteine
  MOD_RES (82)..(82): Selenocysteine
  MOD_RES (102)..(102): Selenocysteine
  MOD_RES (107)..(107): Selenocysteine
  MOD_RES (112)..(112): Selenocysteine
  MOD_RES (115)..(115): Selenocysteine
  MOD_RES (117)..(117): Selenocysteine
  MOD_RES (126)..(126): Selenocysteine
  MOD_RES (145)..(145): Selenocysteine
  MOD_RES (147)..(147): Selenocysteine
  MOD_RES (223)..(224): Selenocysteine
  MOD_RES (227)..(228): Selenocysteine
  MOD_RES (271)..(271): Selenocysteine
  MOD_RES (350)..(350): Selenocysteine
  MOD_RES (358)..(358): Selenocysteine
MAKVAKDLNPGVKKMSLGQLQSARGVACLGCKGXCSGFEPHSWRKICKSCKCSQEDHCLXSDLEDDRKIGRLLMDSKYSXLXARVKGGDGIRIYKRNRMIMXNPIAXGKDPXFDXIXYEWAPPGVXQKLGLQYMELIPKEKQPVXGXEGAFYRRRQLMHQLPIYDQDPSRCRGLLENELKLMEEFVKQYKSEALGVGEVALPGQGGLPKEEGKQQEKPEGAEXXAAXXNGSLSDPSKEVEYVCELCKGAAPPDSPVVYSDRAGYNKQWHPXCFVCAKCSEPLVDLIYFWKDGAPWCGRHYCESLRPRCSGCDEIIFAEDYQRVEDLAWHRKHFVCEGCEQLLSGRAYIVXKGQLLCPXCSKSKRS

SEQ ID NO: 15108 - protein, 292 aa, Homo sapiens
  MOD_RES (7)..(7): Selenocysteine
  MOD_RES (9)..(9): Selenocysteine
  MOD_RES (29)..(29): Selenocysteine
  MOD_RES (34)..(34): Selenocysteine
  MOD_RES (39)..(39): Selenocysteine
  MOD_RES (42)..(42): Selenocysteine
  MOD_RES (44)..(44): Selenocysteine
  MOD_RES (53)..(53): Selenocysteine
  MOD_RES (72)..(72): Selenocysteine
  MOD_RES (74)..(74): Selenocysteine
  MOD_RES (150)..(151): Selenocysteine
  MOD_RES (154)..(155): Selenocysteine
  MOD_RES (198)..(198): Selenocysteine
  MOD_RES (277)..(277): Selenocysteine
  MOD_RES (285)..(285): Selenocysteine
MDSKYSXLXARVKGGDGIRIYKRNRMIMXNPIAXGKDPXFDXIXYEWAPPGVXQKLGLQYMELIPKEKQPVXGXEGAFYRRRQLMHQLPIYDQDPSRCRGLLENELKLMEEFVKQYKSEALGVGEVALPGQGGLPKEEGKQQEKPEGAEXXAAXXNGSLSDPSKEVEYVCELCKGAAPPDSPVVYSDRAGYNKQWHPXCFVCAKCSEPLVDLIYFWKDGAPWCGRHYCESLRPRCSGCDEIIFAEDYQRVEDLAWHRKHFVCEGCEQLLSGRAYIVXKGQLLCPXCSKSKRS

SEQ ID NO: 15109 - protein, 253 aa, Homo sapiens
  MOD_RES (14)..(14): Selenocysteine
  MOD_RES (33)..(33): Selenocysteine
  MOD_RES (35)..(35): Selenocysteine
  MOD_RES (111)..(112): Selenocysteine
  MOD_RES (115)..(116): Selenocysteine
  MOD_RES (159)..(159): Selenocysteine
  MOD_RES (238)..(238): Selenocysteine
  MOD_RES (246)..(246): Selenocysteine
MFGMQGDVFGLRAXFMEGLQYMELIPKEKQPVXGXEGAFYRRRQLMHQLPIYDQDPSRCRGLLENELKLMEEFVKQYKSEALGVGEVALPGQGGLPKEEGKQQEKPEGAEXXAAXXNGSLSDPSKEVEYVCELCKGAAPPDSPVVYSDRAGYNKQWHPXCFVCAKCSEPLVDLIYFWKDGAPWCGRHYCESLRPRCSGCDEIIFAEDYQRVEDLAWHRKHFVCEGCEQLLSGRAYIVXKGQLLCPXCSKSKRS

SEQ ID NO: 15110 - protein, 234 aa, Homo sapiens
  MOD_RES (4)..(4): Selenocysteine
  MOD_RES (40)..(40): Selenocysteine
  MOD_RES (66)..(66): Selenocysteine
  MOD_RES (86)..(86): Selenocysteine
  MOD_RES (88)..(88): Selenocysteine
  MOD_RES (108)..(108): Selenocysteine
  MOD_RES (113)..(113): Selenocysteine
  MOD_RES (118)..(118): Selenocysteine
  MOD_RES (121)..(121): Selenocysteine
  MOD_RES (123)..(123): Selenocysteine
  MOD_RES (132)..(132): Selenocysteine
  MOD_RES (151)..(151): Selenocysteine
  MOD_RES (153)..(153): Selenocysteine
  MOD_RES (229)..(230): Selenocysteine
  MOD_RES (233)..(234): Selenocysteine
MGYXYKVIERILEIGAFRPHMSLGQLQSARGVACLGCKGXCSGFEPHSWRKICKSCKCSQEDHCLXSDLEDDRKIGRLLMDSKYSXLXARVKGGDGIRIYKRNRMIMXNPIAXGKDPXFDXIXYEWAPPGVXQKLGLQYMELIPKEKQPVXGXEGAFYRRRQLMHQLPIYDQDPSRCRGLLENELKLMEEFVKQYKSEALGVGEVALPGQGGLPKEEGKQQEKPEGAEXXAAXX

SEQ ID NO: 15111 - protein, 260 aa, Homo sapiens
  MOD_RES (20)..(20): Selenocysteine
  MOD_RES (35)..(35): Selenocysteine
  MOD_RES (42)..(42): Selenocysteine
  MOD_RES (50)..(50): Selenocysteine
  MOD_RES (62)..(62): Selenocysteine
  MOD_RES (106)..(106): Selenocysteine
  MOD_RES (114)..(114): Selenocysteine
  MOD_RES (122)..(122): Selenocysteine
  MOD_RES (131)..(131): Selenocysteine
  MOD_RES (136)..(136): Selenocysteine
  MOD_RES (145)..(145): Selenocysteine
  MOD_RES (154)..(154): Selenocysteine
  MOD_RES (160)..(160): Selenocysteine
  MOD_RES (181)..(181): Selenocysteine
  MOD_RES (186)..(186): Selenocysteine
  MOD_RES (217)..(217): Selenocysteine
  MOD_RES (219)..(219): Selenocysteine
  MOD_RES (239)..(239): Selenocysteine
  MOD_RES (251)..(251): Selenocysteine
AYRKLLEGEEERLRLSPSPXSQRSRGRASSHSSQXQGGGSVXKKRKLESXESRSSFSQHARXSGRVAVEEVDEEGKFVRLRNKSNEDQSMGNWQIKRQNGDDPLLXYRFPPKFXLKAGQVVXIWAAGAGAXHSPPXDLVWKAQNXWGCGNSLRXALINSXGEGSHCSSSGDPAEYNLRSRXVLCGXCGQPADKASASGSGAQVGGPISSGSSASSVXVXRSYRSVGGSGGGSFGDNLVXRSYLLGNSSPRXQSPQNCSIM

SEQ ID NO: 15112 - protein, 182 aa, Homo sapiens
  MOD_RES (5)..(5): Selenocysteine
  MOD_RES (23)..(23): Selenocysteine
  MOD_RES (38)..(38): Selenocysteine
  MOD_RES (67)..(67): Selenocysteine
  MOD_RES (74)..(74): Selenocysteine
  MOD_RES (116)..(116): Selenocysteine
  MOD_RES (135)..(135): Selenocysteine
  MOD_RES (141)..(141): Selenocysteine
FLPQXAPRARACCSWGAGLPCPXRHSSSDPCLGSHFNXKKEGDLIAAQARLKDLEALLNSKEAALSXALSEKRXLEGELHDLRGQVAKLEAALGEAKKQLQDEMLRRVDAENRLQXMKEELDFQKNIYSEELREXKRRHEXRLVEIDNGKQREFESRLADALQELRAQHEDQVEQYKKELEK

SEQ ID NO: 15113 - protein, 565 aa, Homo sapiens
  MOD_RES (22)..(22): Selenocysteine
  MOD_RES (51)..(51): Selenocysteine
  MOD_RES (58)..(58): Selenocysteine
  MOD_RES (100)..(100): Selenocysteine
  MOD_RES (119)..(119): Selenocysteine
  MOD_RES (125)..(125): Selenocysteine
  MOD_RES (167)..(167): Selenocysteine
  MOD_RES (234)..(234): Selenocysteine
  MOD_RES (295)..(295): Selenocysteine
  MOD_RES (310)..(310): Selenocysteine
  MOD_RES (317)..(317): Selenocysteine
  MOD_RES (325)..(325): Selenocysteine
  MOD_RES (337)..(337): Selenocysteine
  MOD_RES (381)..(381): Selenocysteine
  MOD_RES (389)..(389): Selenocysteine
  MOD_RES (397)..(397): Selenocysteine
  MOD_RES (406)..(406): Selenocysteine
  MOD_RES (411)..(411): Selenocysteine
  MOD_RES (420)..(420): Selenocysteine
  MOD_RES (429)..(429): Selenocysteine
  MOD_RES (435)..(435): Selenocysteine
  MOD_RES (449)..(449): Selenocysteine
  MOD_RES (486)..(486): Selenocysteine
  MOD_RES (491)..(491): Selenocysteine
  MOD_RES (522)..(522): Selenocysteine
  MOD_RES (524)..(524): Selenocysteine
  MOD_RES (544)..(544): Selenocysteine
  MOD_RES (556)..(556): Selenocysteine
MDLEAWDPHLEPDAEAMVDGNXKKEGDLIAAQARLKDLEALLNSKEAALSXALSEKRXLEGELHDLRGQVAKLEAALGEAKKQLQDEMLRRVDAENRLQXMKEELDFQKNIYSEELREXKRRHEXRLVEIDNGKQREFESRLADALQELRAQHEDQVEQYKKELEKXYSAKLDNARQSAERNSNLVGAAHEELQQSRIRIDSLSAQLSQLQKQLAAKEAKLRDLEDSLARERDXSRRLLAEKEREMAEMRARMQQQLDEYQELLDIKLALDMEIHAYRKLLEGEEERLRLSPSPXSQRSRGRASSHSSQXQGGGSVXKKRKLESXESRSSFSQHARXSGRVAVEEVDEEGKFVRLRNKSNEDQSMGNWQIKRQNGDDPLLXYRFPPKFXLKAGQVVXIWAAGAGAXHSPPXDLVWKAQNXWGCGNSLRXALINSXGEEVAMRKLVRSVXVVEDDEDEDGDDLLHHHHGSHCSSSGDPAEYNLRSRXVLCGXCGQPADKASASGSGAQVGGPISSGSSASSVXVXRSYRSVGGSGGGSFGDNLVXRSYLLGNSSPRXQSPQNCSIM

SEQ ID NO: 15114 - protein, 487 aa, Homo sapiens
  MOD_RES (3)..(3): Selenocysteine
  MOD_RES (10)..(10): Selenocysteine
  MOD_RES (19)..(19): Selenocysteine
  MOD_RES (24)..(24): Selenocysteine
  MOD_RES (27)..(27): Selenocysteine
  MOD_RES (54)..(54): Selenocysteine
  MOD_RES (64)..(64): Selenocysteine
  MOD_RES (91)..(91): Selenocysteine
  MOD_RES (121)..(121): Selenocysteine
  MOD_RES (150)..(150): Selenocysteine
  MOD_RES (157)..(157): Selenocysteine
  MOD_RES (199)..(199): Selenocysteine
  MOD_RES (218)..(218): Selenocysteine
  MOD_RES (224)..(224): Selenocysteine
  MOD_RES (266)..(266): Selenocysteine
  MOD_RES (333)..(333): Selenocysteine
  MOD_RES (394)..(394): Selenocysteine
  MOD_RES (409)..(409): Selenocysteine
  MOD_RES (416)..(416): Selenocysteine
  MOD_RES (424)..(424): Selenocysteine
  MOD_RES (436)..(436): Selenocysteine
  MOD_RES (443)..(443): Selenocysteine
  MOD_RES (449)..(449): Selenocysteine
  MOD_RES (463)..(463): Selenocysteine
MEXPSQRRAXRSGAQASSXPLSPXRIXRLQEKEDLQELNDRLAVYIDRVRSLEXENAGLRLRIXESEEVVSREVSGIKAAYEAELGDARKXLDSVAKERARLQLELSKVREEFKELKARNXKKEGDLIAAQARLKDLEALLNSKEAALSXALSEKRXLEGELHDLRGQVAKLEAALGEAKKQLQDEMLRRVDAENRLQXMKEELDFQKNIYSEELREXKRRHEXRLVEIDNGKQREFESRLADALQELRAQHEDQVEQYKKELEKXYSAKLDNARQSAERNSNLVGAAHEELQQSRIRIDSLSAQLSQLQKQLAAKEAKLRDLEDSLARERDXSRRLLAEKEREMAEMRARMQQQLDEYQELLDIKLALDMEIHAYRKLLEGEEERLRLSPSPXSQRSRGRASSHSSQXQGGGSVXKKRKLESXESRSSFSQHARXSGNSLRXALINSXGEEVAMRKLVRSVXVVEDDEDEDGDDLLHHHHVSGSRR

SEQ ID NO: 15115 - protein, 572 aa, Homo sapiens
  MOD_RES (3)..(3): Selenocysteine
  MOD_RES (10)..(10): Selenocysteine
  MOD_RES (19)..(19): Selenocysteine
  MOD_RES (24)..(24): Selenocysteine
  MOD_RES (27)..(27): Selenocysteine
  MOD_RES (54)..(54): Selenocysteine
  MOD_RES (64)..(64): Selenocysteine
  MOD_RES (91)..(91): Selenocysteine
  MOD_RES (121)..(121): Selenocysteine
  MOD_RES (150)..(150): Selenocysteine
  MOD_RES (157)..(157): Selenocysteine
  MOD_RES (199)..(199): Selenocysteine
  MOD_RES (218)..(218): Selenocysteine
  MOD_RES (224)..(224): Selenocysteine
  MOD_RES (266)..(266): Selenocysteine
  MOD_RES (333)..(333): Selenocysteine
  MOD_RES (394)..(394): Selenocysteine
  MOD_RES (409)..(409): Selenocysteine
  MOD_RES (416)..(416): Selenocysteine
  MOD_RES (424)..(424): Selenocysteine
  MOD_RES (436)..(436): Selenocysteine
  MOD_RES (480)..(480): Selenocysteine
  MOD_RES (488)..(488): Selenocysteine
  MOD_RES (496)..(496): Selenocysteine
  MOD_RES (505)..(505): Selenocysteine
  MOD_RES (510)..(510): Selenocysteine
  MOD_RES (519)..(519): Selenocysteine
  MOD_RES (528)..(528): Selenocysteine
  MOD_RES (534)..(534): Selenocysteine
  MOD_RES (548)..(548): Selenocysteine
MEXPSQRRAXRSGAQASSXPLSPXRIXRLQEKEDLQELNDRLAVYIDRVRSLEXENAGLRLRIXESEEVVSREVSGIKAAYEAELGDARKXLDSVAKERARLQLELSKVREEFKELKARNXKKEGDLIAAQARLKDLEALLNSKEAALSXALSEKRXLEGELHDLRGQVAKLEAALGEAKKQLQDEMLRRVDAENRLQXMKEELDFQKNIYSEELREXKRRHEXRLVEIDNGKQREFESRLADALQELRAQHEDQVEQYKKELEKXYSAKLDNARQSAERNSNLVGAAHEELQQSRIRIDSLSAQLSQLQKQLAAKEAKLRDLEDSLARERDXSRRLLAEKEREMAEMRARMQQQLDEYQELLDIKLALDMEIHAYRKLLEGEEERLRLSPSPXSQRSRGRASSHSSQXQGGGSVXKKRKLESXESRSSFSQHARXSGRVAVEEVDEEGKFVRLRNKSNEDQSMGNWQIKRQNGDDPLLXYRFPPKFXLKAGQVVXIWAAGAGAXHSPPXDLVWKAQNXWGCGNSLRXALINSXGEEVAMRKLVRSVXVVEDDEDEDGDDLLHHHHVSGSRR

SEQ ID NO: 15116 - protein, 614 aa, Homo sapiens
  MOD_RES (3)..(3): Selenocysteine
  MOD_RES (10)..(10): Selenocysteine
  MOD_RES (19)..(19): Selenocysteine
  MOD_RES (24)..(24): Selenocysteine
  MOD_RES (27)..(27): Selenocysteine
  MOD_RES (54)..(54): Selenocysteine
  MOD_RES (64)..(64): Selenocysteine
  MOD_RES (91)..(91): Selenocysteine
  MOD_RES (121)..(121): Selenocysteine
  MOD_RES (150)..(150): Selenocysteine
  MOD_RES (157)..(157): Selenocysteine
  MOD_RES (199)..(199): Selenocysteine
  MOD_RES (218)..(218): Selenocysteine
  MOD_RES (224)..(224): Selenocysteine
  MOD_RES (266)..(266): Selenocysteine
  MOD_RES (333)..(333): Selenocysteine
  MOD_RES (394)..(394): Selenocysteine
  MOD_RES (409)..(409): Selenocysteine
  MOD_RES (416)..(416): Selenocysteine
  MOD_RES (424)..(424): Selenocysteine
  MOD_RES (436)..(436): Selenocysteine
  MOD_RES (480)..(480): Selenocysteine
  MOD_RES (488)..(488): Selenocysteine
  MOD_RES (496)..(496): Selenocysteine
  MOD_RES (505)..(505): Selenocysteine
  MOD_RES (510)..(510): Selenocysteine
  MOD_RES (519)..(519): Selenocysteine
  MOD_RES (528)..(528): Selenocysteine
  MOD_RES (534)..(534): Selenocysteine
  MOD_RES (548)..(548): Selenocysteine
  MOD_RES (585)..(585): Selenocysteine
  MOD_RES (590)..(590): Selenocysteine
MEXPSQRRAXRSGAQASSXPLSPXRIXRLQEKEDLQELNDRLAVYIDRVRSLEXENAGLRLRIXESEEVVSREVSGIKAAYEAELGDARKXLDSVAKERARLQLELSKVREEFKELKARNXKKEGDLIAAQARLKDLEALLNSKEAALSXALSEKRXLEGELHDLRGQVAKLEAALGEAKKQLQDEMLRRVDAENRLQXMKEELDFQKNIYSEELREXKRRHEXRLVEIDNGKQREFESRLADALQELRAQHEDQVEQYKKELEKXYSAKLDNARQSAERNSNLVGAAHEELQQSRIRIDSLSAQLSQLQKQLAAKEAKLRDLEDSLARERDXSRRLLAEKEREMAEMRARMQQQLDEYQELLDIKLALDMEIHAYRKLLEGEEERLRLSPSPXSQRSRGRASSHSSQXQGGGSVXKKRKLESXESRSSFSQHARXSGRVAVEEVDEEGKFVRLRNKSNEDQSMGNWQIKRQNGDDPLLXYRFPPKFXLKAGQVVXIWAAGAGAXHSPPXDLVWKAQNXWGCGNSLRXALINSXGEEVAMRKLVRSVXVVEDDEDEDGDDLLHHHHGSHCSSSGDPAEYNLRSRXVLCGXCGQPADKASASGSGAQSPQNCSIM

SEQ ID NO: 15117 - protein, 634 aa, Homo sapiens
  MOD_RES (3)..(3): Selenocysteine
  MOD_RES (10)..(10): Selenocysteine
  MOD_RES (19)..(19): Selenocysteine
  MOD_RES (24)..(24): Selenocysteine
  MOD_RES (27)..(27): Selenocysteine
  MOD_RES (54)..(54): Selenocysteine
  MOD_RES (64)..(64): Selenocysteine
  MOD_RES (91)..(91): Selenocysteine
  MOD_RES (121)..(121): Selenocysteine
  MOD_RES (150)..(150): Selenocysteine
  MOD_RES (157)..(157): Selenocysteine
  MOD_RES (199)..(199): Selenocysteine
  MOD_RES (218)..(218): Selenocysteine
  MOD_RES (224)..(224): Selenocysteine
  MOD_RES (266)..(266): Selenocysteine
  MOD_RES (333)..(333): Selenocysteine
  MOD_RES (394)..(394): Selenocysteine
  MOD_RES (409)..(409): Selenocysteine
  MOD_RES (416)..(416): Selenocysteine
  MOD_RES (424)..(424): Selenocysteine
  MOD_RES (436)..(436): Selenocysteine
  MOD_RES (480)..(480): Selenocysteine
  MOD_RES (488)..(488): Selenocysteine
  MOD_RES (496)..(496): Selenocysteine
  MOD_RES (505)..(505): Selenocysteine
  MOD_RES (510)..(510): Selenocysteine
  MOD_RES (519)..(519): Selenocysteine
  MOD_RES (528)..(528): Selenocysteine
  MOD_RES (534)..(534): Selenocysteine
  MOD_RES (555)..(555): Selenocysteine
  MOD_RES (560)..(560): Selenocysteine
  MOD_RES (591)..(591): Selenocysteine
  MOD_RES (593)..(593): Selenocysteine
  MOD_RES (613)..(613): Selenocysteine
  MOD_RES (625)..(625): Selenocysteine
MEXPSQRRAXRSGAQASSXPLSPXRIXRLQEKEDLQELNDRLAVYIDRVRSLEXENAGLRLRIXESEEVVSREVSGIKAAYEAELGDARKXLDSVAKERARLQLELSKVREEFKELKARNXKKEGDLIAAQARLKDLEALLNSKEAALSXALSEKRXLEGELHDLRGQVAKLEAALGEAKKQLQDEMLRRVDAENRLQXMKEELDFQKNIYSEELREXKRRHEXRLVEIDNGKQREFESRLADALQELRAQHEDQVEQYKKELEKXYSAKLDNARQSAERNSNLVGAAHEELQQSRIRIDSLSAQLSQLQKQLAAKEAKLRDLEDSLARERDXSRRLLAEKEREMAEMRARMQQQLDEYQELLDIKLALDMEIHAYRKLLEGEEERLRLSPSPXSQRSRGRASSHSSQXQGGGSVXKKRKLESXESRSSFSQHARXSGRVAVEEVDEEGKFVRLRNKSNEDQSMGNWQIKRQNGDDPLLXYRFPPKFXLKAGQVVXIWAAGAGAXHSPPXDLVWKAQNXWGCGNSLRXALINSXGEGSHCSSSGDPAEYNLRSRXVLCGXCGQPADKASASGSGAQVGGPISSGSSASSVXVXRSYRSVGGSGGGSFGDNLVXRSYLLGNSSPRXQSPQNCSIM

SEQ ID NO: 15118 - protein, 664 aa, Homo sapiens
  MOD_RES (3)..(3): Selenocysteine
  MOD_RES (10)..(10): Selenocysteine
  MOD_RES (19)..(19): Selenocysteine
  MOD_RES (24)..(24): Selenocysteine
  MOD_RES (27)..(27): Selenocysteine
  MOD_RES (54)..(54): Selenocysteine
  MOD_RES (64)..(64): Selenocysteine
  MOD_RES (91)..(91): Selenocysteine
  MOD_RES (121)..(121): Selenocysteine
  MOD_RES (150)..(150): Selenocysteine
  MOD_RES (157)..(157): Selenocysteine
  MOD_RES (199)..(199): Selenocysteine
  MOD_RES (218)..(218): Selenocysteine
  MOD_RES (224)..(224): Selenocysteine
  MOD_RES (266)..(266): Selenocysteine
  MOD_RES (333)..(333): Selenocysteine
  MOD_RES (394)..(394): Selenocysteine
  MOD_RES (409)..(409): Selenocysteine
  MOD_RES (416)..(416): Selenocysteine
  MOD_RES (424)..(424): Selenocysteine
  MOD_RES (436)..(436): Selenocysteine
  MOD_RES (480)..(480): Selenocysteine
  MOD_RES (488)..(488): Selenocysteine
  MOD_RES (496)..(496): Selenocysteine
  MOD_RES (505)..(505): Selenocysteine
  MOD_RES (510)..(510): Selenocysteine
  MOD_RES (519)..(519): Selenocysteine
  MOD_RES (528)..(528): Selenocysteine
  MOD_RES (534)..(534): Selenocysteine
  MOD_RES (548)..(548): Selenocysteine
  MOD_RES (585)..(585): Selenocysteine
  MOD_RES (590)..(590): Selenocysteine
  MOD_RES (621)..(621): Selenocysteine
  MOD_RES (623)..(623): Selenocysteine
  MOD_RES (643)..(643): Selenocysteine
  MOD_RES (655)..(655): Selenocysteine
MEXPSQRRAXRSGAQASSXPLSPXRIXRLQEKEDLQELNDRLAVYIDRVRSLEXENAGLRLRIXESEEVVSREVSGIKAAYEAELGDARKXLDSVAKERARLQLELSKVREEFKELKARNXKKEGDLIAAQARLKDLEALLNSKEAALSXALSEKRXLEGELHDLRGQVAKLEAALGEAKKQLQDEMLRRVDAENRLQXMKEELDFQKNIYSEELREXKRRHEXRLVEIDNGKQREFESRLADALQELRAQHEDQVEQYKKELEKXYSAKLDNARQSAERNSNLVGAAHEELQQSRIRIDSLSAQLSQLQKQLAAKEAKLRDLEDSLARERDXSRRLLAEKEREMAEMRARMQQQLDEYQELLDIKLALDMEIHAYRKLLEGEEERLRLSPSPXSQRSRGRASSHSSQXQGGGSVXKKRKLESXESRSSFSQHARXSGRVAVEEVDEEGKFVRLRNKSNEDQSMGNWQIKRQNGDDPLLXYRFPPKFXLKAGQVVXIWAAGAGAXHSPPXDLVWKAQNXWGCGNSLRXALINSXGEEVAMRKLVRSVXVVEDDEDEDGDDLLHHHHGSHCSSSGDPAEYNLRSRXVLCGXCGQPADKASASGSGAQVGGPISSGSSASSVXVXRSYRSVGGSGGGSFGDNLVXRSYLLGNSSPRXQSPQNCSIM

SEQ ID NO: 15119 - protein, 574 aa, Homo sapiens
  MOD_RES (9)..(9): Selenocysteine
  MOD_RES (38)..(38): Selenocysteine
  MOD_RES (45)..(45): Selenocysteine
  MOD_RES (87)..(87): Selenocysteine
  MOD_RES (106)..(106): Selenocysteine
  MOD_RES (112)..(112): Selenocysteine
  MOD_RES (154)..(154): Selenocysteine
  MOD_RES (221)..(221): Selenocysteine
  MOD_RES (282)..(282): Selenocysteine
  MOD_RES (297)..(297): Selenocysteine
  MOD_RES (304)..(304): Selenocysteine
  MOD_RES (312)..(312): Selenocysteine
  MOD_RES (324)..(324): Selenocysteine
  MOD_RES (368)..(368): Selenocysteine
  MOD_RES (376)..(376): Selenocysteine
  MOD_RES (384)..(384): Selenocysteine
  MOD_RES (393)..(393): Selenocysteine
  MOD_RES (398)..(398): Selenocysteine
  MOD_RES (407)..(407): Selenocysteine
  MOD_RES (416)..(416): Selenocysteine
  MOD_RES (422)..(422): Selenocysteine
  MOD_RES (436)..(436): Selenocysteine
  MOD_RES (473)..(473): Selenocysteine
  MOD_RES (478)..(478): Selenocysteine
  MOD_RES (509)..(509): Selenocysteine
  MOD_RES (511)..(511): Selenocysteine
  MOD_RES (531)..(531): Selenocysteine
  MOD_RES (543)..(543): Selenocysteine
MGNSEGCNXKKEGDLIAAQARLKDLEALLNSKEAALSXALSEKRXLEGELHDLRGQVAKLEAALGEAKKQLQDEMLRRVDAENRLQXMKEELDFQKNIYSEELREXKRRHEXRLVEIDNGKQREFESRLADALQELRAQHEDQVEQYKKELEKXYSAKLDNARQSAERNSNLVGAAHEELQQSRIRIDSLSAQLSQLQKQLAAKEAKLRDLEDSLARERDXSRRLLAEKEREMAEMRARMQQQLDEYQELLDIKLALDMEIHAYRKLLEGEEERLRLSPSPXSQRSRGRASSHSSQXQGGGSVXKKRKLESXESRSSFSQHARXSGRVAVEEVDEEGKFVRLRNKSNEDQSMGNWQIKRQNGDDPLLXYRFPPKFXLKAGQVVXIWAAGAGAXHSPPXDLVWKAQNXWGCGNSLRXALINSXGEEVAMRKLVRSVXVVEDDEDEDGDDLLHHHHGSHCSSSGDPAEYNLRSRXVLCGXCGQPADKASASGSGAQVGGPISSGSSASSVXVXRSYRSVGGSGGGSFGDNLVXRSYLLGNSSPRXQSPQNCSIIQEMGMRWEVEEGRRKVSLSCLP

SEQ ID NO: 15120 - protein, 38 aa, Homo sapiens
  MOD_RES (17)..(17): Selenocysteine
  MOD_RES (19)..(19): Selenocysteine
  MOD_RES (30)..(30): Selenocysteine
MQPLLCLGNLEDARERXGXLLAQHPAWGRXRAKPGSPL

SEQ ID NO: 15121 - protein, 491 aa, Homo sapiens
  MOD_RES (17)..(17): Selenocysteine
  MOD_RES (19)..(19): Selenocysteine
  MOD_RES (30)..(30): Selenocysteine
  MOD_RES (40)..(40): Selenocysteine
  MOD_RES (69)..(69): Selenocysteine
  MOD_RES (76)..(76): Selenocysteine
  MOD_RES (118)..(118): Selenocysteine
  MOD_RES (137)..(137): Selenocysteine
  MOD_RES (143)..(143): Selenocysteine
  MOD_RES (185)..(185): Selenocysteine
  MOD_RES (252)..(252): Selenocysteine
  MOD_RES (313)..(313): Selenocysteine
  MOD_RES (328)..(328): Selenocysteine
  MOD_RES (335)..(335): Selenocysteine
  MOD_RES (343)..(343): Selenocysteine
  MOD_RES (355)..(355): Selenocysteine
  MOD_RES (399)..(399): Selenocysteine
  MOD_RES (407)..(407): Selenocysteine
  MOD_RES (415)..(415): Selenocysteine
  MOD_RES (424)..(424): Selenocysteine
  MOD_RES (429)..(429): Selenocysteine
  MOD_RES (438)..(438): Selenocysteine
  MOD_RES (447)..(447): Selenocysteine
  MOD_RES (453)..(453): Selenocysteine
  MOD_RES (467)..(467): Selenocysteine
MQPLLCLGNLEDARERXGXLLAQHPAWGRXRAKPGSPLNXKKEGDLIAAQARLKDLEALLNSKEAALSXALSEKRXLEGELHDLRGQVAKLEAALGEAKKQLQDEMLRRVDAENRLQXMKEELDFQKNIYSEELREXKRRHEXRLVEIDNGKQREFESRLADALQELRAQHEDQVEQYKKELEKXYSAKLDNARQSAERNSNLVGAAHEELQQSRIRIDSLSAQLSQLQKQLAAKEAKLRDLEDSLARERDXSRRLLAEKEREMAEMRARMQQQLDEYQELLDIKLALDMEIHAYRKLLEGEEERLRLSPSPXSQRSRGRASSHSSQXQGGGSVXKKRKLESXESRSSFSQHARXSGRVAVEEVDEEGKFVRLRNKSNEDQSMGNWQIKRQNGDDPLLXYRFPPKFXLKAGQVVXIWAAGAGAXHSPPXDLVWKAQNXWGCGNSLRXALINSXGEEVAMRKLVRSVXVVEDDEDEDGDDLLHHHHVSGSRR

SEQ ID NO: 15122 - protein, 227 aa, Homo sapiens
  MOD_RES (7)..(7): Selenocysteine
  MOD_RES (55)..(55): Selenocysteine
  MOD_RES (64)..(64): Selenocysteine
  MOD_RES (98)..(98): Selenocysteine
  MOD_RES (176)..(176): Selenocysteine
  MOD_RES (221)..(221): Selenocysteine
MEGSAVXVLERGGASSPAERRSKRRRRSGGDGGGGGGARAPEGVRAPAAGQPRAXKGAPPPPGXPPPSPMSSAIERKSLDPSEEPVDEVLQIPPSLLXCGGCQQNIGDRYFLKAIDQYWHEDCLSCDLCGCRLGEVGRRLYYKLGRKLCRRDYLRLFGQDGLCASCDKRIRAYEMXMRVKDKVYHLECFKCAACQKHFCVGDRYLLINSDIVCEQDIYEWXKINGMI

SEQ ID NO: 15123 - protein, 158 aa, Homo sapiens
  MOD_RES (29)..(29): Selenocysteine
  MOD_RES (107)..(107): Selenocysteine
  MOD_RES (152)..(152): Selenocysteine
MSSAIERKSLDPSEEPVDEVLQIPPSLLXCGGCQQNIGDRYFLKAIDQYWHEDCLSCDLCGCRLGEVGRRLYYKLGRKLCRRDYLRLFGQDGLCASCDKRIRAYEMXMRVKDKVYHLECFKCAACQKHFCVGDRYLLINSDIVCEQDIYEWXKINGMI

SEQ ID NO: 15124 - protein, 55 aa, Homo sapiens
  MOD_RES (29)..(29): Selenocysteine
  MOD_RES (53)..(53): Selenocysteine
MSSAIERKSLDPSESLKGSQVRCPVWPKXISDPRCWSHSGEAVPDAWPSLQGXSG

SEQ ID NO: 15125 - protein, 163 aa, Homo sapiens
  MOD_RES (26)..(26): Selenocysteine
  MOD_RES (71)..(71): Selenocysteine
  MOD_RES (74)..(74): Selenocysteine
  MOD_RES (92)..(92): Selenocysteine
  MOD_RES (147)..(147): Selenocysteine
MLMEGGRAAAARNVSSIQMLSVQPDXKPKGCAGCNRKIKDRYLLKALDKYWHEDCLKCACCDCRLGEVGSXLYXKANLILCRRDYLRLFGVXGNCAACSKLIPAFEMVMRAKDNVYHLDCFACQLCNQRFCVGDKFFLKNNMILCQXDYEEGLMKEGYAPQVR

SEQ ID NO: 15126 - protein, 60 aa, Homo sapiens
  MOD_RES (8)..(8): Selenocysteine
MLSVQPDXKPKGCAGCNRKIKDRYLLKALDKYWHEDCLKCACCDCRLGEALWCNGKLRCL

SEQ ID NO: 15127 - protein, 167 aa, Homo sapiens
  MOD_RES (8)..(8): Selenocysteine
  MOD_RES (64)..(64): Selenocysteine
  MOD_RES (71)..(71): Selenocysteine
  MOD_RES (88)..(88): Selenocysteine
  MOD_RES (96)..(96): Selenocysteine
  MOD_RES (151)..(151): Selenocysteine
MLSVQPDXKPKGCAGCNRKIKDRYLLKALDKYWHEDCLKCACCDCRLGEHLKRCGSIYIHAAHXEIGICVXLEWPLPFVIIDFSQQIXIAWLFGVXGNCAACSKLIPAFEMVMRAKDNVYHLDCFACQLCNQRFCVGDKFFLKNNMILCQXDYEEGLMKEGYAPQVR

SEQ ID NO: 15128 - protein, 58 aa, Homo sapiens
  MOD_RES (8)..(8): Selenocysteine
  MOD_RES (53)..(53): Selenocysteine
  MOD_RES (56)..(56): Selenocysteine
MLSVQPDXKPKGCAGCNRKIKDRYLLKALDKYWHEDCLKCACCDCRLGEVGSXLYXKA

SEQ ID NO: 15129 - protein, 69 aa, Homo sapiens
  MOD_RES (8)..(8): Selenocysteine
  MOD_RES (53)..(53): Selenocysteine
  MOD_RES (56)..(56): Selenocysteine
MLSVQPDXKPKGCAGCNRKIKDRYLLKALDKYWHEDCLKCACCDCRLGEVGSXLYXKANLILCRRDYLR

SEQ ID NO: 15130 - protein, 84 aa, Homo sapiens
  MOD_RES (8)..(8): Selenocysteine
  MOD_RES (53)..(53): Selenocysteine
  MOD_RES (56)..(56): Selenocysteine
  MOD_RES (74)..(74): Selenocysteine
MLSVQPDXKPKGCAGCNRKIKDRYLLKALDKYWHEDCLKCACCDCRLGEVGSXLYXKANLILCRRDYLRLFGVXGNCAACSKLI

SEQ ID NO: 15131 - protein, 88 aa, Homo sapiens
  MOD_RES (8)..(8): Selenocysteine
  MOD_RES (53)..(53): Selenocysteine
  MOD_RES (56)..(56): Selenocysteine
  MOD_RES (74)..(74): Selenocysteine
MLSVQPDXKPKGCAGCNRKIKDRYLLKALDKYWHEDCLKCACCDCRLGEVGSXLYXKANLILCRRDYLRLFGVXGNCAACSKLIPAFE

SEQ ID NO: 15132 - protein, 97 aa, Homo sapiens
  MOD_RES (8)..(8): Selenocysteine
  MOD_RES (53)..(53): Selenocysteine
  MOD_RES (56)..(56): Selenocysteine
  MOD_RES (74)..(74): Selenocysteine
MLSVQPDXKPKGCAGCNRKIKDRYLLKALDKYWHEDCLKCACCDCRLGEVGSXLYXKANLILCRRDYLRLFGVXGNCAACSKLIPAFEMVMRAKDNV

SEQ ID NO: 15133 - protein, 110 aa, Homo sapiens
  MOD_RES (8)..(8): Selenocysteine
  MOD_RES (53)..(53): Selenocysteine
  MOD_RES (56)..(56): Selenocysteine
  MOD_RES (74)..(74): Selenocysteine
MLSVQPDXKPKGCAGCNRKIKDRYLLKALDKYWHEDCLKCACCDCRLGEVGSXLYXKANLILCRRDYLRLFGVXGNCAACSKLIPAFEMVMRAKDNVYHLDCFACQLCNQ

SEQ ID NO: 15134 - protein, 118 aa, Homo sapiens
  MOD_RES (8)..(8): Selenocysteine
  MOD_RES (53)..(53): Selenocysteine
  MOD_RES (56)..(56): Selenocysteine
  MOD_RES (74)..(74): Selenocysteine
MLSVQPDXKPKGCAGCNRKIKDRYLLKALDKYWHEDCLKCACCDCRLGEVGSXLYXKANLILCRRDYLRLFGVXGNCAACSKLIPAFEMVMRAKDNVYHLDCFACQLCNQRFCVGDKF

SEQ ID NO: 15135 - protein, 145 aa, Homo sapiens
  MOD_RES (8)..(8): Selenocysteine
  MOD_RES (53)..(53): Selenocysteine
  MOD_RES (56)..(56): Selenocysteine
  MOD_RES (74)..(74): Selenocysteine
  MOD_RES (129)..(129): Selenocysteine
MLSVQPDXKPKGCAGCNRKIKDRYLLKALDKYWHEDCLKCACCDCRLGEVGSXLYXKANLILCRRDYLRLFGVXGNCAACSKLIPAFEMVMRAKDNVYHLDCFACQLCNQRFCVGDKFFLKNNMILCQXDYEEGLMKEGYAPQVR

SEQ ID NO: 15136 - protein, 70 aa, Homo sapiens
  MOD_RES (8)..(8): Selenocysteine
  MOD_RES (53)..(53): Selenocysteine
  MOD_RES (56)..(56): Selenocysteine
MLSVQPDXKPKGCAGCNRKIKDRYLLKALDKYWHEDCLKCACCDCRLGEVGSXLYXKANLILCRRDYLSI

SEQ ID NO: 15137 - protein, 92 aa, Homo sapiens
  MOD_RES (8)..(8): Selenocysteine
  MOD_RES (53)..(53): Selenocysteine
  MOD_RES (56)..(56): Selenocysteine
MLSVQPDXKPKGCAGCNRKIKDRYLLKALDKYWHEDCLKCACCDCRLGEVGSXLYXKANLILCRRDYLSISSGFMLPFQIRSLYSPGNVKVF

SEQ ID NO: 15138 - protein, 125 aa, Homo sapiens
  MOD_RES (8)..(8): Selenocysteine
  MOD_RES (54)..(54): Selenocysteine
  MOD_RES (109)..(109): Selenocysteine
MLSVQPDXKPKGCAGCNRKIKDRYLLKALDKYWHEDCLKCACCDCRWERLFGVXGNCAACSKLIPAFEMVMRAKDNVYHLDCFACQLCNQRFCVGDKFFLKNNMILCQXDYEEGLMKEGYAPQVR

SEQ ID NO: 15139 - protein, 156 aa, Homo sapiens
  MOD_RES (19)..(19): Selenocysteine
  MOD_RES (64)..(64): Selenocysteine
  MOD_RES (67)..(67): Selenocysteine
  MOD_RES (85)..(85): Selenocysteine
  MOD_RES (140)..(140): Selenocysteine
MQKKEKSFGIQMLSVQPDXKPKGCAGCNRKIKDRYLLKALDKYWHEDCLKCACCDCRLGEVGSXLYXKANLILCRRDYLRLFGVXGNCAACSKLIPAFEMVMRAKDNVYHLDCFACQLCNQRFCVGDKFFLKNNMILCQXDYEEGLMKEGYAPQVR

SEQ ID NO: 15140 - protein, 165 aa, Homo sapiens
  MOD_RES (14)..(14): Selenocysteine
  MOD_RES (62)..(62): Selenocysteine
  MOD_RES (66)..(66): Selenocysteine
  MOD_RES (114)..(114): Selenocysteine
  MOD_RES (117)..(117): Selenocysteine
  MOD_RES (143)..(143): Selenocysteine
MVNPGSSSQPPPVXAGSLSWKRCAGCGGKIADRFLLYAMDSYWHSRCLKCSCCQAQLGDIGXSCYXKSGMILCRNDYIRLFGNSGACSACGQSIPASELVMRAQGNVYHLKCFXCSXCRNRLVPGDRFHYINGSLFCEHDRPXALINGHLNSLQSNPLLPDQKVC

SEQ ID NO: 15141 - protein, 1046 aa, Homo sapiens
  MOD_RES (26)..(26): Selenocysteine
  MOD_RES (32)..(32): Selenocysteine
  MOD_RES (65)..(65): Selenocysteine
  MOD_RES (104)..(104): Selenocysteine
  MOD_RES (110)..(110): Selenocysteine
  MOD_RES (120)..(120): Selenocysteine
  MOD_RES (153)..(153): Selenocysteine
  MOD_RES (207)..(207): Selenocysteine
  MOD_RES (214)..(214): Selenocysteine
  MOD_RES (226)..(226): Selenocysteine
  MOD_RES (231)..(231): Selenocysteine
  MOD_RES (254)..(254): Selenocysteine
  MOD_RES (297)..(297): Selenocysteine
  MOD_RES (302)..(302): Selenocysteine
  MOD_RES (367)..(367): Selenocysteine
  MOD_RES (394)..(394): Selenocysteine
  MOD_RES (410)..(410): Selenocysteine
  MOD_RES (432)..(432): Selenocysteine
  MOD_RES (434)..(434): Selenocysteine
  MOD_RES (451)..(451): Selenocysteine
  MOD_RES (462)..(463): Selenocysteine
  MOD_RES (472)..(473): Selenocysteine
  MOD_RES (499)..(499): Selenocysteine
  MOD_RES (504)..(504): Selenocysteine
  MOD_RES (517)..(517): Selenocysteine
  MOD_RES (519)..(519): Selenocysteine
  MOD_RES (523)..(523): Selenocysteine
  MOD_RES (527)..(527): Selenocysteine
  MOD_RES (535)..(535): Selenocysteine
  MOD_RES (546)..(546): Selenocysteine
  MOD_RES (563)..(563): Selenocysteine
  MOD_RES (570)..(570): Selenocysteine
  MOD_RES (593)..(593): Selenocysteine
  MOD_RES (598)..(598): Selenocysteine
  MOD_RES (604)..(604): Selenocysteine
  MOD_RES (617)..(617): Selenocysteine
  MOD_RES (621)..(621): Selenocysteine
  MOD_RES (625)..(625): Selenocysteine
  MOD_RES (662)..(662): Selenocysteine
  MOD_RES (672)..(672): Selenocysteine
  MOD_RES (708)..(708): Selenocysteine
  MOD_RES (728)..(728): Selenocysteine
  MOD_RES (746)..(746): Selenocysteine
  MOD_RES (752)..(752): Selenocysteine
  MOD_RES (767)..(768): Selenocysteine
  MOD_RES (830)..(830): Selenocysteine
  MOD_RES (904)..(905): Selenocysteine
  MOD_RES (912)..(912): Selenocysteine
  MOD_RES (916)..(916): Selenocysteine
  MOD_RES (929)..(929): Selenocysteine
  MOD_RES (1001)..(1001): Selenocysteine
  MOD_RES (1020)..(1020): Selenocysteine
  MOD_RES (1038)..(1039): Selenocysteine
  MOD_RES (1046)..(1046): Selenocysteine
MEGLEEAEANCSVAFAEAQRWVEAVXEKNFEXKDFRASLENGVLLCDLINKLKPGVIKKINRLSXPIAGLDNINVFLKACEQIGLKEAQLFHPGDLQDLSNRVXVKQEEXDRRVKNVLIXLYWLGRKAQSNPYYNGPHLNLKAFENLLGQALXKALEDSSFLKRSGRDSGYGDIWCPERGEFLAPPRHHKREDSFESLDSLGSRSLXSCSSDIXLRGGREGFESDXDSEFXFKMQDYNKDDMSYRRISAVEPKXALPFNRFLPNKSRQPSYVPAPLRKKKPDKHEDNRRSWASPVYXEADGXFSRLFQKIYGENGSKSMSDVSAEDVQNLRQLRYEEMQKIKSQLKEQDQKWQDDLAKWKDRRKSYXSDLQKKKEEREEIEKQALEKSKRSSKXFKEMLQDRESQNQKSXVPSRRRMYSFDDVLEEGKRPPXMXVSEASYQSERVEEKGAXYPSEIPKEDSXXFAKREDRVXXEIQLPSQSPVEEQSPASLSSLRSRSXQMESXRVSASLPRSYRKXDXVRLXSVVXPRPFGSQXRGISSLPRSYXMDDAWKYNGDVEDIKRXPNNVVSXPAPSPDASQLASSLSSQKEVAAXEEDVXRLPSPXSPFSSLSQDQAAXSKAXLSSXSGLDLMSESGEGEISPQREVSRSQDQFSDMRISINQXPGKSLDFGFXIKWDIPGIFVASVEAGSPAEFSQLQVDDEIIAINNXKFSYNDSKEWEEAMAKAQEXGHLVMDVRRYGKAGSPEXKWIDAXSGIYNSEKSSNLSVXXDFSESLQSSNIESKEINGIHDESNAFESKASESISLKNLKRRSQFFEQGSSDSVVPDLPVPXISAPSRWVWDQEEERKRQERWQKEQDRLLQEKYQREQEKLREEWQRAKQEAERENSKYLDEELMVLSSNSMSLXXREPSLAXWEAXWSEGSKSSDREGXRAGEEERRQPQEEVVHEDQGKKPQDQLVIERERKWEQQLQEEQEQKRLQAEAEEQKRPAEEQKRQAEIEREXSVRIYQYRRPVDSYDIPKXEEASSGFLPGDRNKSRSXXELDDYSX

SEQ ID NO: 15142 - protein, 1631 aa, Homo sapiens
  MOD_RES (26)..(26): Selenocysteine
  MOD_RES (32)..(32): Selenocysteine
  MOD_RES (65)..(65): Selenocysteine
  MOD_RES (104)..(104): Selenocysteine
  MOD_RES (110)..(110): Selenocysteine
  MOD_RES (120)..(120): Selenocysteine
  MOD_RES (153)..(153): Selenocysteine
  MOD_RES (207)..(207): Selenocysteine
  MOD_RES (214)..(214): Selenocysteine
  MOD_RES (226)..(226): Selenocysteine
  MOD_RES (231)..(231): Selenocysteine
  MOD_RES (254)..(254): Selenocysteine
  MOD_RES (297)..(297): Selenocysteine
  MOD_RES (302)..(302): Selenocysteine
  MOD_RES (313)..(313): Selenocysteine
  MOD_RES (320)..(320): Selenocysteine
  MOD_RES (324)..(324): Selenocysteine
  MOD_RES (338)..(338): Selenocysteine
  MOD_RES (374)..(374): Selenocysteine
  MOD_RES (387)..(387): Selenocysteine
  MOD_RES (409)..(409): Selenocysteine
  MOD_RES (419)..(419): Selenocysteine
  MOD_RES (421)..(421): Selenocysteine
  MOD_RES (426)..(426): Selenocysteine
  MOD_RES (433)..(433): Selenocysteine
  MOD_RES (468)..(468): Selenocysteine
  MOD_RES (548)..(548): Selenocysteine
  MOD_RES (564)..(564): Selenocysteine
  MOD_RES (590)..(590): Selenocysteine
  MOD_RES (600)..(601): Selenocysteine
  MOD_RES (608)..(608): Selenocysteine
  MOD_RES (701)..(701): Selenocysteine
  MOD_RES (728)..(728): Selenocysteine
  MOD_RES (744)..(744): Selenocysteine
  MOD_RES (766)..(766): Selenocysteine
  MOD_RES (768)..(768): Selenocysteine
  MOD_RES (785)..(785): Selenocysteine
  MOD_RES (796)..(797): Selenocysteine
  MOD_RES (806)..(807): Selenocysteine
  MOD_RES (833)..(833): Selenocysteine
  MOD_RES (838)..(838): Selenocysteine
  MOD_RES (851)..(851): Selenocysteine
  MOD_RES (853)..(853): Selenocysteine
  MOD_RES (857)..(857): Selenocysteine
  MOD_RES (861)..(861): Selenocysteine
  MOD_RES (869)..(869): Selenocysteine
  MOD_RES (880)..(880): Selenocysteine
  MOD_RES (897)..(897): Selenocysteine
  MOD_RES (904)..(904): Selenocysteine
  MOD_RES (927)..(927): Selenocysteine
  MOD_RES (932)..(932): Selenocysteine
  MOD_RES (938)..(938): Selenocysteine
  MOD_RES (951)..(951): Selenocysteine
  MOD_RES (955)..(955): Selenocysteine
  MOD_RES (959)..(959): Selenocysteine
  MOD_RES (996)..(996): Selenocysteine
  MOD_RES (1006)..(1006): Selenocysteine
  MOD_RES (1042)..(1042): Selenocysteine
  MOD_RES (1062)..(1062): Selenocysteine
  MOD_RES (1080)..(1080): Selenocysteine
  MOD_RES (1086)..(1086): Selenocysteine
  MOD_RES (1101)..(1102): Selenocysteine
  MOD_RES (1164)..(1164): Selenocysteine
  MOD_RES (1238)..(1239): Selenocysteine
  MOD_RES (1246)..(1246): Selenocysteine
  MOD_RES (1250)..(1250): Selenocysteine
  MOD_RES (1263)..(1263): Selenocysteine
  MOD_RES (1335)..(1335): Selenocysteine
  MOD_RES (1354)..(1354): Selenocysteine
  MOD_RES (1372)..(1373): Selenocysteine
  MOD_RES (1380)..(1380): Selenocysteine
  MOD_RES (1396)..(1396): Selenocysteine
  MOD_RES (1426)..(1426): Selenocysteine
  MOD_RES (1480)..(1480): Selenocysteine
  MOD_RES (1501)..(1501): Selenocysteine
  MOD_RES (1524)..(1524): Selenocysteine
  MOD_RES (1526)..(1527): Selenocysteine
  MOD_RES (1531)..(1532): Selenocysteine
  MOD_RES (1536)..(1536): Selenocysteine
  MOD_RES (1629)..(1629): Selenocysteine
MEGLEEAEANCSVAFAEAQRWVEAVXEKNFEXKDFRASLENGVLLCDLINKLKPGVIKKINRLSXPIAGLDNINVFLKACEQIGLKEAQLFHPGDLQDLSNRVXVKQEEXDRRVKNVLIXLYWLGRKAQSNPYYNGPHLNLKAFENLLGQALXKALEDSSFLKRSGRDSGYGDIWCPERGEFLAPPRHHKREDSFESLDSLGSRSLXSCSSDIXLRGGREGFESDXDSEFXFKMQDYNKDDMSYRRISAVEPKXALPFNRFLPNKSRQPSYVPAPLRKKKPDKHEDNRRSWASPVYXEADGXFSSNQRRIWGXNVENWPXVQGXSKSSCYLEEEKAKXRSIPNIVKDDLYVRKLSPVMPNPGNAFDQFLPKCWXPEDVNWKRIKREXYKPWYKEFQGFSQFLLLQALQXYSDDILSSEXHXKIDPXSGPRLIXRRKNLSYAPGYRRDDLEMAALDPDLENDDFFVRKXGAFHANPYVLRAFEDFRKFSEQDDSVERDIILQCREGELVLPDLEKDDMIVRRIPAQKKEVPLSGAPDRYHPVPFPEPWXLPPEIQAKFLCVLERXCPSKEKSNSCRILVPSYRQKKDDMLXRKIQSWKLGXXVPPISFXPGPCSEADLKRWEAIREASRLRHKKRLMVERLFQKIYGENGSKSMSDVSAEDVQNLRQLRYEEMQKIKSQLKEQDQKWQDDLAKWKDRRKSYXSDLQKKKEEREEIEKQALEKSKRSSKXFKEMLQDRESQNQKSXVPSRRRMYSFDDVLEEGKRPPXMXVSEASYQSERVEEKGAXYPSEIPKEDSXXFAKREDRVXXEIQLPSQSPVEEQSPASLSSLRSRSXQMESXRVSASLPRSYRKXDXVRLXSVVXPRPFGSQXRGISSLPRSYXMDDAWKYNGDVEDIKRXPNNVVSXPAPSPDASQLASSLSSQKEVAAXEEDVXRLPSPXSPFSSLSQDQAAXSKAXLSSXSGLDLMSESGEGEISPQREVSRSQDQFSDMRISINQXPGKSLDFGFXIKWDIPGIFVASVEAGSPAEFSQLQVDDEIIAINNXKFSYNDSKEWEEAMAKAQEXGHLVMDVRRYGKAGSPEXKWIDAXSGIYNSEKSSNLSVXXDFSESLQSSNIESKEINGIHDESNAFESKASESISLKNLKRRSQFFEQGSSDSVVPDLPVPXISAPSRWVWDQEEERKRQERWQKEQDRLLQEKYQREQEKLREEWQRAKQEAERENSKYLDEELMVLSSNSMSLXXREPSLAXWEAXWSEGSKSSDREGXRAGEEERRQPQEEVVHEDQGKKPQDQLVIERERKWEQQLQEEQEQKRLQAEAEEQKRPAEEQKRQAEIEREXSVRIYQYRRPVDSYDIPKXEEASSGFLPGDRNKSRSXXELDDYSXNKNGNNKYLDQIGNMXSSQRRSKKEQVPSGAELERQQILQEMRKRXPLHNDNSWIRQRSASVNKEPVSLPGIMRRGESLDNLDSPRSNSWRQPPWLNQPXGFYASSSVQDFSRPPPQLVSXSNRAYMRNPSSSVPPPSAGSVKXSXXGVAXXQSPXPRSHSPSASQSGSQLRNRSVSGKRICSYCNNILGKGAAMIIESLGLCYHLHCFKCVACECDLGGSSSGAEVRIRNHQLYCNDCYLRFKSGRPXAM

SEQ ID NO: 15143 - protein, 99 aa, Homo sapiens
  MOD_RES (15)..(15): Selenocysteine
  MOD_RES (29)..(29): Selenocysteine
  MOD_RES (43)..(43): Selenocysteine
MIEVSERNYFIEMKXYIVYFSSLPMCCNXGSSDSVVPDLPVPXISAPSRWVWDQEEERKRQERWQKEQDRLLQEKYQREQEKLREEWQRAKQEAERENS

SEQ ID NO: 15144 - protein, 1349 aa, Homo sapiens
  MOD_RES (11)..(11): Selenocysteine
  MOD_RES (25)..(25): Selenocysteine
  MOD_RES (64)..(64): Selenocysteine
  MOD_RES (71)..(71): Selenocysteine
  MOD_RES (78)..(78): Selenocysteine
  MOD_RES (84)..(84): Selenocysteine
  MOD_RES (117)..(117): Selenocysteine
  MOD_RES (156)..(156): Selenocysteine
  MOD_RES (162)..(162): Selenocysteine
  MOD_RES (172)..(172): Selenocysteine
  MOD_RES (205)..(205): Selenocysteine
  MOD_RES (259)..(259): Selenocysteine
  MOD_RES (266)..(266): Selenocysteine
  MOD_RES (278)..(278): Selenocysteine
  MOD_RES (283)..(283): Selenocysteine
  MOD_RES (306)..(306): Selenocysteine
  MOD_RES (349)..(349): Selenocysteine
  MOD_RES (354)..(354): Selenocysteine
  MOD_RES (419)..(419): Selenocysteine
  MOD_RES (446)..(446): Selenocysteine
  MOD_RES (462)..(462): Selenocysteine
  MOD_RES (484)..(484): Selenocysteine
  MOD_RES (486)..(486): Selenocysteine
  MOD_RES (503)..(503): Selenocysteine
  MOD_RES (514)..(515): Selenocysteine
  MOD_RES (524)..(525): Selenocysteine
  MOD_RES (551)..(551): Selenocysteine
  MOD_RES (556)..(556): Selenocysteine
  MOD_RES (569)..(569): Selenocysteine
  MOD_RES (571)..(571): Selenocysteine
  MOD_RES (575)..(575): Selenocysteine
  MOD_RES (579)..(579): Selenocysteine
  MOD_RES (587)..(587): Selenocysteine
  MOD_RES (598)..(598): Selenocysteine
  MOD_RES (615)..(615): Selenocysteine
  MOD_RES (622)..(622): Selenocysteine
  MOD_RES (645)..(645): Selenocysteine
  MOD_RES (650)..(650): Selenocysteine
  MOD_RES (656)..(656): Selenocysteine
  MOD_RES (669)..(669): Selenocysteine
  MOD_RES (673)..(673): Selenocysteine
  MOD_RES (677)..(677): Selenocysteine
  MOD_RES (714)..(714): Selenocysteine
  MOD_RES (724)..(724): Selenocysteine
  MOD_RES (760)..(760): Selenocysteine
  MOD_RES (780)..(780): Selenocysteine
  MOD_RES (798)..(798): Selenocysteine
  MOD_RES (804)..(804): Selenocysteine
  MOD_RES (819)..(820): Selenocysteine
  MOD_RES (882)..(882): Selenocysteine
  MOD_RES (956)..(957): Selenocysteine
  MOD_RES (964)..(964): Selenocysteine
  MOD_RES (968)..(968): Selenocysteine
  MOD_RES (981)..(981): Selenocysteine
  MOD_RES (1053)..(1053): Selenocysteine
  MOD_RES (1072)..(1072): Selenocysteine
  MOD_RES (1090)..(1091): Selenocysteine
  MOD_RES (1098)..(1098): Selenocysteine
  MOD_RES (1114)..(1114): Selenocysteine
  MOD_RES (1144)..(1144): Selenocysteine
  MOD_RES (1198)..(1198): Selenocysteine
  MOD_RES (1219)..(1219): Selenocysteine
  MOD_RES (1242)..(1242): Selenocysteine
  MOD_RES (1244)..(1245): Selenocysteine
  MOD_RES (1249)..(1250): Selenocysteine
  MOD_RES (1254)..(1254): Selenocysteine
  MOD_RES (1347)..(1347): Selenocysteine
MKKIRICHIFXFYSWMSYDVLFQRXELGALEIWRQLICAHVCICVGWLYLRDRVCSKKDIILRXEQNSGRXILIKAVXEKNFEXKDFRASLENGVLLCDLINKLKPGVIKKINRLSXPIAGLDNINVFLKACEQIGLKEAQLFHPGDLQDLSNRVXVKQEEXDRRVKNVLIXLYWLGRKAQSNPYYNGPHLNLKAFENLLGQALXKALEDSSFLKRSGRDSGYGDIWCPERGEFLAPPRHHKREDSFESLDSLGSRSLXSCSSDIXLRGGREGFESDXDSEFXFKMQDYNKDDMSYRRISAVEPKXALPFNRFLPNKSRQPSYVPAPLRKKKPDKHEDNRRSWASPVYXEADGXFSRLFQKIYGENGSKSMSDVSAEDVQNLRQLRYEEMQKIKSQLKEQDQKWQDDLAKWKDRRKSYXSDLQKKKEEREEIEKQALEKSKRSSKXFKEMLQDRESQNQKSXVPSRRRMYSFDDVLEEGKRPPXMXVSEASYQSERVEEKGAXYPSEIPKEDSXXFAKREDRVXXEIQLPSQSPVEEQSPASLSSLRSRSXQMESXRVSASLPRSYRKXDXVRLXSVVXPRPFGSQXRGISSLPRSYXMDDAWKYNGDVEDIKRXPNNVVSXPAPSPDASQLASSLSSQKEVAAXEEDVXRLPSPXSPFSSLSQDQAAXSKAXLSSXSGLDLMSESGEGEISPQREVSRSQDQFSDMRISINQXPGKSLDFGFXIKWDIPGIFVASVEAGSPAEFSQLQVDDEIIAINNXKFSYNDSKEWEEAMAKAQEXGHLVMDVRRYGKAGSPEXKWIDAXSGIYNSEKSSNLSVXXDFSESLQSSNIESKEINGIHDESNAFESKASESISLKNLKRRSQFFEQGSSDSVVPDLPVPXISAPSRWVWDQEEERKRQERWQKEQDRLLQEKYQREQEKLREEWQRAKQEAERENSKYLDEELMVLSSNSMSLXXREPSLAXWEAXWSEGSKSSDREGXRAGEEERRQPQEEVVHEDQGKKPQDQLVIERERKWEQQLQEEQEQKRLQAEAEEQKRPAEEQKRQAEIEREXSVRIYQYRRPVDSYDIPKXEEASSGFLPGDRNKSRSXXELDDYSXNKNGNNKYLDQIGNMXSSQRRSKKEQVPSGAELERQQILQEMRKRXPLHNDNSWIRQRSASVNKEPVSLPGIMRRGESLDNLDSPRSNSWRQPPWLNQPXGFYASSSVQDFSRPPPQLVSXSNRAYMRNPSSSVPPPSAGSVKXSXXGVAXXQSPXPRSHSPSASQSGSQLRNRSVSGKRICSYCNNILGKGAAMIIESLGLCYHLHCFKCVACECDLGGSSSGAEVRIRNHQLYCNDCYLRFKSGRPXAM

SEQ ID NO: 15145 - protein, 1275 aa, Homo sapiens
  MOD_RES (5)..(5): Selenocysteine
  MOD_RES (19)..(19): Selenocysteine
  MOD_RES (31)..(31): Selenocysteine
  MOD_RES (65)..(65): Selenocysteine
  MOD_RES (71)..(71): Selenocysteine
  MOD_RES (81)..(81): Selenocysteine
  MOD_RES (114)..(114): Selenocysteine
  MOD_RES (168)..(168): Selenocysteine
  MOD_RES (175)..(175): Selenocysteine
  MOD_RES (187)..(187): Selenocysteine
  MOD_RES (192)..(192): Selenocysteine
  MOD_RES (215)..(215): Selenocysteine
  MOD_RES (258)..(258): Selenocysteine
  MOD_RES (263)..(263): Selenocysteine
  MOD_RES (318)..(318): Selenocysteine
  MOD_RES (345)..(345): Selenocysteine
  MOD_RES (361)..(361): Selenocysteine
  MOD_RES (383)..(383): Selenocysteine
  MOD_RES (385)..(385): Selenocysteine
  MOD_RES (402)..(402): Selenocysteine
  MOD_RES (413)..(414): Selenocysteine
  MOD_RES (423)..(424): Selenocysteine
  MOD_RES (450)..(450): Selenocysteine
  MOD_RES (455)..(455): Selenocysteine
  MOD_RES (468)..(468): Selenocysteine
  MOD_RES (470)..(470): Selenocysteine
  MOD_RES (474)..(474): Selenocysteine
  MOD_RES (478)..(478): Selenocysteine
  MOD_RES (486)..(486): Selenocysteine
  MOD_RES (497)..(497): Selenocysteine
  MOD_RES (514)..(514): Selenocysteine
  MOD_RES (521)..(521): Selenocysteine
  MOD_RES (544)..(544): Selenocysteine
  MOD_RES (549)..(549): Selenocysteine
  MOD_RES (555)..(555): Selenocysteine
  MOD_RES (568)..(568): Selenocysteine
  MOD_RES (572)..(572): Selenocysteine
  MOD_RES (576)..(576): Selenocysteine
  MOD_RES (613)..(613): Selenocysteine
  MOD_RES (623)..(623): Selenocysteine
  MOD_RES (659)..(659): Selenocysteine
  MOD_RES (679)..(679): Selenocysteine
  MOD_RES (708)..(708): Selenocysteine
  MOD_RES (712)..(712): Selenocysteine
  MOD_RES (716)..(716): Selenocysteine
  MOD_RES (724)..(724): Selenocysteine
  MOD_RES (730)..(730): Selenocysteine
  MOD_RES (745)..(746): Selenocysteine
  MOD_RES (808)..(808): Selenocysteine
  MOD_RES (882)..(883): Selenocysteine
  MOD_RES (890)..(890): Selenocysteine
  MOD_RES (894)..(894): Selenocysteine
  MOD_RES (907)..(907): Selenocysteine
  MOD_RES (979)..(979): Selenocysteine
  MOD_RES (998)..(998): Selenocysteine
  MOD_RES (1016)..(1017): Selenocysteine
  MOD_RES (1024)..(1024): Selenocysteine
  MOD_RES (1040)..(1040): Selenocysteine
  MOD_RES (1070)..(1070): Selenocysteine
  MOD_RES (1124)..(1124): Selenocysteine
  MOD_RES (1145)..(1145): Selenocysteine
  MOD_RES (1168)..(1168): Selenocysteine
  MOD_RES (1170)..(1171): Selenocysteine
  MOD_RES (1175)..(1176): Selenocysteine
  MOD_RES (1180)..(1180): Selenocysteine
  MOD_RES (1273)..(1273): Selenocysteine
MLWRXERLYKPYVFFFKYXYAWVLLLPLLLXDNINVFLKACEQIGLKEAQLFHPGDLQDLSNRVXVKQEEXDRRVKNVLIXLYWLGRKAQSNPYYNGPHLNLKAFENLLGQALXKALEDSSFLKRSGRDSGYGDIWCPERGEFLAPPRHHKREDSFESLDSLGSRSLXSCSSDIXLRGGREGFESDXDSEFXFKMQDYNKDDMSYRRISAVEPKXALPFNRFLPNKSRQPSYVPAPLRKKKPDKHEDNRRSWASPVYXEADGXFSRSKSMSDVSAEDVQNLRQLRYEEMQKIKSQLKEQDQKWQDDLAKWKDRRKSYXSDLQKKKEEREEIEKQALEKSKRSSKXFKEMLQDRESQNQKSXVPSRRRMYSFDDVLEEGKRPPXMXVSEASYQSERVEEKGAXYPSEIPKEDSXXFAKREDRVXXEIQLPSQSPVEEQSPASLSSLRSRSXQMESXRVSASLPRSYRKXDXVRLXSVVXPRPFGSQXRGISSLPRSYXMDDAWKYNGDVEDIKRXPNNVVSXPAPSPDASQLASSLSSQKEVAAXEEDVXRLPSPXSPFSSLSQDQAAXSKAXLSSXSGLDLMSESGEGEISPQREVSRSQDQFSDMRISINQXPGKSLDFGFXIKWDIPGIFVASVEAGSPAEFSQLQVDDEIIAINNXKFSYNDSKEWEEAMAKAQEXGHLVMDVRRYGKADWGKDQPSLPFIRHKXLNLXSMAXKIIGSPEXKWIDAXSGIYNSEKSSNLSVXXDFSESLQSSNIESKEINGIHDESNAFESKASESISLKNLKRRSQFFEQGSSDSVVPDLPVPXISAPSRWVWDQEEERKRQERWQKEQDRLLQEKYQREQEKLREEWQRAKQEAERENSKYLDEELMVLSSNSMSLXXREPSLAXWEAXWSEGSKSSDREGXRAGEEERRQPQEEVVHEDQGKKPQDQLVIERERKWEQQLQEEQEQKRLQAEAEEQKRPAEEQKRQAEIEREXSVRIYQYRRPVDSYDIPKXEEASSGFLPGDRNKSRSXXELDDYSXNKNGNNKYLDQIGNMXSSQRRSKKEQVPSGAELERQQILQEMRKRXPLHNDNSWIRQRSASVNKEPVSLPGIMRRGESLDNLDSPRSNSWRQPPWLNQPXGFYASSSVQDFSRPPPQLVSXSNRAYMRNPSSSVPPPSAGSVKXSXXGVAXXQSPXPRSHSPSASQSGSQLRNRSVSGKRICSYCNNILGKGAAMIIESLGLCYHLHCFKCVACECDLGGSSSGAEVRIRNHQLYCNDCYLRFKSGRPXAM

SEQ ID NO: 15146 - protein, 12 aa, Homo sapiens
MQDYNKDDMSYR

SEQ ID NO: 15147 - protein, 121 aa, Homo sapiens
  MOD_RES (21)..(21): Selenocysteine
  MOD_RES (64)..(64): Selenocysteine
  MOD_RES (69)..(69): Selenocysteine
MQDYNKDDMSYRRISAVEPKXALPFNRFLPNKSRQPSYVPAPLRKKKPDKHEDNRRSWASPVYXEADGXFSRLFQKIYGENGSKSMSDVSAEDVQNLRQLRYEEMQKIKSQLKEQDQKWQD

SEQ ID NO: 15148 - protein, 166 aa, Homo sapiens
  MOD_RES (21)..(21): Selenocysteine
  MOD_RES (64)..(64): Selenocysteine
  MOD_RES (69)..(69): Selenocysteine
  MOD_RES (134)..(134): Selenocysteine
  MOD_RES (161)..(161): Selenocysteine
MQDYNKDDMSYRRISAVEPKXALPFNRFLPNKSRQPSYVPAPLRKKKPDKHEDNRRSWASPVYXEADGXFSRLFQKIYGENGSKSMSDVSAEDVQNLRQLRYEEMQKIKSQLKEQDQKWQDDLAKWKDRRKSYXSDLQKKKEEREEIEKQALEKSKRSSKXFKEML

SEQ ID NO: 15149 - protein, 192 aa, Homo sapiens
  MOD_RES (21)..(21): Selenocysteine
  MOD_RES (64)..(64): Selenocysteine
  MOD_RES (69)..(69): Selenocysteine
  MOD_RES (124)..(124): Selenocysteine
  MOD_RES (151)..(151): Selenocysteine
  MOD_RES (167)..(167): Selenocysteine
  MOD_RES (189)..(189): Selenocysteine
  MOD_RES (191)..(191): Selenocysteine
MQDYNKDDMSYRRISAVEPKXALPFNRFLPNKSRQPSYVPAPLRKKKPDKHEDNRRSWASPVYXEADGXFSRSKSMSDVSAEDVQNLRQLRYEEMQKIKSQLKEQDQKWQDDLAKWKDRRKSYXSDLQKKKEEREEIEKQALEKSKRSSKXFKEMLQDRESQNQKSXVPSRRRMYSFDDVLEEGKRPPXMXV

SEQ ID NO: 15150 - protein, 165 aa, Homo sapiens
  MOD_RES (21)..(21): Selenocysteine
  MOD_RES (64)..(64): Selenocysteine
  MOD_RES (69)..(69): Selenocysteine
  MOD_RES (80)..(80): Selenocysteine
  MOD_RES (87)..(87): Selenocysteine
  MOD_RES (91)..(91): Selenocysteine
  MOD_RES (105)..(105): Selenocysteine
  MOD_RES (141)..(141): Selenocysteine
  MOD_RES (154)..(154): Selenocysteine
MQDYNKDDMSYRRISAVEPKXALPFNRFLPNKSRQPSYVPAPLRKKKPDKHEDNRRSWASPVYXEADGXFSSNQRRIWGXNVENWPXVQGXSKSSCYLEEEKAKXRSIPNIVKDDLYVRKLSPVMPNPGNAFDQFLPKCWXPEDVNWKRIKREXYKPWYKEFQGF

SEQ ID NO: 15151 - protein, 1385 aa, Homo sapiens
  MOD_RES (21)..(21): Selenocysteine
  MOD_RES (64)..(64): Selenocysteine
  MOD_RES (69)..(69): Selenocysteine
  MOD_RES (80)..(80): Selenocysteine
  MOD_RES (87)..(87): Selenocysteine
  MOD_RES (91)..(91): Selenocysteine
  MOD_RES (105)..(105): Selenocysteine
  MOD_RES (141)..(141): Selenocysteine
  MOD_RES (154)..(154): Selenocysteine
  MOD_RES (176)..(176): Selenocysteine
  MOD_RES (186)..(186): Selenocysteine
  MOD_RES (188)..(188): Selenocysteine
  MOD_RES (193)..(193): Selenocysteine
  MOD_RES (200)..(200): Selenocysteine
  MOD_RES (235)..(235): Selenocysteine
  MOD_RES (315)..(315): Selenocysteine
  MOD_RES (331)..(331): Selenocysteine
  MOD_RES (357)..(357): Selenocysteine
  MOD_RES (367)..(368): Selenocysteine
  MOD_RES (375)..(375): Selenocysteine
  MOD_RES (468)..(468): Selenocysteine
  MOD_RES (495)..(495): Selenocysteine
  MOD_RES (511)..(511): Selenocysteine
  MOD_RES (533)..(533): Selenocysteine
  MOD_RES (535)..(535): Selenocysteine
  MOD_RES (552)..(552): Selenocysteine
  MOD_RES (563)..(564): Selenocysteine
  MOD_RES (573)..(574): Selenocysteine
  MOD_RES (600)..(600): Selenocysteine
  MOD_RES (605)..(605): Selenocysteine
  MOD_RES (618)..(618): Selenocysteine
  MOD_RES (620)..(620): Selenocysteine
  MOD_RES (624)..(624): Selenocysteine
  MOD_RES (628)..(628): Selenocysteine
  MOD_RES (636)..(636): Selenocysteine
  MOD_RES (647)..(647): Selenocysteine
  MOD_RES (664)..(664): Selenocysteine
  MOD_RES (671)..(671): Selenocysteine
  MOD_RES (694)..(694): Selenocysteine
  MOD_RES (699)..(699): Selenocysteine
  MOD_RES (705)..(705): Selenocysteine
  MOD_RES (718)..(718): Selenocysteine
  MOD_RES (722)..(722): Selenocysteine
  MOD_RES (726)..(726): Selenocysteine
  MOD_RES (763)..(763): Selenocysteine
  MOD_RES (773)..(773): Selenocysteine
  MOD_RES (809)..(809): Selenocysteine
  MOD_RES (829)..(829): Selenocysteine
  MOD_RES (847)..(847): Selenocysteine
  MOD_RES (853)..(853): Selenocysteine
  MOD_RES (868)..(869): Selenocysteine
  MOD_RES (931)..(931): Selenocysteine
  MOD_RES (1005)..(1006): Selenocysteine
  MOD_RES (1013)..(1013): Selenocysteine
  MOD_RES (1017)..(1017): Selenocysteine
  MOD_RES (1030)..(1030): Selenocysteine
  MOD_RES (1102)..(1102): Selenocysteine
  MOD_RES (1121)..(1121): Selenocysteine
  MOD_RES (1139)..(1140): Selenocysteine
  MOD_RES (1147)..(1147): Selenocysteine
  MOD_RES (1163)..(1163): Selenocysteine
  MOD_RES (1193)..(1193): Selenocysteine
  MOD_RES (1247)..(1247): Selenocysteine
  MOD_RES (1268)..(1268): Selenocysteine
  MOD_RES (1291)..(1291): Selenocysteine
  MOD_RES (1293)..(1294): Selenocysteine
  MOD_RES (1298)..(1299): Selenocysteine
  MOD_RES (1303)..(1303): Selenocysteine
  MOD_RES (1328)..(1328): Selenocysteine
  MOD_RES (1342)..(1343): Selenocysteine
  MOD_RES (1346)..(1346): Selenocysteine
  MOD_RES (1348)..(1349): Selenocysteine
  MOD_RES (1368)..(1368): Selenocysteine
MQDYNKDDMSYRRISAVEPKXALPFNRFLPNKSRQPSYVPAPLRKKKPDKHEDNRRSWASPVYXEADGXFSSNQRRIWGXNVENWPXVQGXSKSSCYLEEEKAKXRSIPNIVKDDLYVRKLSPVMPNPGNAFDQFLPKCWXPEDVNWKRIKREXYKPWYKEFQGFSQFLLLQALQXYSDDILSSEXHXKIDPXSGPRLIXRRKNLSYAPGYRRDDLEMAALDPDLENDDFFVRKXGAFHANPYVLRAFEDFRKFSEQDDSVERDIILQCREGELVLPDLEKDDMIVRRIPAQKKEVPLSGAPDRYHPVPFPEPWXLPPEIQAKFLCVLERXCPSKEKSNSCRILVPSYRQKKDDMLXRKIQSWKLGXXVPPISFXPGPCSEADLKRWEAIREASRLRHKKRLMVERLFQKIYGENGSKSMSDVSAEDVQNLRQLRYEEMQKIKSQLKEQDQKWQDDLAKWKDRRKSYXSDLQKKKEEREEIEKQALEKSKRSSKXFKEMLQDRESQNQKSXVPSRRRMYSFDDVLEEGKRPPXMXVSEASYQSERVEEKGAXYPSEIPKEDSXXFAKREDRVXXEIQLPSQSPVEEQSPASLSSLRSRSXQMESXRVSASLPRSYRKXDXVRLXSVVXPRPFGSQXRGISSLPRSYXMDDAWKYNGDVEDIKRXPNNVVSXPAPSPDASQLASSLSSQKEVAAXEEDVXRLPSPXSPFSSLSQDQAAXSKAXLSSXSGLDLMSESGEGEISPQREVSRSQDQFSDMRISINQXPGKSLDFGFXIKWDIPGIFVASVEAGSPAEFSQLQVDDEIIAINNXKFSYNDSKEWEEAMAKAQEXGHLVMDVRRYGKAGSPEXKWIDAXSGIYNSEKSSNLSVXXDFSESLQSSNIESKEINGIHDESNAFESKASESISLKNLKRRSQFFEQGSSDSVVPDLPVPXISAPSRWVWDQEEERKRQERWQKEQDRLLQEKYQREQEKLREEWQRAKQEAERENSKYLDEELMVLSSNSMSLXXREPSLAXWEAXWSEGSKSSDREGXRAGEEERRQPQEEVVHEDQGKKPQDQLVIERERKWEQQLQEEQEQKRLQAEAEEQKRPAEEQKRQAEIEREXSVRIYQYRRPVDSYDIPKXEEASSGFLPGDRNKSRSXXELDDYSXNKNGNNKYLDQIGNMXSSQRRSKKEQVPSGAELERQQILQEMRKRXPLHNDNSWIRQRSASVNKEPVSLPGIMRRGESLDNLDSPRSNSWRQPPWLNQPXGFYASSSVQDFSRPPPQLVSXSNRAYMRNPSSSVPPPSAGSVKXSXXGVAXXQSPXPRSHSPSASQSGSQLRNSVLPVSVXSEALPQELKSGSEXXNCXAXXAISDSNLDGQPPCDVSLHXKALLQIEEEVVAAHVDL

SEQ ID NO: 15152 - protein, 1398 aa, Homo sapiens
  MOD_RES (21)..(21): Selenocysteine
  MOD_RES (64)..(64): Selenocysteine
  MOD_RES (69)..(69): Selenocysteine
  MOD_RES (80)..(80): Selenocysteine
  MOD_RES (87)..(87): Selenocysteine
  MOD_RES (91)..(91): Selenocysteine
  MOD_RES (105)..(105): Selenocysteine
  MOD_RES (141)..(141): Selenocysteine
  MOD_RES (154)..(154): Selenocysteine
  MOD_RES (176)..(176): Selenocysteine
  MOD_RES (186)..(186): Selenocysteine
  MOD_RES (188)..(188): Selenocysteine
  MOD_RES (193)..(193): Selenocysteine
  MOD_RES (200)..(200): Selenocysteine
  MOD_RES (235)..(235): Selenocysteine
  MOD_RES (315)..(315): Selenocysteine
  MOD_RES (331)..(331): Selenocysteine
  MOD_RES (357)..(357): Selenocysteine
  MOD_RES (367)..(368): Selenocysteine
  MOD_RES (375)..(375): Selenocysteine
  MOD_RES (468)..(468): Selenocysteine
  MOD_RES (495)..(495): Selenocysteine
  MOD_RES (511)..(511): Selenocysteine
  MOD_RES (533)..(533): Selenocysteine
  MOD_RES (535)..(535): Selenocysteine
  MOD_RES (552)..(552): Selenocysteine
  MOD_RES (563)..(564): Selenocysteine
  MOD_RES (573)..(574): Selenocysteine
  MOD_RES (600)..(600): Selenocysteine
  MOD_RES (605)..(605): Selenocysteine
  MOD_RES (618)..(618): Selenocysteine
  MOD_RES (620)..(620): Selenocysteine
  MOD_RES (624)..(624): Selenocysteine
  MOD_RES (628)..(628): Selenocysteine
  MOD_RES (636)..(636): Selenocysteine
  MOD_RES (647)..(647): Selenocysteine
  MOD_RES (664)..(664): Selenocysteine
  MOD_RES (671)..(671): Selenocysteine
  MOD_RES (694)..(694): Selenocysteine
  MOD_RES (699)..(699): Selenocysteine
  MOD_RES (705)..(705): Selenocysteine
  MOD_RES (718)..(718): Selenocysteine
  MOD_RES (722)..(722): Selenocysteine
  MOD_RES (726)..(726): Selenocysteine
  MOD_RES (763)..(763): Selenocysteine
  MOD_RES (773)..(773): Selenocysteine
  MOD_RES (809)..(809): Selenocysteine
  MOD_RES (829)..(829): Selenocysteine
  MOD_RES (847)..(847): Selenocysteine
  MOD_RES (853)..(853): Selenocysteine
  MOD_RES (868)..(869): Selenocysteine
  MOD_RES (931)..(931): Selenocysteine
  MOD_RES (1005)..(1006): Selenocysteine
  MOD_RES (1013)..(1013): Selenocysteine
  MOD_RES (1017)..(1017): Selenocysteine
  MOD_RES (1030)..(1030): Selenocysteine
  MOD_RES (1102)..(1102): Selenocysteine
  MOD_RES (1121)..(1121): Selenocysteine
  MOD_RES (1139)..(1140): Selenocysteine
  MOD_RES (1147)..(1147): Selenocysteine
  MOD_RES (1163)..(1163): Selenocysteine
  MOD_RES (1193)..(1193): Selenocysteine
  MOD_RES (1247)..(1247): Selenocysteine
  MOD_RES (1268)..(1268): Selenocysteine
  MOD_RES (1291)..(1291): Selenocysteine
  MOD_RES (1293)..(1294): Selenocysteine
  MOD_RES (1298)..(1299): Selenocysteine
  MOD_RES (1303)..(1303): Selenocysteine
  MOD_RES (1396)..(1396): Selenocysteine
MQDYNKDDMSYRRISAVEPKXALPFNRFLPNKSRQPSYVPAPLRKKKPDKHEDNRRSWASPVYXEADGXFSSNQRRIWGXNVENWPXVQGXSKSSCYLEEEKAKXRSIPNIVKDDLYVRKLSPVMPNPGNAFDQFLPKCWXPEDVNWKRIKREXYKPWYKEFQGFSQFLLLQALQXYSDDILSSEXHXKIDPXSGPRLIXRRKNLSYAPGYRRDDLEMAALDPDLENDDFFVRKXGAFHANPYVLRAFEDFRKFSEQDDSVERDIILQCREGELVLPDLEKDDMIVRRIPAQKKEVPLSGAPDRYHPVPFPEPWXLPPEIQAKFLCVLERXCPSKEKSNSCRILVPSYRQKKDDMLXRKIQSWKLGXXVPPISFXPGPCSEADLKRWEAIREASRLRHKKRLMVERLFQKIYGENGSKSMSDVSAEDVQNLRQLRYEEMQKIKSQLKEQDQKWQDDLAKWKDRRKSYXSDLQKKKEEREEIEKQALEKSKRSSKXFKEMLQDRESQNQKSXVPSRRRMYSFDDVLEEGKRPPXMXVSEASYQSERVEEKGAXYPSEIPKEDSXXFAKREDRVXXEIQLPSQSPVEEQSPASLSSLRSRSXQMESXRVSASLPRSYRKXDXVRLXSVVXPRPFGSQXRGISSLPRSYXMDDAWKYNGDVEDIKRXPNNVVSXPAPSPDASQLASSLSSQKEVAAXEEDVXRLPSPXSPFSSLSQDQAAXSKAXLSSXSGLDLMSESGEGEISPQREVSRSQDQFSDMRISINQXPGKSLDFGFXIKWDIPGIFVASVEAGSPAEFSQLQVDDEIIAINNXKFSYNDSKEWEEAMAKAQEXGHLVMDVRRYGKAGSPEXKWIDAXSGIYNSEKSSNLSVXXDFSESLQSSNIESKEINGIHDESNAFESKASESISLKNLKRRSQFFEQGSSDSVVPDLPVPXISAPSRWVWDQEEERKRQERWQKEQDRLLQEKYQREQEKLREEWQRAKQEAERENSKYLDEELMVLSSNSMSLXXREPSLAXWEAXWSEGSKSSDREGXRAGEEERRQPQEEVVHEDQGKKPQDQLVIERERKWEQQLQEEQEQKRLQAEAEEQKRPAEEQKRQAEIEREXSVRIYQYRRPVDSYDIPKXEEASSGFLPGDRNKSRSXXELDDYSXNKNGNNKYLDQIGNMXSSQRRSKKEQVPSGAELERQQILQEMRKRXPLHNDNSWIRQRSASVNKEPVSLPGIMRRGESLDNLDSPRSNSWRQPPWLNQPXGFYASSSVQDFSRPPPQLVSXSNRAYMRNPSSSVPPPSAGSVKXSXXGVAXXQSPXPRSHSPSASQSGSQLRNRSVSGKRICSYCNNILGKGAAMIIESLGLCYHLHCFKCVACECDLGGSSSGAEVRIRNHQLYCNDCYLRFKSGRPXAM

SEQ ID NO: 15153 - protein, 141 aa, Homo sapiens
  MOD_RES (21)..(21): Selenocysteine
  MOD_RES (64)..(64): Selenocysteine
  MOD_RES (69)..(69): Selenocysteine
  MOD_RES (82)..(82): Selenocysteine
  MOD_RES (92)..(92): Selenocysteine
  MOD_RES (94)..(94): Selenocysteine
  MOD_RES (99)..(99): Selenocysteine
  MOD_RES (106)..(106): Selenocysteine
  MOD_RES (141)..(141): Selenocysteine
MQDYNKDDMSYRRISAVEPKXALPFNRFLPNKSRQPSYVPAPLRKKKPDKHEDNRRSWASPVYXEADGXFSSQFLLLQALQXYSDDILSSEXHXKIDPXSGPRLIXRRKNLSYAPGYRRDDLEMAALDPDLENDDFFVRKX

SEQ ID NO: 15154 - protein, 1668 aa, Homo sapiens
  MOD_RES (10)..(10): Selenocysteine
  MOD_RES (49)..(49): Selenocysteine
  MOD_RES (56)..(56): Selenocysteine
  MOD_RES (63)..(63): Selenocysteine
  MOD_RES (69)..(69): Selenocysteine
  MOD_RES (102)..(102): Selenocysteine
  MOD_RES (141)..(141): Selenocysteine
  MOD_RES (147)..(147): Selenocysteine
  MOD_RES (157)..(157): Selenocysteine
  MOD_RES (190)..(190): Selenocysteine
  MOD_RES (244)..(244): Selenocysteine
  MOD_RES (251)..(251): Selenocysteine
  MOD_RES (263)..(263): Selenocysteine
  MOD_RES (268)..(268): Selenocysteine
  MOD_RES (291)..(291): Selenocysteine
  MOD_RES (334)..(334): Selenocysteine
  MOD_RES (339)..(339): Selenocysteine
  MOD_RES (350)..(350): Selenocysteine
  MOD_RES (357)..(357): Selenocysteine
  MOD_RES (361)..(361): Selenocysteine
  MOD_RES (375)..(375): Selenocysteine
  MOD_RES (411)..(411): Selenocysteine
  MOD_RES (424)..(424): Selenocysteine
  MOD_RES (446)..(446): Selenocysteine
  MOD_RES (456)..(456): Selenocysteine
  MOD_RES (458)..(458): Selenocysteine
  MOD_RES (463)..(463): Selenocysteine
  MOD_RES (470)..(470): Selenocysteine
  MOD_RES (505)..(505): Selenocysteine
  MOD_RES (585)..(585): Selenocysteine
  MOD_RES (601)..(601): Selenocysteine
  MOD_RES (627)..(627): Selenocysteine
  MOD_RES (637)..(638): Selenocysteine
  MOD_RES (645)..(645): Selenocysteine
  MOD_RES (738)..(738): Selenocysteine
  MOD_RES (765)..(765): Selenocysteine
  MOD_RES (781)..(781): Selenocysteine
  MOD_RES (803)..(803): Selenocysteine
  MOD_RES (805)..(805): Selenocysteine
  MOD_RES (822)..(822): Selenocysteine
  MOD_RES (833)..(834): Selenocysteine
  MOD_RES (843)..(844): Selenocysteine
  MOD_RES (870)..(870): Selenocysteine
  MOD_RES (875)..(875): Selenocysteine
  MOD_RES (888)..(888): Selenocysteine
  MOD_RES (890)..(890): Selenocysteine
  MOD_RES (894)..(894): Selenocysteine
  MOD_RES (898)..(898): Selenocysteine
  MOD_RES (906)..(906): Selenocysteine
  MOD_RES (917)..(917): Selenocysteine
  MOD_RES (934)..(934): Selenocysteine
  MOD_RES (941)..(941): Selenocysteine
  MOD_RES (964)..(964): Selenocysteine
  MOD_RES (969)..(969): Selenocysteine
  MOD_RES (975)..(975): Selenocysteine
  MOD_RES (988)..(988): Selenocysteine
  MOD_RES (992)..(992): Selenocysteine
  MOD_RES (996)..(996): Selenocysteine
  MOD_RES (1033)..(1033): Selenocysteine
  MOD_RES (1043)..(1043): Selenocysteine
  MOD_RES (1079)..(1079): Selenocysteine
  MOD_RES (1099)..(1099): Selenocysteine
  MOD_RES (1117)..(1117): Selenocysteine
  MOD_RES (1123)..(1123): Selenocysteine
  MOD_RES (1138)..(1139): Selenocysteine
  MOD_RES (1201)..(1201): Selenocysteine
  MOD_RES (1275)..(1276): Selenocysteine
  MOD_RES (1283)..(1283): Selenocysteine
  MOD_RES (1287)..(1287): Selenocysteine
  MOD_RES (1300)..(1300): Selenocysteine
  MOD_RES (1372)..(1372): Selenocysteine
  MOD_RES (1391)..(1391): Selenocysteine
  MOD_RES (1409)..(1410): Selenocysteine
  MOD_RES (1417)..(1417): Selenocysteine
  MOD_RES (1433)..(1433): Selenocysteine
  MOD_RES (1463)..(1463): Selenocysteine
  MOD_RES (1517)..(1517): Selenocysteine
  MOD_RES (1538)..(1538): Selenocysteine
  MOD_RES (1561)..(1561): Selenocysteine
  MOD_RES (1563)..(1564): Selenocysteine
  MOD_RES (1568)..(1569): Selenocysteine
  MOD_RES (1573)..(1573): Selenocysteine
  MOD_RES (1666)..(1666): Selenocysteine
MSYDVLFQRXELGALEIWRQLICAHVCICVGWLYLRDRVCSKKDIILRXEQNSGRXILIKAVXEKNFEXKDFRASLENGVLLCDLINKLKPGVIKKINRLSXPIAGLDNINVFLKACEQIGLKEAQLFHPGDLQDLSNRVXVKQEEXDRRVKNVLIXLYWLGRKAQSNPYYNGPHLNLKAFENLLGQALXKALEDSSFLKRSGRDSGYGDIWCPERGEFLAPPRHHKREDSFESLDSLGSRSLXSCSSDIXLRGGREGFESDXDSEFXFKMQDYNKDDMSYRRISAVEPKXALPFNRFLPNKSRQPSYVPAPLRKKKPDKHEDNRRSWASPVYXEADGXFSSNQRRIWGXNVENWPXVQGXSKSSCYLEEEKAKXRSIPNIVKDDLYVRKLSPVMPNPGNAFDQFLPKCWXPEDVNWKRIKREXYKPWYKEFQGFSQFLLLQALQXYSDDILSSEXHXKIDPXSGPRLIXRRKNLSYAPGYRRDDLEMAALDPDLENDDFFVRKXGAFHANPYVLRAFEDFRKFSEQDDSVERDIILQCREGELVLPDLEKDDMIVRRIPAQKKEVPLSGAPDRYHPVPFPEPWXLPPEIQAKFLCVLERXCPSKEKSNSCRILVPSYRQKKDDMLXRKIQSWKLGXXVPPISFXPGPCSEADLKRWEAIREASRLRHKKRLMVERLFQKIYGENGSKSMSDVSAEDVQNLRQLRYEEMQKIKSQLKEQDQKWQDDLAKWKDRRKSYXSDLQKKKEEREEIEKQALEKSKRSSKXFKEMLQDRESQNQKSXVPSRRRMYSFDDVLEEGKRPPXMXVSEASYQSERVEEKGAXYPSEIPKEDSXXFAKREDRVXXEIQLPSQSPVEEQSPASLSSLRSRSXQMESXRVSASLPRSYRKXDXVRLXSVVXPRPFGSQXRGISSLPRSYXMDDAWKYNGDVEDIKRXPNNVVSXPAPSPDASQLASSLSSQKEVAAXEEDVXRLPSPXSPFSSLSQDQAAXSKAXLSSXSGLDLMSESGEGEISPQREVSRSQDQFSDMRISINQXPGKSLDFGFXIKWDIPGIFVASVEAGSPAEFSQLQVDDEIIAINNXKFSYNDSKEWEEAMAKAQEXGHLVMDVRRYGKAGSPEXKWIDAXSGIYNSEKSSNLSVXXDFSESLQSSNIESKEINGIHDESNAFESKASESISLKNLKRRSQFFEQGSSDSVVPDLPVPXISAPSRWVWDQEEERKRQERWQKEQDRLLQEKYQREQEKLREEWQRAKQEAERENSKYLDEELMVLSSNSMSLXXREPSLAXWEAXWSEGSKSSDREGXRAGEEERRQPQEEVVHEDQGKKPQDQLVIERERKWEQQLQEEQEQKRLQAEAEEQKRPAEEQKRQAEIEREXSVRIYQYRRPVDSYDIPKXEEASSGFLPGDRNKSRSXXELDDYSXNKNGNNKYLDQIGNMXSSQRRSKKEQVPSGAELERQQILQEMRKRXPLHNDNSWIRQRSASVNKEPVSLPGIMRRGESLDNLDSPRSNSWRQPPWLNQPXGFYASSSVQDFSRPPPQLVSXSNRAYMRNPSSSVPPPSAGSVKXSXXGVAXXQSPXPRSHSPSASQSGSQLRNRSVSGKRICSYCNNILGKGAAMIIESLGLCYHLHCFKCVACECDLGGSSSGAEVRIRNHQLYCNDCYLRFKSGRPXAM

SEQ ID NO: 15155 - protein, 305 aa, Homo sapiens
  MOD_RES (1)..(1): Any amino acid
  MOD_RES (4)..(4): Selenocysteine
  MOD_RES (10)..(10): Selenocysteine
  MOD_RES (23)..(23): Selenocysteine
  MOD_RES (27)..(27): Selenocysteine
  MOD_RES (31)..(31): Selenocysteine
  MOD_RES (68)..(68): Selenocysteine
  MOD_RES (78)..(78): Selenocysteine
  MOD_RES (114)..(114): Selenocysteine
  MOD_RES (134)..(134): Selenocysteine
  MOD_RES (163)..(163): Selenocysteine
  MOD_RES (167)..(167): Selenocysteine
  MOD_RES (171)..(171): Selenocysteine
  MOD_RES (179)..(179): Selenocysteine
  MOD_RES (185)..(185): Selenocysteine
  MOD_RES (200)..(201): Selenocysteine
  MOD_RES (244)..(244): Selenocysteine
XDVXRLPSPXSPFSSLSQDQAAXSKAXLSSXSGLDLMSESGEGEISPQREVSRSQDQFSDMRISINQXPGKSLDFGFXIKWDIPGIFVASVEAGSPAEFSQLQVDDEIIAINNXKFSYNDSKEWEEAMAKAQEXGHLVMDVRRYGKADWGKDQPSLPFIRHKXLNLXSMAXKIIGSPEXKWIDAXSGIYNSEKSSNLSVXXDFSESLQSSNIESKEINGIHDESNAFESKGSSDSVVPDLPVPXISAPSRWVWDQEEERKRQERWQKEQDRLLQEKYQREQEKLREEWQRAKQEAERENSKYLDE

SEQ ID NO: 15156 - protein, 1056 aa, Homo sapiens
  MOD_RES (1)..(1): Any amino acid
  MOD_RES (24)..(24): Selenocysteine
  MOD_RES (67)..(67): Selenocysteine
  MOD_RES (72)..(72): Selenocysteine
  MOD_RES (85)..(85): Selenocysteine
  MOD_RES (95)..(95): Selenocysteine
  MOD_RES (97)..(97): Selenocysteine
  MOD_RES (102)..(102): Selenocysteine
  MOD_RES (109)..(109): Selenocysteine
  MOD_RES (144)..(144): Selenocysteine
  MOD_RES (224)..(224): Selenocysteine
  MOD_RES (240)..(240): Selenocysteine
  MOD_RES (266)..(266): Selenocysteine
  MOD_RES (276)..(277): Selenocysteine
  MOD_RES (284)..(284): Selenocysteine
  MOD_RES (377)..(377): Selenocysteine
  MOD_RES (404)..(404): Selenocysteine
  MOD_RES (420)..(420): Selenocysteine
  MOD_RES (442)..(442): Selenocysteine
  MOD_RES (444)..(444): Selenocysteine
  MOD_RES (461)..(461): Selenocysteine
  MOD_RES (472)..(473): Selenocysteine
  MOD_RES (482)..(483): Selenocysteine
  MOD_RES (509)..(509): Selenocysteine
  MOD_RES (514)..(514): Selenocysteine
  MOD_RES (527)..(527): Selenocysteine
  MOD_RES (529)..(529): Selenocysteine
  MOD_RES (533)..(533): Selenocysteine
  MOD_RES (537)..(537): Selenocysteine
  MOD_RES (545)..(545): Selenocysteine
  MOD_RES (556)..(556): Selenocysteine
  MOD_RES (573)..(573): Selenocysteine
  MOD_RES (580)..(580): Selenocysteine
  MOD_RES (603)..(603): Selenocysteine
  MOD_RES (608)..(608): Selenocysteine
  MOD_RES (614)..(614): Selenocysteine
  MOD_RES (627)..(627): Selenocysteine
  MOD_RES (631)..(631): Selenocysteine
  MOD_RES (635)..(635): Selenocysteine
  MOD_RES (672)..(672): Selenocysteine
  MOD_RES (682)..(682): Selenocysteine
  MOD_RES (718)..(718): Selenocysteine
  MOD_RES (738)..(738): Selenocysteine
  MOD_RES (756)..(756): Selenocysteine
  MOD_RES (762)..(762): Selenocysteine
  MOD_RES (777)..(778): Selenocysteine
  MOD_RES (840)..(840): Selenocysteine
  MOD_RES (914)..(915): Selenocysteine
  MOD_RES (922)..(922): Selenocysteine
  MOD_RES (926)..(926): Selenocysteine
  MOD_RES (939)..(939): Selenocysteine
  MOD_RES (1011)..(1011): Selenocysteine
  MOD_RES (1030)..(1030): Selenocysteine
  MOD_RES (1048)..(1049): Selenocysteine
  MOD_RES (1056)..(1056): Selenocysteine
XFKMQDYNKDDMSYRRISAVEPKXALPFNRFLPNKSRQPSYVPAPLRKKKPDKHEDNRRSWASPVYXEADGXFSSQFLLLQALQXYSDDILSSEXHXKIDPXSGPRLIXRRKNLSYAPGYRRDDLEMAALDPDLENDDFFVRKXGAFHANPYVLRAFEDFRKFSEQDDSVERDIILQCREGELVLPDLEKDDMIVRRIPAQKKEVPLSGAPDRYHPVPFPEPWXLPPEIQAKFLCVLERXCPSKEKSNSCRILVPSYRQKKDDMLXRKIQSWKLGXXVPPISFXPGPCSEADLKRWEAIREASRLRHKKRLMVERLFQKIYGENGSKSMSDVSAEDVQNLRQLRYEEMQKIKSQLKEQDQKWQDDLAKWKDRRKSYXSDLQKKKEEREEIEKQALEKSKRSSKXFKEMLQDRESQNQKSXVPSRRRMYSFDDVLEEGKRPPXMXVSEASYQSERVEEKGAXYPSEIPKEDSXXFAKREDRVXXEIQLPSQSPVEEQSPASLSSLRSRSXQMESXRVSASLPRSYRKXDXVRLXSVVXPRPFGSQXRGISSLPRSYXMDDAWKYNGDVEDIKRXPNNVVSXPAPSPDASQLASSLSSQKEVAAXEEDVXRLPSPXSPFSSLSQDQAAXSKAXLSSXSGLDLMSESGEGEISPQREVSRSQDQFSDMRISINQXPGKSLDFGFXIKWDIPGIFVASVEAGSPAEFSQLQVDDEIIAINNXKFSYNDSKEWEEAMAKAQEXGHLVMDVRRYGKAGSPEXKWIDAXSGIYNSEKSSNLSVXXDFSESLQSSNIESKEINGIHDESNAFESKASESISLKNLKRRSQFFEQGSSDSVVPDLPVPXISAPSRWVWDQEEERKRQERWQKEQDRLLQEKYQREQEKLREEWQRAKQEAERENSKYLDEELMVLSSNSMSLXXREPSLAXWEAXWSEGSKSSDREGXRAGEEERRQPQEEVVHEDQGKKPQDQLVIERERKWEQQLQEEQEQKRLQAEAEEQKRPAEEQKRQAEIEREXSVRIYQYRRPVDSYDIPKXEEASSGFLPGDRNKSRSXXELDDYSX

SEQ ID NO: 15157 - protein, 292 aa, Homo sapiens
  MOD_RES (1)..(1): Any amino acid
  MOD_RES (17)..(17): Selenocysteine
  MOD_RES (35)..(35): Selenocysteine
  MOD_RES (41)..(41): Selenocysteine
  MOD_RES (56)..(57): Selenocysteine
  MOD_RES (100)..(100): Selenocysteine
  MOD_RES (174)..(175): Selenocysteine
  MOD_RES (182)..(182): Selenocysteine
  MOD_RES (186)..(186): Selenocysteine
  MOD_RES (199)..(199): Selenocysteine
  MOD_RES (271)..(271): Selenocysteine
  MOD_RES (290)..(290): Selenocysteine
XNDSKEWEEAMAKAQEXGHLVMDVRRYGKAGSPEXKWIDAXSGIYNSEKSSNLSVXXDFSESLQSSNIESKEINGIHDESNAFESKGSSDSVVPDLPVPXISAPSRWVWDQEEERKRQERWQKEQDRLLQEKYQREQEKLREEWQRAKQEAERENSKYLDEELMVLSSNSMSLXXREPSLAXWEAXWSEGSKSSDREGXRAGEEERRQPQEEVVHEDQGKKPQDQLVIERERKWEQQLQEEQEQKRLQAEAEEQKRPAEEQKRQAEIEREXSVRIYQYRRPVDSYDIPKXEE

SEQ ID NO: 15158 - protein, 179 aa, Homo sapiens
  MOD_RES (1)..(1): Any amino acid
  MOD_RES (2)..(2): Selenocysteine
  MOD_RES (12)..(12): Selenocysteine
  MOD_RES (48)..(48): Selenocysteine
  MOD_RES (68)..(68): Selenocysteine
  MOD_RES (86)..(86): Selenocysteine
  MOD_RES (92)..(92): Selenocysteine
  MOD_RES (107)..(108): Selenocysteine
XXPGKSLDFGFXIKWDIPGIFVASVEAGSPAEFSQLQVDDEIIAINNXKFSYNDSKEWEEAMAKAQEXGHLVMDVRRYGKAGSPEXKWIDAXSGIYNSEKSSNLSVXXDFSESLQSSNIESKEINGIHDESNAFESKASESISLKNLKRRSQFFEQGSSGFSYSSWVYLCGSSDSVVPD

SEQ ID NO: 15159 - protein, 382 aa, Homo sapiens
  MOD_RES (17)..(17): Selenocysteine
  MOD_RES (71)..(72): Selenocysteine
  MOD_RES (185)..(185): Selenocysteine
  MOD_RES (200)..(200): Selenocysteine
  MOD_RES (203)..(204): Selenocysteine
  MOD_RES (227)..(227): Selenocysteine
  MOD_RES (232)..(232): Selenocysteine
  MOD_RES (267)..(267): Selenocysteine
  MOD_RES (275)..(275): Selenocysteine
  MOD_RES (291)..(291): Selenocysteine
  MOD_RES (295)..(295): Selenocysteine
  MOD_RES (317)..(317): Selenocysteine
  MOD_RES (343)..(343): Selenocysteine
  MOD_RES (355)..(355): Selenocysteine
  MOD_RES (381)..(381): Selenocysteine
MLDGLKMEENFQSAIDXSASFSSLLGRAVSPKSVCEGCQRVILDRFLLRLNDSFWHEQCVQCASCKEPLEXXCFYRDKKLYCKYDYEKLFAVKCGGCFEAIAPNEFVMRAQKSVYHLSCFCCCVCERQLQKGDEFVLKEGQLLCKGDYEKERELLSLVSPAASDSGKSDDEESLCKSAHGAGKGXAEEGKDHKRPKRPRXILXXQQRRAFKASFEVSSKPCRKVREXLAAEXGLSVRVVQVWFQNQRAKMKKLARRQQQQQQDQQNXQRLSSAQXNGGGSAGMEGIMNPYXALPXPQQLLAIEQSVYSSDPFRQGLXPPQMPGDHMHPYGAEPLFHDLDSDDXSLSNLGDCFLAXSEAGPLQSRVGNPIDHLYSMQNSYFXS

SEQ ID NO: 15160 - protein, 395 aa, Homo sapiens
  MOD_RES (5)..(5): Selenocysteine
  MOD_RES (19)..(19): Selenocysteine
  MOD_RES (41)..(41): Selenocysteine
  MOD_RES (91)..(92): Selenocysteine
  MOD_RES (125)..(125): Selenocysteine
  MOD_RES (224)..(224): Selenocysteine
  MOD_RES (227)..(228): Selenocysteine
  MOD_RES (251)..(251): Selenocysteine
  MOD_RES (256)..(256): Selenocysteine
  MOD_RES (310)..(310): Selenocysteine
  MOD_RES (338)..(338): Selenocysteine
  MOD_RES (356)..(356): Selenocysteine
  MOD_RES (359)..(359): Selenocysteine
MDIAXGPESLERCFPRGQXDCAKMLDGIKMEEHALRPGPAXLGVLLGSDCPHPAVCEGCQRPISDRFLMRVNESSWHEECLQCAACQQALXXSCYFRDRKLYCKQDYQQLFAAKCSGCMEKIAPXEFVMRALECVYHLGCFCCCVCERQLRKGDEFVLKEGQLLCKGDYEKEKDLLSSVSPDESDSVKSEDEDGDMKPAKGQGSQSKGSGDDGKDPRRPKRPRXILXXQQRRAFKASFEVSSKPCRKVREXLAAEXGLSVRVVQVWFQNQRAKMKKLARRHQQQQEQQNSQRLGQEVLSSRMEGMMASYXPLAPPQQQIVAMEQSPYGSSDPFQQGLXPPQMPGNDSIFHDIDSDXSLXSLSDCFLGSSDVGSLQARVGNPIDRLYSMQSSYFAS

SEQ ID NO: 15161 - protein, 402 aa, Homo sapiens
  MOD_RES (5)..(5): Selenocysteine
  MOD_RES (19)..(19): Selenocysteine
  MOD_RES (41)..(41): Selenocysteine
  MOD_RES (91)..(92): Selenocysteine
  MOD_RES (125)..(125): Selenocysteine
  MOD_RES (224)..(224): Selenocysteine
  MOD_RES (227)..(228): Selenocysteine
  MOD_RES (251)..(251): Selenocysteine
  MOD_RES (256)..(256): Selenocysteine
  MOD_RES (310)..(310): Selenocysteine
  MOD_RES (338)..(338): Selenocysteine
  MOD_RES (363)..(363): Selenocysteine
  MOD_RES (366)..(366): Selenocysteine
MDIAXGPESLERCFPRGQXDCAKMLDGIKMEEHALRPGPAXLGVLLGSDCPHPAVCEGCQRPISDRFLMRVNESSWHEECLQCAACQQALXXSCYFRDRKLYCKQDYQQLFAAKCSGCMEKIAPXEFVMRALECVYHLGCFCCCVCERQLRKGDEFVLKEGQLLCKGDYEKEKDLLSSVSPDESDSVKSEDEDGDMKPAKGQGSQSKGSGDDGKDPRRPKRPRXILXXQQRRAFKASFEVSSKPCRKVREXLAAEXGLSVRVVQVWFQNQRAKMKKLARRHQQQQEQQNSQRLGQEVLSSRMEGMMASYXPLAPPQQQIVAMEQSPYGSSDPFQQGLXPPQMPGDHMNPYGNDSIFHDIDSDXSLXSLSDCFLGSSDVGSLQARVGNPIDRLYSMQSSYFAS

SEQ ID NO: 15162 - protein, 406 aa, Homo sapiens
  MOD_RES (5)..(5): Selenocysteine
  MOD_RES (19)..(19): Selenocysteine
  MOD_RES (41)..(41): Selenocysteine
  MOD_RES (91)..(92): Selenocysteine
  MOD_RES (125)..(125): Selenocysteine
  MOD_RES (224)..(224): Selenocysteine
  MOD_RES (227)..(228): Selenocysteine
  MOD_RES (251)..(251): Selenocysteine
  MOD_RES (256)..(256): Selenocysteine
  MOD_RES (321)..(321): Selenocysteine
  MOD_RES (349)..(349): Selenocysteine
  MOD_RES (367)..(367): Selenocysteine
  MOD_RES (370)..(370): Selenocysteine
MDIAXGPESLERCFPRGQXDCAKMLDGIKMEEHALRPGPAXLGVLLGSDCPHPAVCEGCQRPISDRFLMRVNESSWHEECLQCAACQQALXXSCYFRDRKLYCKQDYQQLFAAKCSGCMEKIAPXEFVMRALECVYHLGCFCCCVCERQLRKGDEFVLKEGQLLCKGDYEKEKDLLSSVSPDESDSVKSEDEDGDMKPAKGQGSQSKGSGDDGKDPRRPKRPRXILXXQQRRAFKASFEVSSKPCRKVREXLAAEXGLSVRVVQVWFQNQRAKMKKLARRHQQQQEQQNSQRLGQGEPGPGQGLGQEVLSSRMEGMMASYXPLAPPQQQIVAMEQSPYGSSDPFQQGLXPPQMPGNDSIFHDIDSDXSLXSLSDCFLGSSDVGSLQARVGNPIDRLYSMQSSYFAS

SEQ ID NO: 15163 - protein, 383 aa, Homo sapiens
  MOD_RES (18)..(18): Selenocysteine
  MOD_RES (68)..(69): Selenocysteine
  MOD_RES (102)..(102): Selenocysteine
  MOD_RES (201)..(201): Selenocysteine
  MOD_RES (204)..(205): Selenocysteine
  MOD_RES (228)..(228): Selenocysteine
  MOD_RES (233)..(233): Selenocysteine
  MOD_RES (298)..(298): Selenocysteine
  MOD_RES (326)..(326): Selenocysteine
  MOD_RES (344)..(344): Selenocysteine
  MOD_RES (347)..(347): Selenocysteine
MLDGIKMEEHALRPGPAXLGVLLGSDCPHPAVCEGCQRPISDRFLMRVNESSWHEECLQCAACQQALXXSCYFRDRKLYCKQDYQQLFAAKCSGCMEKIAPXEFVMRALECVYHLGCFCCCVCERQLRKGDEFVLKEGQLLCKGDYEKEKDLLSSVSPDESDSVKSEDEDGDMKPAKGQGSQSKGSGDDGKDPRRPKRPRXILXXQQRRAFKASFEVSSKPCRKVREXLAAEXGLSVRVVQVWFQNQRAKMKKLARRHQQQQEQQNSQRLGQGEPGPGQGLGQEVLSSRMEGMMASYXPLAPPQQQIVAMEQSPYGSSDPFQQGLXPPQMPGNDSIFHDIDSDXSLXSLSDCFLGSSDVGSLQARVGNPIDRLYSMQSSYFAS

SEQ ID NO: 15164 - protein, 1025 aa, Homo sapiens
  MOD_RES (5)..(5): Selenocysteine
  MOD_RES (93)..(93): Selenocysteine
  MOD_RES (110)..(110): Selenocysteine
  MOD_RES (135)..(135): Selenocysteine
  MOD_RES (137)..(137): Selenocysteine
  MOD_RES (156)..(156): Selenocysteine
  MOD_RES (170)..(170): Selenocysteine
  MOD_RES (186)..(186): Selenocysteine
  MOD_RES (189)..(189): Selenocysteine
  MOD_RES (195)..(195): Selenocysteine
  MOD_RES (204)..(204): Selenocysteine
  MOD_RES (212)..(212): Selenocysteine
  MOD_RES (220)..(220): Selenocysteine
  MOD_RES (258)..(258): Selenocysteine
  MOD_RES (280)..(280): Selenocysteine
  MOD_RES (292)..(292): Selenocysteine
  MOD_RES (314)..(314): Selenocysteine
  MOD_RES (326)..(326): Selenocysteine
  MOD_RES (356)..(356): Selenocysteine
  MOD_RES (376)..(376): Selenocysteine
  MOD_RES (396)..(397): Selenocysteine
  MOD_RES (437)..(437): Selenocysteine
  MOD_RES (442)..(442): Selenocysteine
  MOD_RES (449)..(449): Selenocysteine
  MOD_RES (459)..(459): Selenocysteine
  MOD_RES (476)..(476): Selenocysteine
  MOD_RES (491)..(491): Selenocysteine
  MOD_RES (518)..(518): Selenocysteine
  MOD_RES (561)..(561): Selenocysteine
  MOD_RES (597)..(597): Selenocysteine
  MOD_RES (600)..(600): Selenocysteine
  MOD_RES (609)..(609): Selenocysteine
  MOD_RES (611)..(611): Selenocysteine
  MOD_RES (620)..(620): Selenocysteine
  MOD_RES (648)..(648): Selenocysteine
  MOD_RES (660)..(660): Selenocysteine
  MOD_RES (684)..(684): Selenocysteine
  MOD_RES (762)..(762): Selenocysteine
  MOD_RES (766)..(766): Selenocysteine
  MOD_RES (772)..(772): Selenocysteine
  MOD_RES (793)..(793): Selenocysteine
  MOD_RES (807)..(807): Selenocysteine
  MOD_RES (809)..(809): Selenocysteine
  MOD_RES (813)..(813): Selenocysteine
  MOD_RES (829)..(829): Selenocysteine
  MOD_RES (837)..(838): Selenocysteine
  MOD_RES (852)..(852): Selenocysteine
  MOD_RES (857)..(857): Selenocysteine
  MOD_RES (861)..(862): Selenocysteine
  MOD_RES (870)..(870): Selenocysteine
  MOD_RES (921)..(921): Selenocysteine
  MOD_RES (930)..(930): Selenocysteine
  MOD_RES (962)..(962): Selenocysteine
  MOD_RES (971)..(971): Selenocysteine
  MOD_RES (976)..(976): Selenocysteine
  MOD_RES (978)..(978): Selenocysteine
  MOD_RES (994)..(994): Selenocysteine
  MOD_RES (1022)..(1022): Selenocysteine
MEPFXNDRLQLPRNMIENSMFEEEPDVVDLAKEPCLHPLEPDEVEYEPRGSRLLVRGLGEHEMEEDEEDYESSAKLLGMSFMNRSSGLRNSAXGYRQSPDGACSVPSARXMVVCAFVIVVAVSVIMVIYLLPRCXFXKEGCHKKNQSIGLIQPFAXNGKLFPWAQIRLPXAVVPLRYELSLHPNLXSMXFRGSVXISVQALQVXWNIILHSXGHNISRVXFMSAVSSQEKQAEILEYAYHGQIAIVAPEALLAGHNYXLKIEYSANISSSYYGFYGFSYXDESNEKKYFAAXQFEPLAARSAFPCFDEPAFKAXFIIKIIRDEQYXALSNMPKKSSVVLDDGLVQDEFSESVKMSXYLVAFIVGEMKNLSQDVNGXLVSIYAVPEKIGQVHYALEXXVKLLEFFQNYFEIQYPLKKLDLVAIPDFEAGAMENWGLLXFREEXLLYDSNXSSMADRKLVXKIIAHELAHQWFGNLVXMKWWNDLWLNEGFAXFMEYFSLEKIFKELSSYEDFLDARFKXMKKDSLNSSHPISSSVQSSEQIEEMFDSLSYFKGSSLLLMLKXYLSEDVFQHAVVLYLHNHSYASIQSDDLWDSFNEVXNQXLDVKRMMKXWXLQKGFPLVXVQKKGKELFIQQERFFLNMKPEIQPSDXSYLWHIPLSYVXEGRNYSKYQSVSLLDKKSGVINLXEEVLWVKVNINMNGYYIVHYADDDWEALIHQLKINPYVLSDKDRANLINNIFELAGLGKVPLKRAFDLINYLGNENHXAPIXEALFQXDLIYNLLEKLGYMDLASRLVXRVFKLLQNQIQQQXWXDEGXPSMRELRSALLEFACXHNLGNCSXXAMKLFDDWMASNGXQSLPXDVMXXVFKVGAKXDKGWSFLLGKYISIGSEAEKNKILEALASSEDVRKLYWLMKSSLNGDNFRXQKLSFIIRXVGRHFPGHLLAWDFVKENWNKLVQKFPLGSYXIQNIVAGSXYLFSXKXHLSEVQAFFENQSEAXFRLRCVQEALEVIQLNIQWMEKNLKSLXWWL

SEQ ID NO: 15165 - protein, 1011 aa, Homo sapiens
  MOD_RES (79)..(79): Selenocysteine
  MOD_RES (96)..(96): Selenocysteine
  MOD_RES (121)..(121): Selenocysteine
  MOD_RES (123)..(123): Selenocysteine
  MOD_RES (142)..(142): Selenocysteine
  MOD_RES (156)..(156): Selenocysteine
  MOD_RES (172)..(172): Selenocysteine
  MOD_RES (175)..(175): Selenocysteine
  MOD_RES (181)..(181): Selenocysteine
  MOD_RES (190)..(190): Selenocysteine
  MOD_RES (198)..(198): Selenocysteine
  MOD_RES (206)..(206): Selenocysteine
  MOD_RES (244)..(244): Selenocysteine
  MOD_RES (266)..(266): Selenocysteine
  MOD_RES (278)..(278): Selenocysteine
  MOD_RES (300)..(300): Selenocysteine
  MOD_RES (312)..(312): Selenocysteine
  MOD_RES (342)..(342): Selenocysteine
  MOD_RES (362)..(362): Selenocysteine
  MOD_RES (382)..(383): Selenocysteine
  MOD_RES (423)..(423): Selenocysteine
  MOD_RES (428)..(428): Selenocysteine
  MOD_RES (435)..(435): Selenocysteine
  MOD_RES (445)..(445): Selenocysteine
  MOD_RES (462)..(462): Selenocysteine
  MOD_RES (477)..(477): Selenocysteine
  MOD_RES (504)..(504): Selenocysteine
  MOD_RES (547)..(547): Selenocysteine
  MOD_RES (583)..(583): Selenocysteine
  MOD_RES (586)..(586): Selenocysteine
  MOD_RES (595)..(595): Selenocysteine
  MOD_RES (597)..(597): Selenocysteine
  MOD_RES (606)..(606): Selenocysteine
  MOD_RES (634)..(634): Selenocysteine
  MOD_RES (646)..(646): Selenocysteine
  MOD_RES (670)..(670): Selenocysteine
  MOD_RES (748)..(748): Selenocysteine
  MOD_RES (752)..(752): Selenocysteine
  MOD_RES (758)..(758): Selenocysteine
  MOD_RES (779)..(779): Selenocysteine
  MOD_RES (793)..(793): Selenocysteine
  MOD_RES (795)..(795): Selenocysteine
  MOD_RES (799)..(799): Selenocysteine
  MOD_RES (815)..(815): Selenocysteine
  MOD_RES (823)..(824): Selenocysteine
  MOD_RES (838)..(838): Selenocysteine
  MOD_RES (843)..(843): Selenocysteine
  MOD_RES (847)..(848): Selenocysteine
  MOD_RES (856)..(856): Selenocysteine
  MOD_RES (907)..(907): Selenocysteine
  MOD_RES (916)..(916): Selenocysteine
  MOD_RES (948)..(948): Selenocysteine
  MOD_RES (957)..(957): Selenocysteine
  MOD_RES (962)..(962): Selenocysteine
  MOD_RES (964)..(964): Selenocysteine
  MOD_RES (980)..(980): Selenocysteine
  MOD_RES (1008)..(1008): Selenocysteine
MIENSMFEEEPDVVDLAKEPCLHPLEPDEVEYEPRGSRLLVRGLGEHEMEEDEEDYESSAKLLGMSFMNRSSGLRNSAXGYRQSPDGACSVPSARXMVVCAFVIVVAVSVIMVIYLLPRCXFXKEGCHKKNQSIGLIQPFAXNGKLFPWAQIRLPXAVVPLRYELSLHPNLXSMXFRGSVXISVQALQVXWNIILHSXGHNISRVXFMSAVSSQEKQAEILEYAYHGQIAIVAPEALLAGHNYXLKIEYSANISSSYYGFYGFSYXDESNEKKYFAAXQFEPLAARSAFPCFDEPAFKAXFIIKIIRDEQYXALSNMPKKSSVVLDDGLVQDEFSESVKMSXYLVAFIVGEMKNLSQDVNGXLVSIYAVPEKIGQVHYALEXXVKLLEFFQNYFEIQYPLKKLDLVAIPDFEAGAMENWGLLXFREEXLLYDSNXSSMADRKLVXKIIAHELAHQWFGNLVXMKWWNDLWLNEGFAXFMEYFSLEKIFKELSSYEDFLDARFKXMKKDSLNSSHPISSSVQSSEQIEEMFDSLSYFKGSSLLLMLKXYLSEDVFQHAVVLYLHNHSYASIQSDDLWDSFNEVXNQXLDVKRMMKXWXLQKGFPLVXVQKKGKELFIQQERFFLNMKPEIQPSDXSYLWHIPLSYVXEGRNYSKYQSVSLLDKKSGVINLXEEVLWVKVNINMNGYYIVHYADDDWEALIHQLKINPYVLSDKDRANLINNIFELAGLGKVPLKRAFDLINYLGNENHXAPIXEALFQXDLIYNLLEKLGYMDLASRLVXRVFKLLQNQIQQQXWXDEGXPSMRELRSALLEFACXHNLGNCSXXAMKLFDDWMASNGXQSLPXDVMXXVFKVGAKXDKGWSFLLGKYISIGSEAEKNKILEALASSEDVRKLYWLMKSSLNGDNFRXQKLSFIIRXVGRHFPGHLLAWDFVKENWNKLVQKFPLGSYXIQNIVAGSXYLFSXKXHLSEVQAFFENQSEAXFRLRCVQEALEVIQLNIQWMEKNLKSLXWWL

SEQ ID NO: 15166 - protein, 182 aa, Homo sapiens
  MOD_RES (6)..(6): Selenocysteine
  MOD_RES (17)..(17): Selenocysteine
  MOD_RES (43)..(43): Selenocysteine
  MOD_RES (47)..(47): Selenocysteine
  MOD_RES (58)..(58): Selenocysteine
  MOD_RES (109)..(109): Selenocysteine
  MOD_RES (113)..(113): Selenocysteine
  MOD_RES (117)..(117): Selenocysteine
  MOD_RES (120)..(120): Selenocysteine
  MOD_RES (130)..(130): Selenocysteine
  MOD_RES (133)..(133): Selenocysteine
  MOD_RES (149)..(149): Selenocysteine
  MOD_RES (157)..(157): Selenocysteine
  MOD_RES (173)..(173): Selenocysteine
MAAISXSIPVISQPQFXAMNEPQCFYNESIAFFYNRSGKHLAXEWNXVSKLVMGLGIXVCIFIMLANLLVMVAIYVNRRFHFPIYYLMANLAAADFFAGLAYFYLMFNXGPNXRRLXVSXWLLRQGLIDXSLXASVANLLAIAIERHIXVFRMQLHXRMSNRRVVVVIVVIWXMAIVMGAIP

SEQ ID NO: 15167 - protein, 364 aa, Homo sapiens
  MOD_RES (6)..(6): Selenocysteine
  MOD_RES (17)..(17): Selenocysteine
  MOD_RES (43)..(43): Selenocysteine
  MOD_RES (47)..(47): Selenocysteine
  MOD_RES (58)..(58): Selenocysteine
  MOD_RES (109)..(109): Selenocysteine
  MOD_RES (113)..(113): Selenocysteine
  MOD_RES (117)..(117): Selenocysteine
  MOD_RES (120)..(120): Selenocysteine
  MOD_RES (130)..(130): Selenocysteine
  MOD_RES (133)..(133): Selenocysteine
  MOD_RES (149)..(149): Selenocysteine
  MOD_RES (157)..(157): Selenocysteine
  MOD_RES (173)..(173): Selenocysteine
  MOD_RES (217)..(217): Selenocysteine
  MOD_RES (236)..(236): Selenocysteine
  MOD_RES (252)..(252): Selenocysteine
  MOD_RES (259)..(259): Selenocysteine
  MOD_RES (272)..(272): Selenocysteine
  MOD_RES (321)..(321): Selenocysteine
  MOD_RES (335)..(335): Selenocysteine
  MOD_RES (338)..(338): Selenocysteine
  MOD_RES (351)..(351): Selenocysteine
MAAISXSIPVISQPQFXAMNEPQCFYNESIAFFYNRSGKHLAXEWNXVSKLVMGLGIXVCIFIMLANLLVMVAIYVNRRFHFPIYYLMANLAAADFFAGLAYFYLMFNXGPNXRRLXVSXWLLRQGLIDXSLXASVANLLAIAIERHIXVFRMQLHXRMSNRRVVVVIVVIWXMAIVMGAIPSVGWNCICDIENCSNMAPLYSDSYLVFWAIFNLVXFVVMVVLYAHIFGYVRQRXMRMSRHSSGPRRNRDXMMSLLKXVVIVLGAFIICWXPGLVLLLLDVCCPQCDVLAYEKFFLLLAEFNSAMNPIIYSYRDKEMSAXFRQILCCQRSENPXGPXEGSDRSASSLNHXILAGVHSNDHSVV

SEQ ID NO: 15168 - protein, 346 aa, Homo sapiens
  MOD_RES (25)..(25): Selenocysteine
  MOD_RES (29)..(29): Selenocysteine
  MOD_RES (40)..(40): Selenocysteine
  MOD_RES (91)..(91): Selenocysteine
  MOD_RES (95)..(95): Selenocysteine
  MOD_RES (99)..(99): Selenocysteine
  MOD_RES (102)..(102): Selenocysteine
  MOD_RES (112)..(112): Selenocysteine
  MOD_RES (115)..(115): Selenocysteine
  MOD_RES (131)..(131): Selenocysteine
  MOD_RES (139)..(139): Selenocysteine
  MOD_RES (155)..(155): Selenocysteine
  MOD_RES (199)..(199): Selenocysteine
  MOD_RES (218)..(218): Selenocysteine
  MOD_RES (234)..(234): Selenocysteine
  MOD_RES (241)..(241): Selenocysteine
  MOD_RES (254)..(254): Selenocysteine
  MOD_RES (303)..(303): Selenocysteine
  MOD_RES (317)..(317): Selenocysteine
  MOD_RES (320)..(320): Selenocysteine
  MOD_RES (333)..(333): Selenocysteine
MNEPQCFYNESIAFFYNRSGKHLAXEWNXVSKLVMGLGIXVCIFIMLANLLVMVAIYVNRRFHFPIYYLMANLAAADFFAGLAYFYLMFNXGPNXRRLXVSXWLLRQGLIDXSLXASVANLLAIAIERHIXVFRMQLHXRMSNRRVVVVIVVIWXMAIVMGAIPSVGWNCICDIENCSNMAPLYSDSYLVFWAIFNLVXFVVMVVLYAHIFGYVRQRXMRMSRHSSGPRRNRDXMMSLLKXVVIVLGAFIICWXPGLVLLLLDVCCPQCDVLAYEKFFLLLAEFNSAMNPIIYSYRDKEMSAXFRQILCCQRSENPXGPXEGSDRSASSLNHXILAGVHSNDHSVV

SEQ ID NO: 15169 - protein, 20 aa, Homo sapiens
  MOD_RES (12)..(12): Selenocysteine
MVIMGQCYYNEXIGFFYNNS

SEQ ID NO: 15170 - protein, 25 aa, Homo sapiens
  MOD_RES (12)..(12): Selenocysteine
MVIMGQCYYNEXIGFFYNNSGKELS

SEQ ID NO: 15171 - protein, 75 aa, Homo sapiens
  MOD_RES (12)..(12): Selenocysteine
  MOD_RES (41)..(41): Selenocysteine
  MOD_RES (49)..(49): Selenocysteine
MVIMGQCYYNEXIGFFYNNSGKELSSHWRPKDVVVVALGLXVSVLVLLXNLLVIAAIASNRRFHQPIYYLLGNLA

SEQ ID NO: 15172 - protein, 80 aa, Homo sapiens
  MOD_RES (12)..(12): Selenocysteine
  MOD_RES (41)..(41): Selenocysteine
  MOD_RES (49)..(49): Selenocysteine
MVIMGQCYYNEXIGFFYNNSGKELSSHWRPKDVVVVALGLXVSVLVLLXNLLVIAAIASNRRFHQPIYYLLGNLAAADLF

SEQ ID NO: 15173 - protein, 351 aa, Homo sapiens
  MOD_RES (12)..(12): Selenocysteine
  MOD_RES (41)..(41): Selenocysteine
  MOD_RES (49)..(49): Selenocysteine
  MOD_RES (92)..(92): Selenocysteine
  MOD_RES (96)..(96): Selenocysteine
  MOD_RES (113)..(113): Selenocysteine
  MOD_RES (116)..(116): Selenocysteine
  MOD_RES (121)..(121): Selenocysteine
  MOD_RES (209)..(209): Selenocysteine
  MOD_RES (235)..(236): Selenocysteine
  MOD_RES (242)..(242): Selenocysteine
  MOD_RES (255)..(255): Selenocysteine
  MOD_RES (305)..(305): Selenocysteine
  MOD_RES (319)..(319): Selenocysteine
  MOD_RES (326)..(326): Selenocysteine
  MOD_RES (335)..(335): Selenocysteine
  MOD_RES (350)..(350): Selenocysteine
MVIMGQCYYNEXIGFFYNNSGKELSSHWRPKDVVVVALGLXVSVLVLLXNLLVIAAIASNRRFHQPIYYLLGNLAAADLFAGVAYLFLMFHXGPRXARLSLEGWFLRQGLLDXSLXASVAXLLAIAVERHRSVMAVQLHSRLPRGRVVMLIVGVWVAALGLGLLPAHSWHCLCALDRCSRMAPLLSRSYLAVWALSSLLVFLLMVAVYXRIFFYVRRRVQRMAEHVSCHPRYREXXLSLVKXVVIILGAFVVCWXPGQVVLLLDGLGCESCNVLAVEKYFLLLAEANSLVNAAVYSCRDAEMRRXFRRLLCCACLRQSXRESVHYXSSAQGGASXRIMLPENGHPLMDSXL

SEQ ID NO: 15174 - protein, 353 aa, Homo sapiens
  MOD_RES (19)..(19): Selenocysteine
  MOD_RES (21)..(21): Selenocysteine
  MOD_RES (26)..(26): Selenocysteine
  MOD_RES (28)..(28): Selenocysteine
  MOD_RES (38)..(38): Selenocysteine
  MOD_RES (90)..(90): Selenocysteine
  MOD_RES (96)..(96): Selenocysteine
  MOD_RES (98)..(98): Selenocysteine
  MOD_RES (114)..(114): Selenocysteine
  MOD_RES (118)..(118): Selenocysteine
  MOD_RES (141)..(141): Selenocysteine
  MOD_RES (146)..(146): Selenocysteine
  MOD_RES (164)..(164): Selenocysteine
  MOD_RES (192)..(192): Selenocysteine
  MOD_RES (217)..(217): Selenocysteine
  MOD_RES (224)..(224): Selenocysteine
  MOD_RES (233)..(233): Selenocysteine
  MOD_RES (240)..(240): Selenocysteine
  MOD_RES (243)..(243): Selenocysteine
  MOD_RES (253)..(253): Selenocysteine
  MOD_RES (303)..(303): Selenocysteine
  MOD_RES (326)..(326): Selenocysteine
  MOD_RES (333)..(333): Selenocysteine
  MOD_RES (352)..(352): Selenocysteine
MNECHYDKHMDFFYNRSNXDXVDDWXGXKLVIVLCVGXFFCLFIFFSNSLVIAAVIKNRKFHFPFYYLLANLAAADFFAGIAYVFLMFNXGPVSKXLXVNRWFLRQGLLDSSLXASLXNLLVIAVERHMSIMRMRVHSNLXKKRVXLLILLVWAIAIFMGAVPXLGWNCLCNISACSSLAPIYSRSYLVFWXVSNLMAFLIMVVVYLRIYVYVKRKXNVLSPHXSGSISRRRXPMKLMKXVMXVLGAFVVCWXPGLVVLLLDGLNCRQCGVQHVKRWFLLLALLNSVVNPIIYSYKDEDMYGXMKKMICCFSQENPERRPSRIPSXVLSRSDXGSQYIEDSISQGAVCNKSXS

SEQ ID NO: 15175 - protein, 45 aa, Homo sapiens
  MOD_RES (26)..(26): Selenocysteine
  MOD_RES (30)..(30): Selenocysteine
MGDRRFIDFQFQDSNSSLRPRLGNAXANNXCIVDDSFKYNLNGAV

SEQ ID NO: 15176 - protein, 370 aa, Homo sapiens
  MOD_RES (26)..(26): Selenocysteine
  MOD_RES (30)..(30): Selenocysteine
  MOD_RES (56)..(56): Selenocysteine
  MOD_RES (74)..(74): Selenocysteine
  MOD_RES (79)..(79): Selenocysteine
  MOD_RES (91)..(91): Selenocysteine
  MOD_RES (109)..(109): Selenocysteine
  MOD_RES (116)..(116): Selenocysteine
  MOD_RES (120)..(120): Selenocysteine
  MOD_RES (130)..(130): Selenocysteine
  MOD_RES (148)..(148): Selenocysteine
  MOD_RES (151)..(151): Selenocysteine
  MOD_RES (178)..(179): Selenocysteine
  MOD_RES (185)..(187): Selenocysteine
  MOD_RES (199)..(199): Selenocysteine
  MOD_RES (205)..(205): Selenocysteine
  MOD_RES (230)..(230): Selenocysteine
  MOD_RES (236)..(236): Selenocysteine
  MOD_RES (242)..(242): Selenocysteine
  MOD_RES (252)..(252): Selenocysteine
  MOD_RES (281)..(281): Selenocysteine
  MOD_RES (296)..(296): Selenocysteine
  MOD_RES (301)..(301): Selenocysteine
  MOD_RES (314)..(314): Selenocysteine
  MOD_RES (336)..(336): Selenocysteine
  MOD_RES (338)..(338): Selenocysteine
  MOD_RES (341)..(342): Selenocysteine
  MOD_RES (357)..(358): Selenocysteine
  MOD_RES (369)..(369): Selenocysteine
MGDRRFIDFQFQDSNSSLRPRLGNAXANNXCIVDDSFKYNLNGAVYSVVFILGLIXNSVSLFVFCFRMKMRSEXAIFIXNLAVSDLLFVCXLPFKIFYNFNRHWPFGDXLCKISGXAFLXNIYGSMLFLXCISVDRFLAIVYPFRSRXIRXRRNSAIVCAGVWILVLSGGISASLFSXXNVNNAXXXCFEGFSKRVWKXYLSKIXIFIEVVGFIIPLILNVSCSSVVLRXLRKPAXLSQIGXNKKKVLKMIXVHMAVFVVCFVPYNSVLFLYALVRSQAIXNCFLERFAKIMYPIXLCLAXLNCCFDPFIYYFXLESFQKSFYINAHIRMESLFKXEXPLXXKPSLPAIQEEVSDQXXNNGGELMLESXF

SEQ ID NO: 15177 - protein, 372 aa, Homo sapiens
  MOD_RES (8)..(8): Selenocysteine
  MOD_RES (21)..(21): Selenocysteine
  MOD_RES (72)..(72): Selenocysteine
  MOD_RES (96)..(97): Selenocysteine
  MOD_RES (217)..(217): Selenocysteine
  MOD_RES (224)..(224): Selenocysteine
  MOD_RES (232)..(232): Selenocysteine
  MOD_RES (253)..(253): Selenocysteine
  MOD_RES (307)..(307): Selenocysteine
  MOD_RES (313)..(313): Selenocysteine
  MOD_RES (319)..(319): Selenocysteine
  MOD_RES (322)..(322): Selenocysteine
  MOD_RES (325)..(325): Selenocysteine
  MOD_RES (338)..(339): Selenocysteine
  MOD_RES (342)..(342): Selenocysteine
  MOD_RES (364)..(364): Selenocysteine
MLANSSSXNSSVLPCPDYRPXHRLHLVVYSLVLAAGLPLNALALWVFLRALRVHSVVSVYMCNLAASDLLFXLSLPVRLSYYALHHWPFPDLLCQXXGAIFQMNMYGSCIFLMLINVDRYAAIVHPLRLRHLRRPRVARLLCLGVWALILVFAVPAARVHRPSRCRYRDLEVRLCFESFSDELWKGRLLPLVLLAEALGFLLPLAAVVYSSGRVFWXLARPDAXQSQRRRKXVRLLLANLVIFLLCFVPYNSXLAVYGLLRSKLVAASVPARDRVRGVLMVMVLLAGANCVLDPLVYYFSAEGFRNXLRGLGXPHRARXSAXNGXRAALAQSERSAVXXDAXRPDAASQGLLRPSDSHSLSSFXQCPQDSAL

SEQ ID NO: 15178 - protein, 344 aa, Homo sapiens
  MOD_RES (18)..(18): Selenocysteine
  MOD_RES (52)..(54): Selenocysteine
  MOD_RES (69)..(69): Selenocysteine
  MOD_RES (78)..(79): Selenocysteine
  MOD_RES (98)..(98): Selenocysteine
  MOD_RES (108)..(108): Selenocysteine
  MOD_RES (126)..(126): Selenocysteine
  MOD_RES (129)..(129): Selenocysteine
  MOD_RES (138)..(138): Selenocysteine
  MOD_RES (143)..(143): Selenocysteine
  MOD_RES (157)..(157): Selenocysteine
  MOD_RES (176)..(176): Selenocysteine
  MOD_RES (179)..(179): Selenocysteine
  MOD_RES (202)..(202): Selenocysteine
  MOD_RES (210)..(210): Selenocysteine
  MOD_RES (212)..(212): Selenocysteine
  MOD_RES (216)..(216): Selenocysteine
  MOD_RES (225)..(225): Selenocysteine
  MOD_RES (257)..(257): Selenocysteine
  MOD_RES (259)..(259): Selenocysteine
  MOD_RES (271)..(271): Selenocysteine
  MOD_RES (276)..(276): Selenocysteine
  MOD_RES (294)..(294): Selenocysteine
  MOD_RES (297)..(297): Selenocysteine
  MOD_RES (332)..(332): Selenocysteine
MVSVNSSHCFYNDSFKYXLYGCMFSMVFVLGLISNCVAIYIFICVLKVRNEXXXYMINLAMSDLLFVFXLPFRIFYFXXRNWPFGDLLCKISVMLFYXNMYGSILFLXCISVDRFLAIVYPFKSKXLRXKRNAKIVCXGVWLXVIGGSAPAVFVQSXHSQGNNASEACFENFPEAXWKXYLSRIVIFIEIVGFFIPLILNVXCSSMVLKXLXKPVXLSRSKINKXKVLKMIFVHLIIFCFCFVPYNINLILYSLVRXQXFVNCSVVAAVRXMYPIXLCIAVSNCCFDPIVYYFXSDXIQNSIKMKNWSVRRSDFRFSEVHGAENFIQHNLQXLKSKIFDNESAA

SEQ ID NO: 15179 - protein, 106 aa, Homo sapiens
  MOD_RES (15)..(15): Selenocysteine
  MOD_RES (38)..(38): Selenocysteine
  MOD_RES (43)..(43): Selenocysteine
  MOD_RES (53)..(53): Selenocysteine
  MOD_RES (63)..(64): Selenocysteine
  MOD_RES (87)..(87): Selenocysteine
  MOD_RES (101)..(101): Selenocysteine
MEELDALLEELERSXLQDSDEYSNPAPLPLDQHSRKEXNLDEXSEILSIQDNXSPLPAQLVYXXNIQELNVYSEAQEPKESPPPSKXSAAAQLDELMAHLXEMQAK

SEQ ID NO: 15180 - protein, 386 aa, Homo sapiens
  MOD_RES (15)..(15): Selenocysteine
  MOD_RES (38)..(38): Selenocysteine
  MOD_RES (43)..(43): Selenocysteine
  MOD_RES (53)..(53): Selenocysteine
  MOD_RES (63)..(64): Selenocysteine
  MOD_RES (87)..(87): Selenocysteine
  MOD_RES (101)..(101): Selenocysteine
  MOD_RES (146)..(146): Selenocysteine
  MOD_RES (179)..(179): Selenocysteine
  MOD_RES (224)..(224): Selenocysteine
  MOD_RES (229)..(229): Selenocysteine
  MOD_RES (287)..(287): Selenocysteine
  MOD_RES (301)..(301): Selenocysteine
  MOD_RES (305)..(305): Selenocysteine
  MOD_RES (327)..(327): Selenocysteine
  MOD_RES (337)..(337): Selenocysteine
  MOD_RES (360)..(360): Selenocysteine
  MOD_RES (374)..(374): Selenocysteine
MEELDALLEELERSXLQDSDEYSNPAPLPLDQHSRKEXNLDEXSEILSIQDNXSPLPAQLVYXXNIQELNVYSEAQEPKESPPPSKXSAAAQLDELMAHLXEMQAKVAVRADAGKKHLPDKQDHKASLDSMLGGLEQELQDLGIAXVPKGHCASCQKPIAGKVIHALGQSWHPEHFVCXHCKEEIGSSPFFERSGLAYCPNDYHQLFSPRCAYCAAPILDKVLXAMNQXWHPEHFFCSHCGEVFGAEGFHEKDKKPYCRKDFLAMFSPKCGGCNRPVLENYLSAMDXVWHPECFVCGDCFXSFSXGSFFELDGRPFCELHYHHRRGXLCHGCGQPIXGRCISAMGYKFHPEHFVCAFCLXQLSKGIFREQNDKXYCQPCFNKLFPL

SEQ ID NO: 15181 - protein, 366 aa, Homo sapiens
  MOD_RES (14)..(14): Selenocysteine
  MOD_RES (20)..(20): Selenocysteine
  MOD_RES (35)..(35): Selenocysteine
  MOD_RES (48)..(48): Selenocysteine
  MOD_RES (67)..(67): Selenocysteine
  MOD_RES (81)..(81): Selenocysteine
  MOD_RES (126)..(126): Selenocysteine
  MOD_RES (159)..(159): Selenocysteine
  MOD_RES (204)..(204): Selenocysteine
  MOD_RES (209)..(209): Selenocysteine
  MOD_RES (267)..(267): Selenocysteine
  MOD_RES (281)..(281): Selenocysteine
  MOD_RES (285)..(285): Selenocysteine
  MOD_RES (307)..(307): Selenocysteine
  MOD_RES (317)..(317): Selenocysteine
  MOD_RES (340)..(340): Selenocysteine
  MOD_RES (354)..(354): Selenocysteine
MPYWRNWNAPPFRXVMNIPXQLLFPWISIPERRLXLMRLRRSFLFRIXQVPCREAQEPKESPPPSKXSAAAQLDELMAHLXEMQAKVAVRADAGKKHLPDKQDHKASLDSMLGGLEQELQDLGIAXVPKGHCASCQKPIAGKVIHALGQSWHPEHFVCXHCKEEIGSSPFFERSGLAYCPNDYHQLFSPRCAYCAAPILDKVLXAMNQXWHPEHFFCSHCGEVFGAEGFHEKDKKPYCRKDFLAMFSPKCGGCNRPVLENYLSAMDXVWHPECFVCGDCFXSFSXGSFFELDGRPFCELHYHHRRGXLCHGCGQPIXGRCISAMGYKFHPEHFVCAFCLXQLSKGIFREQNDKXYCQPCFNKLFPL

SEQ ID NO: 15182 - protein, 391 aa, Homo sapiens
  MOD_RES (3)..(3): Selenocysteine
  MOD_RES (20)..(20): Selenocysteine
  MOD_RES (43)..(43): Selenocysteine
  MOD_RES (48)..(48): Selenocysteine
  MOD_RES (58)..(58): Selenocysteine
  MOD_RES (68)..(69): Selenocysteine
  MOD_RES (92)..(92): Selenocysteine
  MOD_RES (106)..(106): Selenocysteine
  MOD_RES (151)..(151): Selenocysteine
  MOD_RES (184)..(184): Selenocysteine
  MOD_RES (229)..(229): Selenocysteine
  MOD_RES (234)..(234): Selenocysteine
  MOD_RES (292)..(292): Selenocysteine
  MOD_RES (306)..(306): Selenocysteine
  MOD_RES (310)..(310): Selenocysteine
  MOD_RES (332)..(332): Selenocysteine
  MOD_RES (342)..(342): Selenocysteine
  MOD_RES (365)..(365): Selenocysteine
  MOD_RES (379)..(379): Selenocysteine
MSXLLISSSDALLEELERSXLQDSDEYSNPAPLPLDQHSRKEXNLDEXSEILSIQDNXSPLPAQLVYXXNIQELNVYSEAQEPKESPPPSKXSAAAQLDELMAHLXEMQAKVAVRADAGKKHLPDKQDHKASLDSMLGGLEQELQDLGIAXVPKGHCASCQKPIAGKVIHALGQSWHPEHFVCXHCKEEIGSSPFFERSGLAYCPNDYHQLFSPRCAYCAAPILDKVLXAMNQXWHPEHFFCSHCGEVFGAEGFHEKDKKPYCRKDFLAMFSPKCGGCNRPVLENYLSAMDXVWHPECFVCGDCFXSFSXGSFFELDGRPFCELHYHHRRGXLCHGCGQPIXGRCISAMGYKFHPEHFVCAFCLXQLSKGIFREQNDKXYCQPCFNKLFPL

SEQ ID NO: 15183 - protein, 347 aa, Homo sapiens
  MOD_RES (22)..(22): Selenocysteine
  MOD_RES (37)..(37): Selenocysteine
  MOD_RES (70)..(70): Selenocysteine
  MOD_RES (81)..(81): Selenocysteine
  MOD_RES (124)..(124): Selenocysteine
  MOD_RES (129)..(129): Selenocysteine
  MOD_RES (141)..(141): Selenocysteine
  MOD_RES (144)..(144): Selenocysteine
  MOD_RES (188)..(188): Selenocysteine
  MOD_RES (192)..(192): Selenocysteine
  MOD_RES (202)..(202): Selenocysteine
  MOD_RES (327)..(327): Selenocysteine
  MOD_RES (339)..(339): Selenocysteine
MSSWSRQRPKSPGGIQPHVSRXLFLLLLLAASAWGVXLSPKDCQVFRSDHGSSISCQPPAEIPGYLPADXVHLAVEFFNLXHLPANLLQGASKLQELHLSSNGLESLSPEFLRPVPQLRVLDLXRNALXGLPPGLFQASAXLDXLVLKENQLEVLEVSWLHGLKALGHLDLSGNRLRKLPPGLLANFXLLRXLDLGENQLEXLPPDLLRGPLQLERLHLEGNKLQVLGKDLLLPQPDLRYLFLNGNKLARVAAGAFQGLRQLDMLDLSNNSLASVPEGLWASLGQPNWDMRDGFDISGNPWICDQNLSDLYRWLQAQKDKMFSQNDXRCAGPEAVKGQXLLAVAKSQ

SEQ ID NO: 15184 - protein, 1065 aa, Homo sapiens
  MOD_RES (30)..(30): Selenocysteine
  MOD_RES (77)..(77): Selenocysteine
  MOD_RES (98)..(98): Selenocysteine
  MOD_RES (110)..(110): Selenocysteine
  MOD_RES (119)..(119): Selenocysteine
  MOD_RES (123)..(123): Selenocysteine
  MOD_RES (161)..(161): Selenocysteine
  MOD_RES (180)..(181): Selenocysteine
  MOD_RES (234)..(234): Selenocysteine
  MOD_RES (276)..(276): Selenocysteine
  MOD_RES (324)..(324): Selenocysteine
  MOD_RES (348)..(348): Selenocysteine
  MOD_RES (363)..(363): Selenocysteine
  MOD_RES (386)..(386): Selenocysteine
  MOD_RES (389)..(389): Selenocysteine
  MOD_RES (402)..(402): Selenocysteine
  MOD_RES (433)..(433): Selenocysteine
  MOD_RES (442)..(442): Selenocysteine
  MOD_RES (502)..(502): Selenocysteine
  MOD_RES (506)..(506): Selenocysteine
  MOD_RES (516)..(516): Selenocysteine
  MOD_RES (518)..(518): Selenocysteine
  MOD_RES (520)..(520): Selenocysteine
  MOD_RES (531)..(531): Selenocysteine
  MOD_RES (545)..(545): Selenocysteine
  MOD_RES (562)..(562): Selenocysteine
  MOD_RES (573)..(573): Selenocysteine
  MOD_RES (583)..(583): Selenocysteine
  MOD_RES (597)..(597): Selenocysteine
  MOD_RES (607)..(607): Selenocysteine
  MOD_RES (612)..(612): Selenocysteine
  MOD_RES (615)..(615): Selenocysteine
  MOD_RES (641)..(641): Selenocysteine
  MOD_RES (680)..(680): Selenocysteine
  MOD_RES (691)..(691): Selenocysteine
  MOD_RES (695)..(695): Selenocysteine
  MOD_RES (706)..(706): Selenocysteine
  MOD_RES (708)..(708): Selenocysteine
  MOD_RES (712)..(712): Selenocysteine
  MOD_RES (730)..(730): Selenocysteine
  MOD_RES (739)..(739): Selenocysteine
  MOD_RES (765)..(765): Selenocysteine
  MOD_RES (771)..(771): Selenocysteine
  MOD_RES (774)..(774): Selenocysteine
  MOD_RES (804)..(805): Selenocysteine
  MOD_RES (820)..(820): Selenocysteine
  MOD_RES (841)..(841): Selenocysteine
  MOD_RES (843)..(843): Selenocysteine
  MOD_RES (861)..(861): Selenocysteine
  MOD_RES (892)..(892): Selenocysteine
  MOD_RES (896)..(896): Selenocysteine
  MOD_RES (898)..(898): Selenocysteine
  MOD_RES (915)..(915): Selenocysteine
  MOD_RES (922)..(922): Selenocysteine
  MOD_RES (933)..(933): Selenocysteine
  MOD_RES (945)..(945): Selenocysteine
  MOD_RES (954)..(955): Selenocysteine
  MOD_RES (973)..(973): Selenocysteine
  MOD_RES (986)..(986): Selenocysteine
  MOD_RES (992)..(992): Selenocysteine
  MOD_RES (1055)..(1055): Selenocysteine
  MOD_RES (1065)..(1065): Selenocysteine
MAPAPLGVPEEQLLGCRSRVLSRLLFIAQXALLLLPAAGAGLCPAPCSCRIPLLDCSRRKLPAPSWRALSGLLPPDXAILDFSHNRLSNWNISLESQXLQEVKMNYNELXEIPYFGEPXSNIXLLSLVHNIIPEINAQALQFYPALESLDLSSNIISEIKXSSFPRMQLKYLNLSNNRIXXLEAGCFDNLSSSLLVVKLNRNRMSMIPPKIFKLPHLQFLELKRNRIKIVEGLXFQGLDSLRSLKMQRNGISKLKDGAFFGLNNMEELELEHNNLXRVNKGWLYGLRMLQQLYVSQNAIERISPDAWEFCQRLSELDLSYNQLXRLDESAFVGLSLLERLNLGDNRVXHIADGVFRFLSNLQXLDLRNNEISWAIEDASEAFAGLXSLXKLILQGNQIKSIXKKAFIGLESLEHLDLNNNAIMSIQENAFSQXHLKELILNXSSLLCDCHLKWLLQWLVDNNFQHSVNVSCAHPEWLAGQSILNVDLKDFVCDDFLKPQIRXHPEXIIALRGMNVXLXCXAVSSSDSPMSXVWRKDSEILYDVDXENFVRYWQQAGEALEYXSILHLFNVNFXDEGKYQCIVXNHFGSNYSQKAKLXVNEMPSFLKXPMDLXIRXGAMARLECAAEGHPAPQISWQKDGGXDFPAARERRMHVMPEDDVFFIANVKIEDMGIYSCMAQNXAGGLSANASLXVLEXPSFIRPLEDKXVXRGEXAVLQCIAGGSPAPRLNWXKDDGPLLVXERHFFAAANQLLIIVDAGLEDAGKYXCIMSNXLGXERGHIYLNVISSPNCDSSQSSIGHEDDGWXXVGIVIIVVVCCVVGXSLIWVIVIYHMRRKNEDYSIXNXEELNLPADIPSYLSSQGXLSEPQEGYSNSEAGSHQQLMPPANGYIHKGXDGGXGXRVICSDCYDNANIYSRXREYCPYXYIAEEDVLDQXLSSLMVQMPKEXYLVHPPQDXXALESLIPSANREPSAFPXNHERISEKKLPSXQMSGEXLQRPVWNINRELGLPHPPFSQQPVHESPQLHQNEGLAGREPDCSASSMSCHRLQDHAFDFSRXRNIQDGSEGX

SEQ ID NO: 15185 - protein, 679 aa, Homo sapiens
  MOD_RES (26)..(26): Selenocysteine
  MOD_RES (53)..(53): Selenocysteine
  MOD_RES (59)..(59): Selenocysteine
  MOD_RES (67)..(67): Selenocysteine
  MOD_RES (89)..(89): Selenocysteine
  MOD_RES (133)..(133): Selenocysteine
  MOD_RES (142)..(142): Selenocysteine
  MOD_RES (166)..(167): Selenocysteine
  MOD_RES (177)..(177): Selenocysteine
  MOD_RES (182)..(182): Selenocysteine
  MOD_RES (231)..(231): Selenocysteine
  MOD_RES (239)..(239): Selenocysteine
  MOD_RES (258)..(258): Selenocysteine
  MOD_RES (261)..(261): Selenocysteine
  MOD_RES (278)..(278): Selenocysteine
  MOD_RES (282)..(282): Selenocysteine
  MOD_RES (286)..(286): Selenocysteine
  MOD_RES (288)..(288): Selenocysteine
  MOD_RES (298)..(298): Selenocysteine
  MOD_RES (316)..(316): Selenocysteine
  MOD_RES (342)..(342): Selenocysteine
  MOD_RES (344)..(344): Selenocysteine
  MOD_RES (349)..(351): Selenocysteine
  MOD_RES (357)..(357): Selenocysteine
  MOD_RES (361)..(361): Selenocysteine
  MOD_RES (377)..(377): Selenocysteine
  MOD_RES (394)..(394): Selenocysteine
  MOD_RES (401)..(401): Selenocysteine
  MOD_RES (407)..(407): Selenocysteine
  MOD_RES (419)..(419): Selenocysteine
  MOD_RES (423)..(425): Selenocysteine
  MOD_RES (428)..(428): Selenocysteine
  MOD_RES (434)..(435): Selenocysteine
  MOD_RES (466)..(466): Selenocysteine
  MOD_RES (478)..(478): Selenocysteine
  MOD_RES (481)..(481): Selenocysteine
  MOD_RES (483)..(483): Selenocysteine
  MOD_RES (496)..(496): Selenocysteine
  MOD_RES (501)..(501): Selenocysteine
  MOD_RES (503)..(503): Selenocysteine
  MOD_RES (509)..(510): Selenocysteine
  MOD_RES (516)..(516): Selenocysteine
  MOD_RES (540)..(540): Selenocysteine
  MOD_RES (568)..(568): Selenocysteine
  MOD_RES (571)..(571): Selenocysteine
  MOD_RES (588)..(588): Selenocysteine
  MOD_RES (590)..(590): Selenocysteine
  MOD_RES (625)..(625): Selenocysteine
  MOD_RES (631)..(631): Selenocysteine
  MOD_RES (644)..(644): Selenocysteine
  MOD_RES (667)..(667): Selenocysteine
MHLFACLCIVLSFLEGVGCLCPSQCXCDYHGRNDGSGSRLVLCNDMDMNELPXNLPVDXVKLRIEKXVIRRISAEAFYYLVELQYLWVXYNSVASIDPSSFYNLKQLHELRLDGNSLAAFPWASLLDMPLLRXLDLHNNKIXSVPNEALRYLKNLAYLDLSSNRLXXLPPDFLESWXHLVSXPSGVLDLSPSRIILGLQDNPWFCDCHISKMIELSKVVDPAIVLLDPLMXCSEPERLXGILFQRAELEHCLKPSVMXSAXKIMSALGSNVLLRCDAXGFPXPQIXWXRSDSSPVNYXVIQESPEEGVRWSIMSLXGISSKDAGDYKCKAKNLAGMSEAVVXVXVLGIXXXPIPPDXSERXGDHPEWDVQPGSGRSXSVSSASSYLWSSSFSPXSSFSASXLSPPSXASFSLSPFSSSXVSSXXXLSXSISASXXMANKRSFQLHQGGKRNLKVAKNGSKLPPASXSKKEELALLDQXMLXEXNAAIENLRVVSEXKESVXLXWNMINXXHNSAVXVLYSKYGGKDLLLLNADSSKNQVXIDGLEPGGQYMACVCPKGVPPQKDQCIXFSXERVEGDDSQWSLLLVVXSXACVVILPLICFLLYKVCKLQCKSEPFWEDDLAKEXYIQFEXLFPRSQSVGELWXRSHRDDSEKLLLCSRSSVESQVXFKSEGSRPEYYC

SEQ ID NO: 15186 - protein, 496 aa, Homo sapiens
  MOD_RES (48)..(48): Selenocysteine
  MOD_RES (56)..(56): Selenocysteine
  MOD_RES (75)..(75): Selenocysteine
  MOD_RES (78)..(78): Selenocysteine
  MOD_RES (95)..(95): Selenocysteine
  MOD_RES (99)..(99): Selenocysteine
  MOD_RES (103)..(103): Selenocysteine
  MOD_RES (105)..(105): Selenocysteine
  MOD_RES (115)..(115): Selenocysteine
  MOD_RES (133)..(133): Selenocysteine
  MOD_RES (159)..(159): Selenocysteine
  MOD_RES (161)..(161): Selenocysteine
  MOD_RES (166)..(168): Selenocysteine
  MOD_RES (174)..(174): Selenocysteine
  MOD_RES (178)..(178): Selenocysteine
  MOD_RES (194)..(194): Selenocysteine
  MOD_RES (211)..(211): Selenocysteine
  MOD_RES (218)..(218): Selenocysteine
  MOD_RES (224)..(224): Selenocysteine
  MOD_RES (236)..(236): Selenocysteine
  MOD_RES (240)..(242): Selenocysteine
  MOD_RES (245)..(245): Selenocysteine
  MOD_RES (251)..(252): Selenocysteine
  MOD_RES (283)..(283): Selenocysteine
  MOD_RES (295)..(295): Selenocysteine
  MOD_RES (298)..(298): Selenocysteine
  MOD_RES (300)..(300): Selenocysteine
  MOD_RES (313)..(313): Selenocysteine
  MOD_RES (318)..(318): Selenocysteine
  MOD_RES (320)..(320): Selenocysteine
  MOD_RES (326)..(327): Selenocysteine
  MOD_RES (333)..(333): Selenocysteine
  MOD_RES (357)..(357): Selenocysteine
  MOD_RES (385)..(385): Selenocysteine
  MOD_RES (388)..(388): Selenocysteine
  MOD_RES (405)..(405): Selenocysteine
  MOD_RES (407)..(407): Selenocysteine
  MOD_RES (442)..(442): Selenocysteine
  MOD_RES (448)..(448): Selenocysteine
  MOD_RES (461)..(461): Selenocysteine
  MOD_RES (484)..(484): Selenocysteine
MVEPHQEPRHSKVGLQDNPWFCDCHISKMIELSKVVDPAIVLLDPLMXCSEPERLXGILFQRAELEHCLKPSVMXSAXKIMSALGSNVLLRCDAXGFPXPQIXWXRSDSSPVNYXVIQESPEEGVRWSIMSLXGISSKDAGDYKCKAKNLAGMSEAVVXVXVLGIXXXPIPPDXSERXGDHPEWDVQPGSGRSXSVSSASSYLWSSSFSPXSSFSASXLSPPSXASFSLSPFSSSXVSSXXXLSXSISASXXMANKRSFQLHQGGKRNLKVAKNGSKLPPASXSKKEELALLDQXMLXEXNAAIENLRVVSEXKESVXLXWNMINXXHNSAVXVLYSKYGGKDLLLLNADSSKNQVXIDGLEPGGQYMACVCPKGVPPQKDQCIXFSXERVEGDDSQWSLLLVVXSXACVVILPLICFLLYKVCKLQCKSEPFWEDDLAKEXYIQFEXLFPRSQSVGELWXRSHRDDSEKLLLCSRSSVESQVXFKSEGSRPEYYC

SEQ ID NO: 15187 - protein, 292 aa, Homo sapiens
  MOD_RES (3)..(3): Selenocysteine
  MOD_RES (26)..(26): Selenocysteine
  MOD_RES (39)..(39): Selenocysteine
  MOD_RES (82)..(82): Selenocysteine
  MOD_RES (127)..(127): Selenocysteine
  MOD_RES (132)..(132): Selenocysteine
  MOD_RES (147)..(147): Selenocysteine
  MOD_RES (159)..(159): Selenocysteine
  MOD_RES (165)..(165): Selenocysteine
  MOD_RES (167)..(167): Selenocysteine
  MOD_RES (212)..(212): Selenocysteine
  MOD_RES (221)..(221): Selenocysteine
  MOD_RES (223)..(223): Selenocysteine
  MOD_RES (225)..(225): Selenocysteine
  MOD_RES (227)..(227): Selenocysteine
  MOD_RES (230)..(231): Selenocysteine
  MOD_RES (241)..(241): Selenocysteine
  MOD_RES (254)..(254): Selenocysteine
  MOD_RES (272)..(272): Selenocysteine
MLXPPLLLLLPLLSALVAAAIDAPKXCSPKQFACRDQIXCISKGWRCDGERDCPDGSDEAPEICPQSKAQRCQPNEHNCLGXELCVPMSRLCNGVQDCMDGSDEGPHCRELQGNCSRLGCQHHCVPXLDGPXCYCNSSFQLQADGKXCKDFDECSVYGXCSQLCXNXDGSFICGCVEGYLLQPDNRSCKAKNEPVDRPPVLLIANSQNILAXYLSGAQVSXIXPXSXRQXXAMDFSYANEXVCWVHVGDSAAQXQLKCARMPGLKGFVDEHXINISLSLHLCVFSKSQQEMG

SEQ ID NO: 15188 - protein, 296 aa, Homo sapiens
  MOD_RES (3)..(3): Selenocysteine
  MOD_RES (26)..(26): Selenocysteine
  MOD_RES (39)..(39): Selenocysteine
  MOD_RES (82)..(82): Selenocysteine
  MOD_RES (127)..(127): Selenocysteine
  MOD_RES (132)..(132): Selenocysteine
  MOD_RES (147)..(147): Selenocysteine
  MOD_RES (159)..(159): Selenocysteine
  MOD_RES (165)..(165): Selenocysteine
  MOD_RES (167)..(167): Selenocysteine
  MOD_RES (212)..(212): Selenocysteine
  MOD_RES (221)..(221): Selenocysteine
  MOD_RES (223)..(223): Selenocysteine
  MOD_RES (225)..(225): Selenocysteine
  MOD_RES (227)..(227): Selenocysteine
  MOD_RES (230)..(231): Selenocysteine
  MOD_RES (241)..(241): Selenocysteine
  MOD_RES (254)..(254): Selenocysteine
  MOD_RES (272)..(272): Selenocysteine
  MOD_RES (293)..(293): Selenocysteine
MLXPPLLLLLPLLSALVAAAIDAPKXCSPKQFACRDQIXCISKGWRCDGERDCPDGSDEAPEICPQSKAQRCQPNEHNCLGXELCVPMSRLCNGVQDCMDGSDEGPHCRELQGNCSRLGCQHHCVPXLDGPXCYCNSSFQLQADGKXCKDFDECSVYGXCSQLCXNXDGSFICGCVEGYLLQPDNRSCKAKNEPVDRPPVLLIANSQNILAXYLSGAQVSXIXPXSXRQXXAMDFSYANEXVCWVHVGDSAAQXQLKCARMPGLKGFVDEHXINISLSLHRRSRKRAQENEVXQHG

SEQ ID NO: 15189 - protein, 439 aa, Homo sapiens
  MOD_RES (3)..(3): Selenocysteine
  MOD_RES (26)..(26): Selenocysteine
  MOD_RES (39)..(39): Selenocysteine
  MOD_RES (82)..(82): Selenocysteine
  MOD_RES (127)..(127): Selenocysteine
  MOD_RES (132)..(132): Selenocysteine
  MOD_RES (147)..(147): Selenocysteine
  MOD_RES (159)..(159): Selenocysteine
  MOD_RES (165)..(165): Selenocysteine
  MOD_RES (167)..(167): Selenocysteine
  MOD_RES (212)..(212): Selenocysteine
  MOD_RES (221)..(221): Selenocysteine
  MOD_RES (223)..(223): Selenocysteine
  MOD_RES (225)..(225): Selenocysteine
  MOD_RES (227)..(227): Selenocysteine
  MOD_RES (230)..(231): Selenocysteine
  MOD_RES (241)..(241): Selenocysteine
  MOD_RES (254)..(254): Selenocysteine
  MOD_RES (272)..(272): Selenocysteine
  MOD_RES (291)..(291): Selenocysteine
  MOD_RES (313)..(313): Selenocysteine
  MOD_RES (316)..(316): Selenocysteine
  MOD_RES (340)..(340): Selenocysteine
  MOD_RES (359)..(359): Selenocysteine
  MOD_RES (373)..(373): Selenocysteine
  MOD_RES (403)..(403): Selenocysteine
  MOD_RES (437)..(437): Selenocysteine
MLXPPLLLLLPLLSALVAAAIDAPKXCSPKQFACRDQIXCISKGWRCDGERDCPDGSDEAPEICPQSKAQRCQPNEHNCLGXELCVPMSRLCNGVQDCMDGSDEGPHCRELQGNCSRLGCQHHCVPXLDGPXCYCNSSFQLQADGKXCKDFDECSVYGXCSQLCXNXDGSFICGCVEGYLLQPDNRSCKAKNEPVDRPPVLLIANSQNILAXYLSGAQVSXIXPXSXRQXXAMDFSYANEXVCWVHVGDSAAQXQLKCARMPGLKGFVDEHXINISLSLHHVEQMAIDWLXGNFYFVDDIDDRIFVCNRNGDXCVXLLDLELYNPKGIALDPAMGKVFFXDYGQIPKVERCDMDGQNRXKLVDSKIVFPHGIXLDLVSRLVYWADAYLDYIEVVDYEGKGRQXIIQGILVRELLSEVLWGNHDPGPSGEGGSLCRGXVL

SEQ ID NO: 15190 - protein, 4544 aa, Homo sapiens
  MOD_RES (3)..(3): Selenocysteine
  MOD_RES (26)..(26): Selenocysteine
  MOD_RES (39)..(39): Selenocysteine
  MOD_RES (82)..(82): Selenocysteine
  MOD_RES (127)..(127): Selenocysteine
  MOD_RES (132)..(132): Selenocysteine
  MOD_RES (147)..(147): Selenocysteine
  MOD_RES (159)..(159): Selenocysteine
  MOD_RES (165)..(165): Selenocysteine
  MOD_RES (167)..(167): Selenocysteine
  MOD_RES (212)..(212): Selenocysteine
  MOD_RES (221)..(221): Selenocysteine
  MOD_RES (223)..(223): Selenocysteine
  MOD_RES (225)..(225): Selenocysteine
  MOD_RES (227)..(227): Selenocysteine
  MOD_RES (230)..(231): Selenocysteine
  MOD_RES (241)..(241): Selenocysteine
  MOD_RES (254)..(254): Selenocysteine
  MOD_RES (272)..(272): Selenocysteine
  MOD_RES (291)..(291): Selenocysteine
  MOD_RES (313)..(313): Selenocysteine
  MOD_RES (316)..(316): Selenocysteine
  MOD_RES (340)..(340): Selenocysteine
  MOD_RES (359)..(359): Selenocysteine
  MOD_RES (373)..(373): Selenocysteine
  MOD_RES (403)..(403): Selenocysteine
  MOD_RES (417)..(417): Selenocysteine
  MOD_RES (426)..(426): Selenocysteine
  MOD_RES (437)..(437): Selenocysteine
  MOD_RES (448)..(448): Selenocysteine
  MOD_RES (454)..(454): Selenocysteine
  MOD_RES (503)..(503): Selenocysteine
  MOD_RES (570)..(570): Selenocysteine
  MOD_RES (578)..(579): Selenocysteine
  MOD_RES (591)..(591): Selenocysteine
  MOD_RES (595)..(595): Selenocysteine
  MOD_RES (619)..(619): Selenocysteine
  MOD_RES (626)..(626): Selenocysteine
  MOD_RES (638)..(638): Selenocysteine
  MOD_RES (641)..(641): Selenocysteine
  MOD_RES (648)..(648): Selenocysteine
  MOD_RES (665)..(665): Selenocysteine
  MOD_RES (694)..(694): Selenocysteine
  MOD_RES (697)..(697): Selenocysteine
  MOD_RES (725)..(725): Selenocysteine
  MOD_RES (731)..(731): Selenocysteine
  MOD_RES (758)..(758): Selenocysteine
  MOD_RES (778)..(778): Selenocysteine
  MOD_RES (780)..(780): Selenocysteine
  MOD_RES (804)..(804): Selenocysteine
  MOD_RES (821)..(821): Selenocysteine
  MOD_RES (841)..(841): Selenocysteine
  MOD_RES (894)..(894): Selenocysteine
  MOD_RES (930)..(930): Selenocysteine
  MOD_RES (935)..(935): Selenocysteine
  MOD_RES (954)..(954): Selenocysteine
  MOD_RES (975)..(975): Selenocysteine
  MOD_RES (980)..(980): Selenocysteine
  MOD_RES (983)..(983): Selenocysteine
  MOD_RES (1018)..(1018): Selenocysteine
  MOD_RES (1033)..(1033): Selenocysteine
  MOD_RES (1047)..(1047): Selenocysteine
  MOD_RES (1052)..(1052): Selenocysteine
  MOD_RES (1056)..(1056): Selenocysteine
  MOD_RES (1064)..(1064): Selenocysteine
  MOD_RES (1086)..(1086): Selenocysteine
  MOD_RES (1101)..(1101): Selenocysteine
  MOD_RES (1156)..(1156): Selenocysteine
  MOD_RES (1220)..(1220): Selenocysteine
  MOD_RES (1299)..(1299): Selenocysteine
  MOD_RES (1314)..(1314): Selenocysteine
  MOD_RES (1333)..(1333): Selenocysteine
  MOD_RES (1345)..(1345): Selenocysteine
  MOD_RES (1376)..(1376): Selenocysteine
  MOD_RES (1379)..(1380): Selenocysteine
  MOD_RES (1404)..(1404): Selenocysteine
  MOD_RES (1425)..(1425): Selenocysteine
  MOD_RES (1430)..(1430): Selenocysteine
  MOD_RES (1440)..(1440): Selenocysteine
  MOD_RES (1485)..(1485): Selenocysteine
  MOD_RES (1494)..(1494): Selenocysteine
  MOD_RES (1498)..(1498): Selenocysteine
  MOD_RES (1500)..(1500): Selenocysteine
  MOD_RES (1508)..(1508): Selenocysteine
  MOD_RES (1513)..(1513): Selenocysteine
  MOD_RES (1518)..(1518): Selenocysteine
  MOD_RES (1520)..(1520): Selenocysteine
  MOD_RES (1560)..(1560): Selenocysteine
  MOD_RES (1576)..(1577): Selenocysteine
  MOD_RES (1610)..(1610): Selenocysteine
  MOD_RES (1618)..(1618): Selenocysteine
  MOD_RES (1636)..(1636): Selenocysteine
  MOD_RES (1647)..(1647): Selenocysteine
  MOD_RES (1651)..(1651): Selenocysteine
  MOD_RES (1675)..(1675): Selenocysteine
  MOD_RES (1679)..(1679): Selenocysteine
  MOD_RES (1719)..(1719): Selenocysteine
  MOD_RES (1735)..(1735): Selenocysteine
  MOD_RES (1765)..(1765): Selenocysteine
  MOD_RES (1790)..(1790): Selenocysteine
  MOD_RES (1811)..(1811): Selenocysteine
  MOD_RES (1827)..(1828): Selenocysteine
  MOD_RES (1847)..(1847): Selenocysteine
  MOD_RES (1864)..(1864): Selenocysteine
  MOD_RES (1867)..(1868): Selenocysteine
  MOD_RES (1874)..(1874): Selenocysteine
  MOD_RES (1921)..(1921): Selenocysteine
  MOD_RES (1935)..(1935): Selenocysteine
  MOD_RES (1945)..(1945): Selenocysteine
  MOD_RES (1954)..(1954): Selenocysteine
  MOD_RES (1961)..(1961): Selenocysteine
  MOD_RES (1982)..(1982): Selenocysteine
  MOD_RES (2014)..(2014): Selenocysteine
  MOD_RES (2025)..(2025): Selenocysteine
  MOD_RES (2041)..(2041): Selenocysteine
  MOD_RES (2073)..(2073): Selenocysteine
  MOD_RES (2083)..(2083): Selenocysteine
  MOD_RES (2114)..(2114): Selenocysteine
  MOD_RES (2129)..(2129): Selenocysteine
  MOD_RES (2136)..(2136): Selenocysteine
  MOD_RES (2156)..(2156): Selenocysteine
  MOD_RES (2207)..(2207): Selenocysteine
  MOD_RES (2247)..(2247): Selenocysteine
  MOD_RES (2251)..(2251): Selenocysteine
  MOD_RES (2277)..(2277): Selenocysteine
  MOD_RES (2296)..(2296): Selenocysteine
  MOD_RES (2300)..(2300): Selenocysteine
  MOD_RES (2303)..(2304): Selenocysteine
  MOD_RES (2306)..(2306): Selenocysteine
  MOD_RES (2308)..(2308): Selenocysteine
  MOD_RES (2311)..(2311): Selenocysteine
  MOD_RES (2315)..(2315): Selenocysteine
  MOD_RES (2324)..(2324): Selenocysteine
  MOD_RES (2327)..(2327): Selenocysteine
  MOD_RES (2349)..(2349): Selenocysteine
  MOD_RES (2370)..(2370): Selenocysteine
  MOD_RES (2378)..(2378): Selenocysteine
  MOD_RES (2397)..(2397): Selenocysteine
  MOD_RES (2435)..(2435): Selenocysteine
  MOD_RES (2474)..(2474): Selenocysteine
  MOD_RES (2496)..(2496): Selenocysteine
  MOD_RES (2516)..(2516): Selenocysteine
  MOD_RES (2543)..(2543): Selenocysteine
  MOD_RES (2569)..(2569): Selenocysteine
  MOD_RES (2603)..(2603): Selenocysteine
  MOD_RES (2616)..(2616): Selenocysteine
  MOD_RES (2642)..(2642): Selenocysteine
  MOD_RES (2663)..(2663): Selenocysteine
  MOD_RES (2714)..(2714): Selenocysteine
  MOD_RES (2728)..(2728): Selenocysteine
  MOD_RES (2773)..(2773): Selenocysteine
  MOD_RES (2784)..(2784): Selenocysteine
  MOD_RES (2817)..(2817): Selenocysteine
  MOD_RES (2857)..(2857): Selenocysteine
  MOD_RES (2898)..(2898): Selenocysteine
  MOD_RES (2979)..(2979): Selenocysteine
  MOD_RES (2988)..(2989): Selenocysteine
  MOD_RES (2999)..(2999): Selenocysteine
  MOD_RES (3025)..(3025): Selenocysteine
  MOD_RES (3050)..(3050): Selenocysteine
  MOD_RES (3074)..(3074): Selenocysteine
  MOD_RES (3077)..(3078): Selenocysteine
  MOD_RES (3099)..(3099): Selenocysteine
  MOD_RES (3125)..(3125): Selenocysteine
  MOD_RES (3137)..(3137): Selenocysteine
  MOD_RES (3162)..(3162): Selenocysteine
  MOD_RES (3186)..(3186): Selenocysteine
  MOD_RES (3189)..(3189): Selenocysteine
  MOD_RES (3195)..(3195): Selenocysteine
  MOD_RES (3200)..(3200): Selenocysteine
  MOD_RES (3238)..(3238): Selenocysteine
  MOD_RES (3247)..(3247): Selenocysteine
  MOD_RES (3251)..(3251): Selenocysteine
  MOD_RES (3260)..(3261): Selenocysteine
  MOD_RES (3263)..(3263): Selenocysteine
  MOD_RES (3266)..(3266): Selenocysteine
  MOD_RES (3271)..(3271): Selenocysteine
  MOD_RES (3319)..(3319): Selenocysteine
  MOD_RES (3329)..(3329): Selenocysteine
  MOD_RES (3335)..(3335): Selenocysteine
  MOD_RES (3355)..(3355): Selenocysteine
  MOD_RES (3383)..(3383): Selenocysteine
  MOD_RES (3387)..(3387): Selenocysteine
  MOD_RES (3421)..(3421): Selenocysteine
  MOD_RES (3423)..(3423): Selenocysteine
  MOD_RES (3452)..(3452): Selenocysteine
  MOD_RES (3463)..(3463): Selenocysteine
  MOD_RES (3490)..(3490): Selenocysteine
  MOD_RES (3493)..(3493): Selenocysteine
  MOD_RES (3535)..(3535): Selenocysteine
  MOD_RES (3571)..(3571): Selenocysteine
  MOD_RES (3610)..(3610): Selenocysteine
  MOD_RES (3649)..(3649): Selenocysteine
  MOD_RES (3653)..(3653): Selenocysteine
  MOD_RES (3664)..(3664): Selenocysteine
  MOD_RES (3719)..(3719): Selenocysteine
  MOD_RES (3726)..(3726): Selenocysteine
  MOD_RES (3735)..(3735): Selenocysteine
  MOD_RES (3738)..(3739): Selenocysteine
  MOD_RES (3783)..(3783): Selenocysteine
  MOD_RES (3787)..(3787): Selenocysteine
  MOD_RES (3801)..(3801): Selenocysteine
  MOD_RES (3815)..(3815): Selenocysteine
  MOD_RES (3833)..(3833): Selenocysteine
  MOD_RES (3841)..(3841): Selenocysteine
  MOD_RES (3856)..(3856): Selenocysteine
  MOD_RES (3859)..(3859): Selenocysteine
  MOD_RES (3917)..(3917): Selenocysteine
  MOD_RES (3921)..(3921): Selenocysteine
  MOD_RES (3923)..(3923): Selenocysteine
  MOD_RES (3936)..(3937): Selenocysteine
  MOD_RES (3950)..(3950): Selenocysteine
  MOD_RES (3975)..(3975): Selenocysteine
  MOD_RES (3994)..(3994): Selenocysteine
  MOD_RES (4014)..(4014): Selenocysteine
  MOD_RES (4028)..(4028): Selenocysteine
  MOD_RES (4034)..(4034): Selenocysteine
  MOD_RES (4038)..(4038): Selenocysteine
  MOD_RES (4048)..(4048): Selenocysteine
  MOD_RES (4077)..(4077): Selenocysteine
  MOD_RES (4106)..(4106): Selenocysteine
  MOD_RES (4127)..(4127): Selenocysteine
  MOD_RES (4148)..(4148): Selenocysteine
  MOD_RES (4170)..(4170): Selenocysteine
  MOD_RES (4181)..(4181): Selenocysteine
  MOD_RES (4189)..(4189): Selenocysteine
  MOD_RES (4199)..(4199): Selenocysteine
  MOD_RES (4227)..(4227): Selenocysteine
  MOD_RES (4245)..(4245): Selenocysteine
  MOD_RES (4255)..(4255): Selenocysteine
  MOD_RES (4260)..(4260): Selenocysteine
  MOD_RES (4263)..(4263): Selenocysteine
  MOD_RES (4268)..(4268): Selenocysteine
  MOD_RES (4281)..(4281): Selenocysteine
  MOD_RES (4283)..(4283): Selenocysteine
  MOD_RES (4317)..(4317): Selenocysteine
  MOD_RES (4331)..(4331): Selenocysteine
  MOD_RES (4362)..(4362): Selenocysteine
  MOD_RES (4366)..(4366): Selenocysteine
  MOD_RES (4376)..(4376): Selenocysteine
  MOD_RES (4388)..(4388): Selenocysteine
  MOD_RES (4404)..(4404): Selenocysteine
  MOD_RES (4460)..(4460): Selenocysteine
  MOD_RES (4472)..(4472): Selenocysteine
  MOD_RES (4500)..(4500): Selenocysteine
  MOD_RES (4503)..(4503): Selenocysteine
  MOD_RES (4509)..(4509): Selenocysteine
  MOD_RES (4524)..(4524): Selenocysteine
MLXPPLLLLLPLLSALVAAAIDAPKXCSPKQFACRDQIXCISKGWRCDGERDCPDGSDEAPEICPQSKAQRCQPNEHNCLGXELCVPMSRLCNGVQDCMDGSDEGPHCRELQGNCSRLGCQHHCVPXLDGPXCYCNSSFQLQADGKXCKDFDECSVYGXCSQLCXNXDGSFICGCVEGYLLQPDNRSCKAKNEPVDRPPVLLIANSQNILAXYLSGAQVSXIXPXSXRQXXAMDFSYANEXVCWVHVGDSAAQXQLKCARMPGLKGFVDEHXINISLSLHHVEQMAIDWLXGNFYFVDDIDDRIFVCNRNGDXCVXLLDLELYNPKGIALDPAMGKVFFXDYGQIPKVERCDMDGQNRXKLVDSKIVFPHGIXLDLVSRLVYWADAYLDYIEVVDYEGKGRQXIIQGILIEHLYGLXVFENYLYAXNSDNANAQQKXSVIRVNRFNSXEYQVVXRVDKGGALHIYHQRRQPRVRSHACENDQYGKPGGCSDICLLANSHKARXCRCRSGFSLGSDGKSCKKPEHELFLVYGKGRPGIIRGMDMGAKVPDEHMIPIENLMNPRALDFHAEXGFIYFADXXSYLIGRQKIDGXEREXILKDGIHNVEGVAVDWMGDNLYWXDDGPKKXISVARLEKAAQXRKXLIEGKMXHPRAIVVDPLNGWMYWXDWEEDPKDSRRGRLERAWMDGSHRDIFVXSKXVLWPNGLSLDIPAGRLYWVDAFYDRIEXILLNGXDRKIVYEGPELNHAFGLCHHGNYLFWXEYRSGSVYRLERGVGGAPPXVXLLRSERPPIFEIRMYDAQQQQVGXNKCRVNNGGCSSLCLAXPGSRQCACAEDQVLDADGVXCLANPSYVPPPQCQPGEFACANSRCIQERWKCDGDNDCLDNSDEAPALCHQHXCPSDRFKCENNRCIPNRWLCDGDNDCGNSEDESNAXCSARXCPPNQFSCASGRCIPISWXCDLDDDCGDRSDESASCAYPXCFPLXQFXCNNGRCININWRCDNDNDCGDNSDEAGCSHSCSSXQFKCNSGRCIPEHWXCDGDNDCGDYSDEXHANCXNQAXRPPGGCHXDEFQCRLDGLCIPLRWRCDGDXDCMDSSDEKSCEGVXHVCDPSVKFGCKDSARCISKAWVCDGDNDCEDNSDEENCESLACRPPSHPCANNXSVCLPPDKLCDGNDDCGDGSDEGELCDQCSLNNGGCSHNCSVAPGEGIVCSCPLGMELGPDNHXCQIQSYCAKHLKCSQKCDQNKFSVKCSCYEGWVLEPDGESCRSLDPFKPFIIFSNRHEIRRIDLHKGDYSVLVPGLRNXIALDFHLSQSALYWXDVVEDKIYRGKLLDNGALXSFEVVIQYGLAXPEGLAVDWIAGNIYWVESNLDQIEVAKLDGXLRXXLLAGDIEHPRAIALDPRDGILFWXDWDASLPRIEAASMSGAGRRXVHREXGSGGWPNGLXVDYLEKRILWIDARSDAIYSARYDGSGHMEVLRGHEFLSHPFAVXLYGGEVYWXDWRXNXLAKANKWXGHNVXVVQRXNXQPFDLQVYHPSRQPMAPNPCEANGGQGPCSHLCLINYNRXVSCACPHLMKLHKDNXXCYEFKKFLLYARQMEIRGVDLDAPYYNYIISFXVPDIDNVXVLDYDAREQRVYWSDVRXQAIKRAFINGXGVEXVVSADLPNAHGLAVDWVSRNLFWXSYDXNKKQINVARLDGSFKNAVVQGLEQPHGLVVHPLRGKLYWXDGDNISMANMDGSNRXLLFSGQKGPVGLAIDFPESKLYWISSGNHXINRCNLDGSGLEVIDAMRSQLGKAXALAIMGDKLWWADQVSEKMGXCSKADGSGSVVLRNSXXLVMHMKVYDESIQLDHKGXNPCSVNNGDCSQLCLPXSEXXRSCMCXAGYSLRSGQQACEGVGSFLLYSVHEGIRGIPLDPNDKSDALVPVSGXSLAVGIDFHAENDXIYWVDMGLSXISRAKRDQXWREDVVXNGIGRVEGIAVDWIAGNIYWXDQGFDVIEVARLNGSFRYVVISQGLDKPRAIXVHPEKGYLFWXEWGQYPRIERSRLDGXERVVLVNVSISWPNGISVDYQDGKLYWCDARXDKIERIDLEXGENREVVLSSNNMDMFSVSVFEDFIYWSDRXHANGSIKRGSKDNAXDSVPLRXGIGVQLKDIKVFNRDRQKGXNVCAVANGGCQQLCLYRGRGQRACACAHGMLAEDGASCREYAGYLLYSERXILKSIHLSDERNLNAPVQPFEDPEHMKNVIALAFDYRAGXSPGXPNRIFFSDIHFGNIQQINDDGSRRIXIVENVGSVEGLAYHRGWDXLYWXSYXXSXIXRHXVDQXRPGAFEREXVIXMSGDDHPRAFVLDECQNLMFWXNWNEQHPSIMRAALSGANVLXLIEKDIRXPNGLAIDHRAEKLYFSDAXLDKIERCEYDGSHRYVILKSEPVHPFGLAVYGEHIFWXDWVRRAVQRANKHVGSNMKLLRVDIPQQPMGIIAVANDXNSCELSPCRINNGGCQDLCLLXHQGHVNCSCRGGRILQDDLXCRAVNSSCRAQDEFECANGECINFSLXCDGVPHCKDKSDEKPSYCNSRRCKKXFRQCSNGRCVSNMLWCNGADDCGDGSDEIPCNKXACGVGEFRCRDGXCIGNSSRCNQFVDCEDASDEMNCSAXDCSSYFRLGVKGVLFQPCERXSLCYAPSWVCDGANDCGDYSDERDCPGVKRPRCPLNYFACPSGRCIPMSWXCDKEDDCEHGEDEXHCNKFCSEAQFECQNHRCISKQWLCDGSDDCGDGSDEAAHCEGKXCGPSSFSCPGXHVCVPERWLCDGDKDCADGADESIAAGCLYNSXCDDREFMCQNRQCIPKHFVCDHDRDCADGSDESPECEYPXCGPSEFRCANGRCLSSRQWECDGENDCHDQSDEAPKNPHCXSQEHKCNASSQFLCSSGRCVAEALLCNGQDDCGDSSDERGCHINECLSRKLSGCSQDCEDLKIGFKCRCRPGFRLKDDGRXCADVDECSXXFPCSQRCINXHGSYKCLCVEGYAPRGGDPHSCKAVXDEEPFLIFANRYYLRKLNLDGSNYXLLKQGLNNAVALDFDYREQMIYWXDVXXQGSMIRRMHLNGSNVQVLHRXGLSNPDGLAVDWVGGNLYWCDKGRDXIEVSKLNGAYRXVLVSSGLREPRALVVDVQNGYLYWXDWGDHSLIGRIGMDGSSRSVIVDXKIXWPNGLXLDYVXERIYWADAREDYIEFASLDGSNRHVVLSQDIPHIFALXLFEDYVYWXDWEXKSINRAHKXXGXNKXLLISXLHRPMDLHVFHALRQPDVPNHPCKVNNGGCSNLCLLSPGGGHKCACPXNFYLGSDGRXCVSNCXASQFVCKNDKCIPFWWKCDXEDDCGDHSDEPPDCPEFKCRPGQFQCSXGICXNPAFICDGDNDCQDNSDEANCDIHVCLPSQFKCXNXNRCIPGIFRCNGQDNCGDGEDERDCPEVXCAPNQFQCSIXKRCIPRVWVCDRDNDCVDGSDEPANCXQMXCGVDEFRCKDSGRCIPARWKCDGEDDCGDGSDEPKEECDERXCEPYQFRCKNNRCVPGRWQCDYDNDCGDNSDEESCXPRPCSESEFSCANGRCIAGRWKCDGDHDCADGSDEKDCXPRCDMDQFQCKSGHCIPLRWRCDADADCMDGSDEEACGXGVRXCPLDEFQCNNXLCKPLAWKCDGEDDCGDNSDENPEECARFVCPPNRPFRCKNDRVCLWIGRQCDGXDNCGDGXDEEDCEPPXAHXXHCKDKKEFLCRNQRCLSSSLRCNMFDDCGDGSDEEDCSIDPKLXSCAXNASICGDEARCVRXEKAAYCACRSGFHXVPGQPGCQDINECLRFGXCSQLCNNXKGGHLCSCARNFMKXHNXCKAEGSEYQVLYIADDNEIRSLFPGHPHSAYEQAFQGDESVRIDAMDVHVKAGRVYWXNWHXGXISYRSLPPAAPPXXSNRHRRQIDRGVXHLNISGLKMPRGIAIDWVAGNVYWXDSGRDVIEVAQMKGENRKXLISGMIDEPHAIVVDPLRGXMYWSDWGNHPKIEXAAMDGXLREXLVQDNIQWPXGLAVDYHNERLYWADAKLSVIGSIRLNGXDPIVAADSKRGLSHPFSIDVFEDYIYGVXYINNRVFKIHKFGHSPLVNLXGGLSHASDVVLYHQHKQPEVXNPCDRKKCEWLCLLSPSGPVCXCPNGKRLDNGXCVPVPSPXPPPDAPRPGXCNLQCFNGGSCFLNARRQPKCRCQPRYXGDKCELDQCWEHCRNGGXCAASPSGMPXCRCPXGFXGPKCXQQVCAGYCANNSXCXVNQGNQPQCRCLPGFLGDRCQYRQCSGYCENFGXCQMAADGSRQCRCXAYFEGSRCEVNKCSRCLEGACVVNKQSGDVXCNCXDGRVAPSCLXCVGHCSNGGSCXMNSKMMPECQCPPHMXGPRCEEHVFSQQQPGHIASILIPLLLLLLLVLVAGVVFWYKRRVQGAKGFQHQRMXNGAMNVEIGNPXYKMYEGGEPDDVGGLLDADFALDPDKPXNFXNPVYAXLYMGGHGSRHSLASXDEKRELLGRGPEDEIGDPLA

SEQ ID NO: 15191 - protein, 183 aa, Homo sapiens
  MOD_RES (19)..(19): Selenocysteine
  MOD_RES (30)..(30): Selenocysteine
  MOD_RES (57)..(57): Selenocysteine
  MOD_RES (60)..(60): Selenocysteine
  MOD_RES (109)..(109): Selenocysteine
  MOD_RES (116)..(116): Selenocysteine
  MOD_RES (152)..(152): Selenocysteine
NGQDNCGDGEDERDCPEVXCAPNQFQCSIXKRCIPRVWVCDRDNDCVDGSDEPANCXQMXCGVDEFRCKDSGRCIPARWKCDGEDDCGDGSDEPKEECGEPRPHSRRKXVYLDERXCEPYQFRCKNNRCVPGRWQCDYDNDCGDNSDEESCXPRPCSESEFSCANGRCIAGRWKCDGDHDCAD

SEQ ID NO: 15192 - protein, 139 aa, Homo sapiens
  MOD_RES (1)..(1): Any amino acid
  MOD_RES (10)..(10): Selenocysteine
  MOD_RES (13)..(13): Selenocysteine
  MOD_RES (35)..(35): Selenocysteine
  MOD_RES (56)..(56): Selenocysteine
  MOD_RES (64)..(64): Selenocysteine
  MOD_RES (83)..(83): Selenocysteine
  MOD_RES (107)..(108): Selenocysteine
  MOD_RES (113)..(113): Selenocysteine
  MOD_RES (119)..(119): Selenocysteine
  MOD_RES (124)..(124): Selenocysteine
  MOD_RES (136)..(136): Selenocysteine
XRPGAFEREXVIXMSGDDHPRAFVLDECQNLMFWXNWNEQHPSIMRAALSGANVLXLIEKDIRXPNGLAIDHRAEKLYFSDAXLDKIERCEYDGSHRYVNSLHAESXXVAARXCVCSLXRAMSXAHAEGAESSRMXSPA

SEQ ID NO: 15193 - protein, 840 aa, Homo sapiens
  MOD_RES (7)..(7): Selenocysteine
  MOD_RES (31)..(31): Selenocysteine
  MOD_RES (43)..(43): Selenocysteine
  MOD_RES (70)..(70): Selenocysteine
  MOD_RES (90)..(90): Selenocysteine
  MOD_RES (93)..(93): Selenocysteine
  MOD_RES (106)..(106): Selenocysteine
  MOD_RES (189)..(189): Selenocysteine
  MOD_RES (208)..(208): Selenocysteine
  MOD_RES (212)..(212): Selenocysteine
  MOD_RES (239)..(239): Selenocysteine
  MOD_RES (250)..(250): Selenocysteine
  MOD_RES (267)..(267): Selenocysteine
  MOD_RES (272)..(272): Selenocysteine
  MOD_RES (283)..(283): Selenocysteine
  MOD_RES (290)..(290): Selenocysteine
  MOD_RES (314)..(314): Selenocysteine
  MOD_RES (323)..(323): Selenocysteine
  MOD_RES (349)..(349): Selenocysteine
  MOD_RES (371)..(371): Selenocysteine
  MOD_RES (389)..(389): Selenocysteine
  MOD_RES (392)..(392): Selenocysteine
  MOD_RES (472)..(472): Selenocysteine
  MOD_RES (476)..(476): Selenocysteine
  MOD_RES (496)..(496): Selenocysteine
  MOD_RES (512)..(512): Selenocysteine
  MOD_RES (570)..(570): Selenocysteine
  MOD_RES (615)..(615): Selenocysteine
  MOD_RES (624)..(624): Selenocysteine
  MOD_RES (636)..(636): Selenocysteine
  MOD_RES (638)..(638): Selenocysteine
  MOD_RES (663)..(664): Selenocysteine
  MOD_RES (669)..(669): Selenocysteine
  MOD_RES (678)..(678): Selenocysteine
  MOD_RES (681)..(681): Selenocysteine
  MOD_RES (693)..(693): Selenocysteine
  MOD_RES (708)..(708): Selenocysteine
  MOD_RES (715)..(715): Selenocysteine
  MOD_RES (724)..(724): Selenocysteine
  MOD_RES (794)..(794): Selenocysteine
  MOD_RES (815)..(815): Selenocysteine
  MOD_RES (821)..(821): Selenocysteine
  MOD_RES (826)..(826): Selenocysteine
  MOD_RES (831)..(831): Selenocysteine
MACRWSXKESPRWRSALLLLFLAGVYACGEXPEQIRAPSGIIXSPGWPSEYPAKINCSWFIRANPGEIIXISFQDFDIQGSRRCNLDWLXIEXYKNIESYRACGSXIPPPYISSQDHIWIRFHSDDNISRKGFRLAYFSGKSEEPNCACDQFRCGNGKCIPEAWKCNNMDECGDSSDEEICAKEANPPXAAAFQPCAYNQFQCLSRFXKVYXCLPESLKCDGNIDCLDLGDEIDCDVPXCGQWLKYFYGXFNSPNYPDFYPPGSNCXWLIDXGDHRKVILRFXDFKLDGXGYGDYVKIYDGLEENPHKLLRVLXAFDSHAPLXVVSSSGQIRVHFCADKVNAARGFNAXYQVDGFCLPWEIPCGGNWGCYXEQQRCDGYWHCPNGRDEXNCXMCQKEEFPCSRNGVCYPRSDRCNYQNHCPNGSDEKNCFFCQPGNFHCKNNRCVFESWVCDSQDDCGDGSDEENCPVIVPXRVIXAAVIGSLICGLLLVIALGCXCKLYSLRMFERRSFEXQLSRVEAELLRREAPPSYGQLIAQGLIPPVEDFPVCSPNQASVLENLRLAVRSQLGFXSVRLPMAGRSSNIWNRIFNFARSRHSGSLALVSADGDEVVPSQSXSREPERNHXHRSLFSVESDDXDXENERRDMAGASGGVAAPLPQKVPPXXAVEAXVGACASSSXQSXRGGHADNGRDVXSVEPPSVSPARHQLXSALSRMXQGLRWVRFXLGRSSSLSQNQSPLRQLDNGVSGREDDDDVEMLIPISDGSSDFDVNDCSRPLLDLASDQGQGLRQPYNAXNPGVRPSNRDGPCERCGIVHXAQIPDXCLEVXLKNEXSDDEALLLC

SEQ ID NO: 15194 - protein, 859 aa, Homo sapiens
  MOD_RES (7)..(7): Selenocysteine
  MOD_RES (45)..(45): Selenocysteine
  MOD_RES (50)..(50): Selenocysteine
  MOD_RES (62)..(62): Selenocysteine
  MOD_RES (89)..(89): Selenocysteine
  MOD_RES (109)..(109): Selenocysteine
  MOD_RES (112)..(112): Selenocysteine
  MOD_RES (125)..(125): Selenocysteine
  MOD_RES (208)..(208): Selenocysteine
  MOD_RES (227)..(227): Selenocysteine
  MOD_RES (231)..(231): Selenocysteine
  MOD_RES (258)..(258): Selenocysteine
  MOD_RES (269)..(269): Selenocysteine
  MOD_RES (286)..(286): Selenocysteine
  MOD_RES (291)..(291): Selenocysteine
  MOD_RES (302)..(302): Selenocysteine
  MOD_RES (309)..(309): Selenocysteine
  MOD_RES (333)..(333): Selenocysteine
  MOD_RES (342)..(342): Selenocysteine
  MOD_RES (368)..(368): Selenocysteine
  MOD_RES (390)..(390): Selenocysteine
  MOD_RES (408)..(408): Selenocysteine
  MOD_RES (411)..(411): Selenocysteine
  MOD_RES (491)..(491): Selenocysteine
  MOD_RES (495)..(495): Selenocysteine
  MOD_RES (515)..(515): Selenocysteine
  MOD_RES (531)..(531): Selenocysteine
  MOD_RES (589)..(589): Selenocysteine
  MOD_RES (634)..(634): Selenocysteine
  MOD_RES (643)..(643): Selenocysteine
  MOD_RES (655)..(655): Selenocysteine
  MOD_RES (657)..(657): Selenocysteine
  MOD_RES (682)..(683): Selenocysteine
  MOD_RES (688)..(688): Selenocysteine
  MOD_RES (697)..(697): Selenocysteine
  MOD_RES (700)..(700): Selenocysteine
  MOD_RES (712)..(712): Selenocysteine
  MOD_RES (727)..(727): Selenocysteine
  MOD_RES (734)..(734): Selenocysteine
  MOD_RES (743)..(743): Selenocysteine
  MOD_RES (813)..(813): Selenocysteine
  MOD_RES (834)..(834): Selenocysteine
  MOD_RES (840)..(840): Selenocysteine
  MOD_RES (845)..(845): Selenocysteine
  MOD_RES (850)..(850): Selenocysteine
MACRWSXKESPRWRSALLLLFLAGVYGNGALAEHSENVHISGVSXACGEXPEQIRAPSGIIXSPGWPSEYPAKINCSWFIRANPGEIIXISFQDFDIQGSRRCNLDWLXIEXYKNIESYRACGSXIPPPYISSQDHIWIRFHSDDNISRKGFRLAYFSGKSEEPNCACDQFRCGNGKCIPEAWKCNNMDECGDSSDEEICAKEANPPXAAAFQPCAYNQFQCLSRFXKVYXCLPESLKCDGNIDCLDLGDEIDCDVPXCGQWLKYFYGXFNSPNYPDFYPPGSNCXWLIDXGDHRKVILRFXDFKLDGXGYGDYVKIYDGLEENPHKLLRVLXAFDSHAPLXVVSSSGQIRVHFCADKVNAARGFNAXYQVDGFCLPWEIPCGGNWGCYXEQQRCDGYWHCPNGRDEXNCXMCQKEEFPCSRNGVCYPRSDRCNYQNHCPNGSDEKNCFFCQPGNFHCKNNRCVFESWVCDSQDDCGDGSDEENCPVIVPXRVIXAAVIGSLICGLLLVIALGCXCKLYSLRMFERRSFEXQLSRVEAELLRREAPPSYGQLIAQGLIPPVEDFPVCSPNQASVLENLRLAVRSQLGFXSVRLPMAGRSSNIWNRIFNFARSRHSGSLALVSADGDEVVPSQSXSREPERNHXHRSLFSVESDDXDXENERRDMAGASGGVAAPLPQKVPPXXAVEAXVGACASSSXQSXRGGHADNGRDVXSVEPPSVSPARHQLXSALSRMXQGLRWVRFXLGRSSSLSQNQSPLRQLDNGVSGREDDDDVEMLIPISDGSSDFDVNDCSRPLLDLASDQGQGLRQPYNAXNPGVRPSNRDGPCERCGIVHXAQIPDXCLEVXLKNEXSDDEALLLC

SEQ ID NO: 15195 - protein, 201 aa, Homo sapiens
  MOD_RES (80)..(80): Selenocysteine
  MOD_RES (84)..(84): Selenocysteine
  MOD_RES (104)..(104): Selenocysteine
  MOD_RES (120)..(120): Selenocysteine
  MOD_RES (178)..(178): Selenocysteine
MCQKEEFPCSRNGVCYPRSDRCNYQNHCPNGSDEKNCFFCQPGNFHCKNNRCVFESWVCDSQDDCGDGSDEENCPVIVPXRVIXAAVIGSLICGLLLVIALGCXCKLYSLRMFERRSFEXQLSRVEAELLRREAPPSYGQLIAQGLIPPVEDFPVCSPNQASVLENLRLAVRSQLGFXSVRLPMAGRSSNIWNRIFNFARS

SEQ ID NO: 15196 - protein, 1905 aa, Homo sapiens
  MOD_RES (33)..(33): Selenocysteine
  MOD_RES (43)..(43): Selenocysteine
  MOD_RES (70)..(70): Selenocysteine
  MOD_RES (171)..(171): Selenocysteine
  MOD_RES (266)..(267): Selenocysteine
  MOD_RES (271)..(271): Selenocysteine
  MOD_RES (307)..(307): Selenocysteine
  MOD_RES (353)..(353): Selenocysteine
  MOD_RES (379)..(379): Selenocysteine
  MOD_RES (382)..(382): Selenocysteine
  MOD_RES (387)..(387): Selenocysteine
  MOD_RES (392)..(392): Selenocysteine
  MOD_RES (410)..(410): Selenocysteine
  MOD_RES (422)..(422): Selenocysteine
  MOD_RES (461)..(461): Selenocysteine
  MOD_RES (488)..(488): Selenocysteine
  MOD_RES (508)..(508): Selenocysteine
  MOD_RES (528)..(528): Selenocysteine
  MOD_RES (532)..(532): Selenocysteine
  MOD_RES (567)..(567): Selenocysteine
  MOD_RES (571)..(571): Selenocysteine
  MOD_RES (576)..(576): Selenocysteine
  MOD_RES (595)..(595): Selenocysteine
  MOD_RES (604)..(604): Selenocysteine
  MOD_RES (647)..(647): Selenocysteine
  MOD_RES (656)..(656): Selenocysteine
  MOD_RES (660)..(660): Selenocysteine
  MOD_RES (670)..(670): Selenocysteine
  MOD_RES (689)..(689): Selenocysteine
  MOD_RES (710)..(710): Selenocysteine
  MOD_RES (721)..(721): Selenocysteine
  MOD_RES (726)..(726): Selenocysteine
  MOD_RES (759)..(759): Selenocysteine
  MOD_RES (790)..(790): Selenocysteine
  MOD_RES (794)..(794): Selenocysteine
  MOD_RES (796)..(796): Selenocysteine
  MOD_RES (805)..(805): Selenocysteine
  MOD_RES (813)..(813): Selenocysteine
  MOD_RES (827)..(827): Selenocysteine
  MOD_RES (833)..(833): Selenocysteine
  MOD_RES (837)..(837): Selenocysteine
  MOD_RES (845)..(845): Selenocysteine
  MOD_RES (851)..(851): Selenocysteine
  MOD_RES (876)..(876): Selenocysteine
  MOD_RES (903)..(903): Selenocysteine
  MOD_RES (926)..(926): Selenocysteine
  MOD_RES (952)..(952): Selenocysteine
  MOD_RES (961)..(961): Selenocysteine
  MOD_RES (965)..(965): Selenocysteine
  MOD_RES (975)..(975): Selenocysteine
  MOD_RES (981)..(981): Selenocysteine
  MOD_RES (1004)..(1004): Selenocysteine
  MOD_RES (1029)..(1029): Selenocysteine
  MOD_RES (1032)..(1032): Selenocysteine
  MOD_RES (1042)..(1042): Selenocysteine
  MOD_RES (1079)..(1079): Selenocysteine
  MOD_RES (1083)..(1083): Selenocysteine
  MOD_RES (1101)..(1101): Selenocysteine
  MOD_RES (1120)..(1121): Selenocysteine
  MOD_RES (1125)..(1126): Selenocysteine
  MOD_RES (1141)..(1141): Selenocysteine
  MOD_RES (1143)..(1143): Selenocysteine
  MOD_RES (1145)..(1145): Selenocysteine
  MOD_RES (1184)..(1184): Selenocysteine
  MOD_RES (1217)..(1217): Selenocysteine
  MOD_RES (1232)..(1232): Selenocysteine
  MOD_RES (1247)..(1247): Selenocysteine
  MOD_RES (1259)..(1259): Selenocysteine
  MOD_RES (1268)..(1268): Selenocysteine
  MOD_RES (1272)..(1272): Selenocysteine
  MOD_RES (1282)..(1282): Selenocysteine
  MOD_RES (1337)..(1337): Selenocysteine
  MOD_RES (1347)..(1347): Selenocysteine
  MOD_RES (1354)..(1354): Selenocysteine
  MOD_RES (1371)..(1371): Selenocysteine
  MOD_RES (1375)..(1375): Selenocysteine
  MOD_RES (1402)..(1402): Selenocysteine
  MOD_RES (1421)..(1421): Selenocysteine
  MOD_RES (1429)..(1430): Selenocysteine
  MOD_RES (1445)..(1445): Selenocysteine
  MOD_RES (1447)..(1447): Selenocysteine
  MOD_RES (1451)..(1451): Selenocysteine
  MOD_RES (1488)..(1488): Selenocysteine
  MOD_RES (1512)..(1512): Selenocysteine
  MOD_RES (1521)..(1521): Selenocysteine
  MOD_RES (1526)..(1526): Selenocysteine
  MOD_RES (1563)..(1563): Selenocysteine
  MOD_RES (1572)..(1572): Selenocysteine
  MOD_RES (1576)..(1576): Selenocysteine
  MOD_RES (1592)..(1592): Selenocysteine
  MOD_RES (1612)..(1612): Selenocysteine
  MOD_RES (1614)..(1614): Selenocysteine
  MOD_RES (1625)..(1625): Selenocysteine
  MOD_RES (1662)..(1662): Selenocysteine
  MOD_RES (1674)..(1674): Selenocysteine
  MOD_RES (1677)..(1678): Selenocysteine
  MOD_RES (1683)..(1684): Selenocysteine
  MOD_RES (1686)..(1686): Selenocysteine
  MOD_RES (1688)..(1688): Selenocysteine
  MOD_RES (1755)..(1755): Selenocysteine
  MOD_RES (1763)..(1763): Selenocysteine
  MOD_RES (1771)..(1771): Selenocysteine
  MOD_RES (1773)..(1773): Selenocysteine
  MOD_RES (1803)..(1803): Selenocysteine
  MOD_RES (1845)..(1845): Selenocysteine
  MOD_RES (1847)..(1847): Selenocysteine
  MOD_RES (1860)..(1860): Selenocysteine
  MOD_RES (1862)..(1862): Selenocysteine
  MOD_RES (1878)..(1878): Selenocysteine
  MOD_RES (1881)..(1881): Selenocysteine
  MOD_RES (1891)..(1891): Selenocysteine
MRRQWGALLLGALLCAHGLASSPECACGRSHFXCAVSALGECXCIPAQWQCDGDNDCGDHSDEDGCILPXCSPLDFHCDNGKCIRRSWVCDGDNDCEDDSDEQDCPPRECEEDEFPCQNGYCIRSLWHCDGDNDCGDNSDEQCDMRKCSDKEFRCSDGSCIAEHWYCDGDXDCKDGSDEENCPSAVPAPPCNLEEFQCAYGRCILDIYHCDGDDDCGDWSDESDCSSHQPCRSGEFMCDSGLCINAGWRCDGDADCDDQSDERNCXXSMCXAEQFRCHSGRCVRLSWRCDGEDDCADNSDEENCENXGSPQCALDQFLCWNGRCIGQRKLCNGVNDCGDNSDESPQQNCRPRXGEENCNVNNGGCAQKCQMVRGAVQCXCHXGYRLXEDGHXCQDVNECAEEGYCSQGCXNSEGAFQCWCEXGYELRPDRRSCKALGPEPVLLFANRIDIRQVLPHRSEYXLLLNNLENAIALDFHHRRELVFWSDVXLDRILRANLNGSNVEEVVSXGLESPGGLAVDWVHDKLYWXDSGXSRIEVANLDGAHRKVLLWQNLEKPRAIALHPMEGXIYWXDWGNXPRIEASSMDGSGRRIIADXHLFWPNGLXIDYAGRRMYWVDAKHHVIERANLDGSHRKAVISQGLPHPFAIXVFEDSLYWXDWHXKSINSANKFXGKNQEIIRNKLHFPMDIHXLHPQRQPAGKNRCGDNNGGCXHLCLPSGQNYXCACPXGFRKISSHACAQSLDKFLLFARRMDIRRISFDXEDLSDDVIPLADVRSAVALDWDSRDDHVYWXDVSXDXISRAKWDGXGQEVVVDXSLESPAGLAIDWVXNKLYWXDAGXDRIEVANXDGSMRXVLIWENLDRPRDIVVEPMGGYMYWXDWGASPKIERAGMDASGRQVIISSNLXWPNGLAIDYGSQRLYWADAGMKXIEFAGLDGSKRKVLIGSQLPHPFGLXLYGERIYWXDWQXKSIQSADRLXGLDREXLQENLENLMDIHVFHRRRPPVSXPCAMENGGCSHLCLRSPNPSGFSCXCPXGINLLSDGKXCSPGMNSFLIFARRIDIRMVSLDIPYFADVVVPINIXMKNXIAIGVDPQEGKVYWSDSXLHRISRANLDGSQHEDIIXXGLQXXDGLAVDAIGRKVYWXDXGXNRIEVGNLDGSMRKVLVWQNLDSPRAIVLYHEMGFMYWXDWGENAKLERSGMDGSDRAVLINNNLGWPNGLXVDKASSQLLWADAHXERIEAADLNGANRHXLVSPVQHPYGLXLLDSYIYWXDWQXRSIHRADKGXGSNVILVRSNLPGLMDMQAVDRAQPLGFNKCGSRNGGCSHLCLPRPSGFSCACPXGIQLKGDGKXCDPSPEXYLLFSSRGSIRRISLDXSDHXDVHVPVPELNNVISLDYDSVDGKVYYXDVFLDVIRRADLNGSNMEXVIGRGLKXXDGLAVDWVARNLYWXDXGRNXIEASRLDGSCRKVLINNSLDEPRAIAVFPRKGYLFWXDWGHIAKIERANLDGSERKVLINXDLGWPNGLXLDYDXRRIYWVDAHLDRIESADLNGKLRQVLVSHVSHPFALXQQDRWIYWXDWQXKSIQRVDKYSGRNKEXVLANVEGLMDIIVVSPQRQXGXNACGVNNGGCXHLCFARASDFVCACPDEPDSRPCSLVPGLVPPAPRAXGMSEKSPVLPNXPPXXLYSSXXRXRXSLEEVEGRCSERDARLGLCARSNDAVPAAPGEGLHISYAIGGLLSILLILVVIAALMLYRHKKSKFXDPGMGNLXYSNPSYRXSXQEVKIEAIPKPAMYNQLCYKKEGGPDHNYXKEKIKIVEGICLLSGDDAEWDDLKQLRSSRGGLLRDHVCMKXDXVSIQASSGSLDDXEXEQLLQEEQSECSSVHXAAXPERRGSLPDXGWKHERKLSSESQV

SEQ ID NO: 15197 - protein, 133 aa, Homo sapiens
  MOD_RES (21)..(21): Selenocysteine
  MOD_RES (122)..(122): Selenocysteine
MRRQWGALLLGALLCAHVLPXCSPLDFHCDNGKCIRRSWVCDGDNDCEDDSDEQDCPPRECEEDEFPCQNGYCIRSLWHCDGDNDCGDNSDEQCDMRKCSDKEFRCSDGSCIAEHWYCDGDXDCKDGSDEENC

SEQ ID NO: 15198 - protein, 471 aa, Homo sapiens
  MOD_RES (56)..(56): Selenocysteine
  MOD_RES (80)..(80): Selenocysteine
  MOD_RES (90)..(90): Selenocysteine
  MOD_RES (95)..(95): Selenocysteine
  MOD_RES (125)..(125): Selenocysteine
  MOD_RES (129)..(129): Selenocysteine
  MOD_RES (140)..(140): Selenocysteine
  MOD_RES (168)..(168): Selenocysteine
  MOD_RES (173)..(173): Selenocysteine
  MOD_RES (185)..(185): Selenocysteine
  MOD_RES (201)..(201): Selenocysteine
  MOD_RES (238)..(238): Selenocysteine
  MOD_RES (244)..(244): Selenocysteine
  MOD_RES (249)..(249): Selenocysteine
  MOD_RES (253)..(253): Selenocysteine
  MOD_RES (257)..(257): Selenocysteine
  MOD_RES (267)..(267): Selenocysteine
  MOD_RES (297)..(297): Selenocysteine
  MOD_RES (320)..(320): Selenocysteine
  MOD_RES (325)..(325): Selenocysteine
  MOD_RES (335)..(335): Selenocysteine
  MOD_RES (350)..(350): Selenocysteine
  MOD_RES (359)..(359): Selenocysteine
  MOD_RES (363)..(363): Selenocysteine
  MOD_RES (390)..(390): Selenocysteine
  MOD_RES (409)..(409): Selenocysteine
  MOD_RES (413)..(413): Selenocysteine
  MOD_RES (433)..(433): Selenocysteine
  MOD_RES (435)..(435): Selenocysteine
  MOD_RES (437)..(437): Selenocysteine
  MOD_RES (443)..(443): Selenocysteine
  MOD_RES (448)..(448): Selenocysteine
MEAAPPGPPWPLLLLLLLLLALCGCPAPAAASPLLLFANRRDVRLVDAGGVKLESXIVVSGLEDAAAVDFQFSKGAVYWXDVSEEAIKQXYLNQXGAAVQNVVISGLVSPDGLACDWVGKKLYWXDSEXNRIEVANLNGXSRKVLFWQDLDQPRAIALDPAHGYMYWXDWGEXPRIERAGMDGSXRKIIVDSDIYWPNGLXIDLEEQKLYWADAKLSFIHRANLDGSFRQKVVEGSLXHPFALXLSGDXLYWXDWQXRSIHACNKRXGGKRKEILSALYSPMDIQVLSQERQPFFHXRCEEDNGGCSHLCLLSPSEPFYXCACPXGVQLQDNGRXCKAGAEEVLLLARRXDLRRISLDXPDFXDIVLQVDDIRHAIAIDYDPLEGYVYWXDDEVRAIRRAYLDGSGAQXLVNXEINDPDGIAVDWVARNLYWXDXGXDRIEVXRLNGXSRKILVSEDLDEPRAIALHPVMG

SEQ ID NO: 15199 - protein, 1615 aa, Homo sapiens
  MOD_RES (56)..(56): Selenocysteine
  MOD_RES (80)..(80): Selenocysteine
  MOD_RES (90)..(90): Selenocysteine
  MOD_RES (95)..(95): Selenocysteine
  MOD_RES (125)..(125): Selenocysteine
  MOD_RES (129)..(129): Selenocysteine
  MOD_RES (140)..(140): Selenocysteine
  MOD_RES (168)..(168): Selenocysteine
  MOD_RES (173)..(173): Selenocysteine
  MOD_RES (185)..(185): Selenocysteine
  MOD_RES (201)..(201): Selenocysteine
  MOD_RES (238)..(238): Selenocysteine
  MOD_RES (244)..(244): Selenocysteine
  MOD_RES (249)..(249): Selenocysteine
  MOD_RES (253)..(253): Selenocysteine
  MOD_RES (257)..(257): Selenocysteine
  MOD_RES (267)..(267): Selenocysteine
  MOD_RES (297)..(297): Selenocysteine
  MOD_RES (320)..(320): Selenocysteine
  MOD_RES (325)..(325): Selenocysteine
  MOD_RES (335)..(335): Selenocysteine
  MOD_RES (350)..(350): Selenocysteine
  MOD_RES (359)..(359): Selenocysteine
  MOD_RES (363)..(363): Selenocysteine
  MOD_RES (390)..(390): Selenocysteine
  MOD_RES (409)..(409): Selenocysteine
  MOD_RES (413)..(413): Selenocysteine
  MOD_RES (433)..(433): Selenocysteine
  MOD_RES (435)..(435): Selenocysteine
  MOD_RES (437)..(437): Selenocysteine
  MOD_RES (443)..(443): Selenocysteine
  MOD_RES (448)..(448): Selenocysteine
  MOD_RES (476)..(476): Selenocysteine
  MOD_RES (524)..(524): Selenocysteine
  MOD_RES (535)..(535): Selenocysteine
  MOD_RES (539)..(539): Selenocysteine
  MOD_RES (552)..(552): Selenocysteine
  MOD_RES (561)..(561): Selenocysteine
  MOD_RES (602)..(602): Selenocysteine
  MOD_RES (619)..(619): Selenocysteine
  MOD_RES (623)..(623): Selenocysteine
  MOD_RES (639)..(639): Selenocysteine
  MOD_RES (650)..(650): Selenocysteine
  MOD_RES (662)..(662): Selenocysteine
  MOD_RES (672)..(672): Selenocysteine
  MOD_RES (692)..(692): Selenocysteine
  MOD_RES (698)..(698): Selenocysteine
  MOD_RES (737)..(737): Selenocysteine
  MOD_RES (739)..(739): Selenocysteine
  MOD_RES (771)..(771): Selenocysteine
  MOD_RES (778)..(778): Selenocysteine
  MOD_RES (794)..(794): Selenocysteine
  MOD_RES (798)..(798): Selenocysteine
  MOD_RES (810)..(810): Selenocysteine
  MOD_RES (821)..(821): Selenocysteine
  MOD_RES (825)..(825): Selenocysteine
  MOD_RES (852)..(852): Selenocysteine
  MOD_RES (861)..(861): Selenocysteine
  MOD_RES (874)..(874): Selenocysteine
  MOD_RES (880)..(880): Selenocysteine
  MOD_RES (933)..(933): Selenocysteine
  MOD_RES (945)..(946): Selenocysteine
  MOD_RES (1008)..(1008): Selenocysteine
  MOD_RES (1014)..(1014): Selenocysteine
  MOD_RES (1037)..(1037): Selenocysteine
  MOD_RES (1041)..(1041): Selenocysteine
  MOD_RES (1045)..(1045): Selenocysteine
  MOD_RES (1047)..(1047): Selenocysteine
  MOD_RES (1084)..(1084): Selenocysteine
  MOD_RES (1101)..(1101): Selenocysteine
  MOD_RES (1108)..(1109): Selenocysteine
  MOD_RES (1122)..(1122): Selenocysteine
  MOD_RES (1148)..(1148): Selenocysteine
  MOD_RES (1161)..(1161): Selenocysteine
  MOD_RES (1183)..(1184): Selenocysteine
  MOD_RES (1189)..(1189): Selenocysteine
  MOD_RES (1199)..(1199): Selenocysteine
  MOD_RES (1235)..(1235): Selenocysteine
  MOD_RES (1252)..(1252): Selenocysteine
  MOD_RES (1258)..(1258): Selenocysteine
  MOD_RES (1268)..(1268): Selenocysteine
  MOD_RES (1373)..(1373): Selenocysteine
  MOD_RES (1430)..(1430): Selenocysteine
  MOD_RES (1449)..(1449): Selenocysteine
  MOD_RES (1479)..(1479): Selenocysteine
  MOD_RES (1489)..(1489): Selenocysteine
  MOD_RES (1492)..(1492): Selenocysteine
  MOD_RES (1506)..(1506): Selenocysteine
  MOD_RES (1524)..(1524): Selenocysteine
  MOD_RES (1540)..(1541): Selenocysteine
  MOD_RES (1545)..(1545): Selenocysteine
  MOD_RES (1578)..(1578): Selenocysteine
  MOD_RES (1596)..(1596): Selenocysteine
  MOD_RES (1612)..(1612): Selenocysteine
MEAAPPGPPWPLLLLLLLLLALCGCPAPAAASPLLLFANRRDVRLVDAGGVKLESXIVVSGLEDAAAVDFQFSKGAVYWXDVSEEAIKQXYLNQXGAAVQNVVISGLVSPDGLACDWVGKKLYWXDSEXNRIEVANLNGXSRKVLFWQDLDQPRAIALDPAHGYMYWXDWGEXPRIERAGMDGSXRKIIVDSDIYWPNGLXIDLEEQKLYWADAKLSFIHRANLDGSFRQKVVEGSLXHPFALXLSGDXLYWXDWQXRSIHACNKRXGGKRKEILSALYSPMDIQVLSQERQPFFHXRCEEDNGGCSHLCLLSPSEPFYXCACPXGVQLQDNGRXCKAGAEEVLLLARRXDLRRISLDXPDFXDIVLQVDDIRHAIAIDYDPLEGYVYWXDDEVRAIRRAYLDGSGAQXLVNXEINDPDGIAVDWVARNLYWXDXGXDRIEVXRLNGXSRKILVSEDLDEPRAIALHPVMGLMYWXDWGENPKIECANLDGQERRVLVNASLGWPNGLALDLQEGKLYWGDAKXDKIEVINVDGXKRRXLLEDKLPHIFGFXLLGDFIYWXDWQRRSIERVHKVKASRDVIIDQLPDLMGLKAVNVAKVVGXNPCADRNGGCSHLCFFXPHAXRCGCPIGLELLSDMKXCIVPEAFLVFXSRAAIHRISLEXNNNDVAIPLXGVKEASALDFDVSNNHIYWXDVSLKXISRAFMNGSSVEHVVEFGLDYPEGMAVDWMGKNLYWADXGXNRIEVARLDGQFRQVLVWRDLDNPRSLALDPXKGYIYWXEWGGKPRIVRAFMDGXNCMXLVDKVGRANDLXIDYADQRLYWXDLDXNMIESSNMLGQERVVIADDLPHPFGLXQYSDYIYWXDWNLHSIERADKXSGRNRXLIQGHLDFVMDILVFHSSRQDGLNDCMHNNGQCGQLCLAIPGGHRCGCASHYXLDPSSRNCSPPXXFLLFSQKSAISRMIPDDQHSPDLILPLHGLRNVKAIDYDPLDKFIYWVDGRQNIKRAKDDGXQPFVLXSLSQGQNPDRQPHDLSIDIYSRXLFWXCEAXNXINVHRLSGEAMGVVLRGDRDKPRAIVVNAERGYLYFXNMQDRAAKIERAALDGXEREVLFXXGLIRPVALVVDNXLGKLFWVDADLKRIESCDLSGANRLXLEDANIVQPLGLXILGKHLYWIDRQQQMIERVEKXXGDKRXRIQGRVAHLXGIHAVEEVSLEEFSAHPCARDNGGCSHICIAKGDGXPRCSCPVHLVLLQNLLXCGEPPXCSPDQFACAXGEIDCIPGAWRCDGFPECDDQSDEEGCPVCSAAQFPCARGQCVDLRLRCDGEADCQDRSDEADCDAICLPNQFRCASGQCVLIKQQCDSFPDCIDGSDELMCEIXKPPSDDSPAHSSAIGPVIGIILSLFVMGGVYFVCQRVVCQRYAGANGPFPHEYVSGXPHVPLNFIAPGGSQHGPFXGIACGKSMMSSVSLMGGRGGVPLYDRNHVXGASSSSSSSXKAXLYPPILNPPPSPAXDPSLYNMDMFYSSNIPAXARPYRPYIIRGMAPPXXPCSXDVCDSDYSASRWKASKYYLDLNSDSDPYPPPPXPHSQYLSAEDSCPPSPAXERSYFHLFPPPPSPCXDSS

SEQ ID NO: 15200 - protein, 172 aa, Homo sapiens
  MOD_RES (1)..(1): Any amino acid
  MOD_RES (8)..(8): Selenocysteine
  MOD_RES (11)..(11): Selenocysteine
  MOD_RES (30)..(30): Selenocysteine
  MOD_RES (35)..(35): Selenocysteine
  MOD_RES (63)..(63): Selenocysteine
  MOD_RES (81)..(81): Selenocysteine
  MOD_RES (97)..(98): Selenocysteine
  MOD_RES (102)..(102): Selenocysteine
  MOD_RES (135)..(135): Selenocysteine
  MOD_RES (153)..(153): Selenocysteine
  MOD_RES (169)..(169): Selenocysteine
XSSSSSSXKAXLYPPGLGSGCMLSRMALEXHISPXPFGKLHVGLGCRQWHLWKILNPPPSPAXDPSLYNMDMFYSSNIPAXARPYRPYIIRGMAPPXXPCSXDVCDSDYSASRWKASKYYLDLNSDSDPYPPPPXPHSQYLSAEDSCPPSPAXERSYFHLFPPPPSPCXDSS

SEQ ID NO: 15201 - protein, 70 aa, Homo sapiens
  MOD_RES (8)..(8): Selenocysteine
  MOD_RES (27)..(27): Selenocysteine
  MOD_RES (31)..(31): Selenocysteine
  MOD_RES (51)..(51): Selenocysteine
  MOD_RES (53)..(53): Selenocysteine
  MOD_RES (55)..(55): Selenocysteine
MEGHVYWXDDEVWAIRRAYLDGSGAQXLINXKINDPDDIAVNWVARSLYWXHXGXEHIEPHVLDRLGREP

SEQ ID NO: 15202 - protein, 224 aa, Homo sapiens
  MOD_RES (8)..(8): Selenocysteine
  MOD_RES (27)..(27): Selenocysteine
  MOD_RES (31)..(31): Selenocysteine
  MOD_RES (51)..(51): Selenocysteine
  MOD_RES (53)..(53): Selenocysteine
  MOD_RES (55)..(55): Selenocysteine
  MOD_RES (61)..(61): Selenocysteine
  MOD_RES (66)..(66): Selenocysteine
  MOD_RES (91)..(91): Selenocysteine
  MOD_RES (142)..(142): Selenocysteine
  MOD_RES (153)..(153): Selenocysteine
  MOD_RES (157)..(157): Selenocysteine
  MOD_RES (170)..(170): Selenocysteine
  MOD_RES (179)..(179): Selenocysteine
  MOD_RES (222)..(222): Selenocysteine
MEGHVYWXDDEVWAIRRAYLDGSGAQXLINXKINDPDDIAVNWVARSLYWXHXGXEHIEVXCLNSXSHKILVSEDMDEPRAIALHPEMGLXYWIDWGENPEIKRANLDRQELRVLVNASLGWPNGLALDLQEGKLYWGDAKXDKIEAISVDEXKRQXLLKDKLPHIFRFXLLGDFIYWXAWQHHSIKRVHKVKANRDVIIDQLPDLMGLKAVNVDKVVGPGXAE

SEQ ID NO: 15203 - protein, 252 aa, Homo sapiens
  MOD_RES (8)..(8): Selenocysteine
  MOD_RES (27)..(27): Selenocysteine
  MOD_RES (31)..(31): Selenocysteine
  MOD_RES (51)..(51): Selenocysteine
  MOD_RES (53)..(53): Selenocysteine
  MOD_RES (55)..(55): Selenocysteine
  MOD_RES (61)..(61): Selenocysteine
  MOD_RES (66)..(66): Selenocysteine
  MOD_RES (91)..(91): Selenocysteine
  MOD_RES (142)..(142): Selenocysteine
  MOD_RES (153)..(153): Selenocysteine
  MOD_RES (157)..(157): Selenocysteine
  MOD_RES (170)..(170): Selenocysteine
  MOD_RES (179)..(179): Selenocysteine
  MOD_RES (220)..(220): Selenocysteine
  MOD_RES (232)..(232): Selenocysteine
  MOD_RES (239)..(239): Selenocysteine
MEGHVYWXDDEVWAIRRAYLDGSGAQXLINXKINDPDDIAVNWVARSLYWXHXGXEHIEVXCLNSXSHKILVSEDMDEPRAIALHPEMGLXYWIDWGENPEIKRANLDRQELRVLVNASLGWPNGLALDLQEGKLYWGDAKXDKIEAISVDEXKRQXLLKDKLPHIFRFXLLGDFIYWXAWQHHSIKRVHKVKANRDVIIDQLPDLMGLKAVNVDKVVGXNPHADRNGGAAXCASSRPXQPGLAAPSRAWNC

SEQ ID NO: 15204 - protein, 1568 aa, Homo sapiens
  MOD_RES (37)..(37): Selenocysteine
  MOD_RES (44)..(44): Selenocysteine
  MOD_RES (78)..(78): Selenocysteine
  MOD_RES (83)..(83): Selenocysteine
  MOD_RES (112)..(112): Selenocysteine
  MOD_RES (116)..(116): Selenocysteine
  MOD_RES (155)..(155): Selenocysteine
  MOD_RES (188)..(188): Selenocysteine
  MOD_RES (214)..(214): Selenocysteine
  MOD_RES (231)..(231): Selenocysteine
  MOD_RES (240)..(240): Selenocysteine
  MOD_RES (244)..(244): Selenocysteine
  MOD_RES (254)..(254): Selenocysteine
  MOD_RES (283)..(283): Selenocysteine
  MOD_RES (312)..(312): Selenocysteine
  MOD_RES (322)..(322): Selenocysteine
  MOD_RES (328)..(328): Selenocysteine
  MOD_RES (337)..(337): Selenocysteine
  MOD_RES (346)..(346): Selenocysteine
  MOD_RES (350)..(350): Selenocysteine
  MOD_RES (377)..(377): Selenocysteine
  MOD_RES (399)..(399): Selenocysteine
  MOD_RES (420)..(420): Selenocysteine
  MOD_RES (422)..(422): Selenocysteine
  MOD_RES (424)..(424): Selenocysteine
  MOD_RES (430)..(430): Selenocysteine
  MOD_RES (435)..(435): Selenocysteine
  MOD_RES (463)..(463): Selenocysteine
  MOD_RES (487)..(487): Selenocysteine
  MOD_RES (511)..(511): Selenocysteine
  MOD_RES (519)..(519): Selenocysteine
  MOD_RES (522)..(522): Selenocysteine
  MOD_RES (539)..(539): Selenocysteine
  MOD_RES (548)..(548): Selenocysteine
  MOD_RES (581)..(581): Selenocysteine
  MOD_RES (626)..(626): Selenocysteine
  MOD_RES (649)..(649): Selenocysteine
  MOD_RES (659)..(659): Selenocysteine
  MOD_RES (672)..(672): Selenocysteine
  MOD_RES (679)..(679): Selenocysteine
  MOD_RES (685)..(685): Selenocysteine
  MOD_RES (724)..(724): Selenocysteine
  MOD_RES (726)..(726): Selenocysteine
  MOD_RES (765)..(765): Selenocysteine
  MOD_RES (784)..(785): Selenocysteine
  MOD_RES (797)..(797): Selenocysteine
  MOD_RES (808)..(808): Selenocysteine
  MOD_RES (812)..(812): Selenocysteine
  MOD_RES (839)..(839): Selenocysteine
  MOD_RES (848)..(848): Selenocysteine
  MOD_RES (861)..(861): Selenocysteine
  MOD_RES (867)..(867): Selenocysteine
  MOD_RES (928)..(928): Selenocysteine
  MOD_RES (933)..(934): Selenocysteine
  MOD_RES (1001)..(1001): Selenocysteine
  MOD_RES (1031)..(1031): Selenocysteine
  MOD_RES (1035)..(1035): Selenocysteine
  MOD_RES (1041)..(1041): Selenocysteine
  MOD_RES (1074)..(1074): Selenocysteine
  MOD_RES (1091)..(1091): Selenocysteine
  MOD_RES (1151)..(1151): Selenocysteine
  MOD_RES (1173)..(1173): Selenocysteine
  MOD_RES (1179)..(1179): Selenocysteine
  MOD_RES (1225)..(1226): Selenocysteine
  MOD_RES (1318)..(1318): Selenocysteine
  MOD_RES (1326)..(1326): Selenocysteine
  MOD_RES (1328)..(1328): Selenocysteine
  MOD_RES (1338)..(1338): Selenocysteine
  MOD_RES (1344)..(1344): Selenocysteine
  MOD_RES (1363)..(1363): Selenocysteine
  MOD_RES (1365)..(1365): Selenocysteine
  MOD_RES (1421)..(1421): Selenocysteine
  MOD_RES (1431)..(1431): Selenocysteine
  MOD_RES (1434)..(1434): Selenocysteine
  MOD_RES (1448)..(1448): Selenocysteine
  MOD_RES (1454)..(1454): Selenocysteine
  MOD_RES (1466)..(1466): Selenocysteine
  MOD_RES (1484)..(1485): Selenocysteine
  MOD_RES (1489)..(1489): Selenocysteine
  MOD_RES (1503)..(1503): Selenocysteine
  MOD_RES (1507)..(1507): Selenocysteine
  MOD_RES (1512)..(1512): Selenocysteine
  MOD_RES (1527)..(1527): Selenocysteine
  MOD_RES (1548)..(1548): Selenocysteine
  MOD_RES (1565)..(1565): Selenocysteine
MGAVLRSLLACSFCVLLRAAPLLLYANRRDLRLVDAXNGKENAXIVVGGLEDAAAVDFVFSHGLIYWSDVSEEAIKRXEFNKXESVQNVVVSGLLSPDGLACDWLGEKLYWXDSEXNRIEVSNLDGSLRKVLFWQELDQPRAIALDPSSGFMYWXDWGEVPKIERAGMDGSSRFIIINSEIYWPNGLXLDYEEQKLYWADAKLNFIHKSNLDGXNRQAVVKGSLPHPFALXLFEDILYWXDWSXHSILACNKYXGEGLREIHSDIFSPMDIHAFSQQRQPNAXNPCGIDNGGCSHLCLMSPVKPFYQCACPXGVKLLENGKXCKDGAXELLLLARRXDLRRISLDXPDFXDIVLQLEDIRHAIAIDYDPVEGYIYWXDDEVRAIRRSFIDGSGSQFVVXAQIAHPDGIAVDWVARNLYWXDXGXDRIEVXRLNGXMRKILISEDLEEPRAIVLDPMVGYMYWXDWGEIPKIERAALDGSDRVVLVNXSLGWPNGLALDYDEGKIYWGDAKXDKIEVMNXDGXGRRVLVEDKIPHIFGFXLLGDYVYWXDWQRRSIERVHKRSAEREVIIDQLPDLMGLKAXNVHRVIGSNPCAEENGGCSHLCLYRPQGLRCACPIGFELISDMKXCIVPEAFLLFSRRADIRRISLEXNNNNVAIPLXGVKEASALDFDVXDNRIYWXDISLKXISRAFMNGSALEHVVEFGLDYPEGMAVDWLGKNLYWADXGXNRIEVSKLDGQHRQVLVWKDLDSPRALALDPAEGFMYWXEWGGKPKIDRAAMDGSERXXLVPNVGRANGLXIDYAKRRLYWXDLDXNLIESSNMLGLNREVIADDLPHPFGLXQYQDYIYWXDWSRRSIERANKXSGQNRXIIQGHLDYVMDILVFHSSRQSGWNECASSNGHCSHLCLAVPVGGFVCGCPAHYSLNADNRXCSAPXXFLLFSQKSAINRMVIDEQQSPDIILPIHSLRNVRAIDYDPLDKQLYWIDSRQNMIRKAQEDGSQGFXVVVSSVPSQNLEIQPYDLSIDIYSRYIYWXCEAXNVINVXRLDGRSVGVVLKGEQDRPRAVVVNPEKGYMYFXNLQERSPKIERAALDGXEREVLFFSGLSKPIALALDSRLGKLFWADSDLRRIESSDLSGANRIVLEDSNILQPVGLXVFENWLYWIDKQQQMIEKIDMXGREGRXKVQARIAQLSDIHAVKELNLQEYRQHPCAQDNGGCSHICLVKGDGXXRCSCPMHLVLLQDELSCGESQFQCASGQCIDGALRCNGDANCQDKSDEKNCEVLCLIDQFRCANGQCIGKHKKCDHNVDCSDKSDELDCYPXEEPAPQAXNXVGSVIGVIVXIFVSGXVYFICQRMLCPRMKGDGEXMXNDYVVHGPASVPLGYVPHPSSLSGSLPGMSRGKSMISSLSIMGGSSGPPYDRAHVXGASSSSSSSXKGXYFPAILNPPPSPAXERSHYXMEFGYSSNSPSXHRSYSYRPYSYRHFAPPXXPCSXDVCDSDYAPSRRMXSVAXAKGYXSDLNYDSEPVPPPPXPRSQYLSAEENYESCPPSPYXERSYSHHLYPPPPSPCXDSS

SEQ ID NO: 15205 - protein, 1613 aa, Homo sapiens
  MOD_RES (37)..(37): Selenocysteine
  MOD_RES (44)..(44): Selenocysteine
  MOD_RES (78)..(78): Selenocysteine
  MOD_RES (83)..(83): Selenocysteine
  MOD_RES (112)..(112): Selenocysteine
  MOD_RES (116)..(116): Selenocysteine
  MOD_RES (155)..(155): Selenocysteine
  MOD_RES (188)..(188): Selenocysteine
  MOD_RES (214)..(214): Selenocysteine
  MOD_RES (231)..(231): Selenocysteine
  MOD_RES (240)..(240): Selenocysteine
  MOD_RES (244)..(244): Selenocysteine
  MOD_RES (254)..(254): Selenocysteine
  MOD_RES (283)..(283): Selenocysteine
  MOD_RES (312)..(312): Selenocysteine
  MOD_RES (322)..(322): Selenocysteine
  MOD_RES (328)..(328): Selenocysteine
  MOD_RES (337)..(337): Selenocysteine
  MOD_RES (346)..(346): Selenocysteine
  MOD_RES (350)..(350): Selenocysteine
  MOD_RES (377)..(377): Selenocysteine
  MOD_RES (399)..(399): Selenocysteine
  MOD_RES (420)..(420): Selenocysteine
  MOD_RES (422)..(422): Selenocysteine
  MOD_RES (424)..(424): Selenocysteine
  MOD_RES (430)..(430): Selenocysteine
  MOD_RES (435)..(435): Selenocysteine
  MOD_RES (463)..(463): Selenocysteine
  MOD_RES (487)..(487): Selenocysteine
  MOD_RES (511)..(511): Selenocysteine
  MOD_RES (519)..(519): Selenocysteine
  MOD_RES (522)..(522): Selenocysteine
  MOD_RES (539)..(539): Selenocysteine
  MOD_RES (548)..(548): Selenocysteine
  MOD_RES (581)..(581): Selenocysteine
  MOD_RES (626)..(626): Selenocysteine
  MOD_RES (649)..(649): Selenocysteine
  MOD_RES (659)..(659): Selenocysteine
  MOD_RES (672)..(672): Selenocysteine
  MOD_RES (679)..(679): Selenocysteine
  MOD_RES (685)..(685): Selenocysteine
  MOD_RES (724)..(724): Selenocysteine
  MOD_RES (726)..(726): Selenocysteine
  MOD_RES (765)..(765): Selenocysteine
  MOD_RES (784)..(785): Selenocysteine
  MOD_RES (797)..(797): Selenocysteine
  MOD_RES (808)..(808): Selenocysteine
  MOD_RES (812)..(812): Selenocysteine
  MOD_RES (839)..(839): Selenocysteine
  MOD_RES (848)..(848): Selenocysteine
  MOD_RES (861)..(861): Selenocysteine
  MOD_RES (867)..(867): Selenocysteine
  MOD_RES (928)..(928): Selenocysteine
  MOD_RES (933)..(934): Selenocysteine
  MOD_RES (1001)..(1001): Selenocysteine
  MOD_RES (1031)..(1031): Selenocysteine
  MOD_RES (1035)..(1035): Selenocysteine
  MOD_RES (1041)..(1041): Selenocysteine
  MOD_RES (1074)..(1074): Selenocysteine
  MOD_RES (1091)..(1091): Selenocysteine
  MOD_RES (1151)..(1151): Selenocysteine
  MOD_RES (1173)..(1173): Selenocysteine
  MOD_RES (1179)..(1179): Selenocysteine
  MOD_RES (1225)..(1226): Selenocysteine
  MOD_RES (1248)..(1248): Selenocysteine
  MOD_RES (1255)..(1255): Selenocysteine
  MOD_RES (1258)..(1258): Selenocysteine
  MOD_RES (1274)..(1274): Selenocysteine
  MOD_RES (1363)..(1363): Selenocysteine
  MOD_RES (1371)..(1371): Selenocysteine
  MOD_RES (1373)..(1373): Selenocysteine
  MOD_RES (1383)..(1383): Selenocysteine
  MOD_RES (1389)..(1389): Selenocysteine
  MOD_RES (1408)..(1408): Selenocysteine
  MOD_RES (1410)..(1410): Selenocysteine
  MOD_RES (1466)..(1466): Selenocysteine
  MOD_RES (1476)..(1476): Selenocysteine
  MOD_RES (1479)..(1479): Selenocysteine
  MOD_RES (1493)..(1493): Selenocysteine
  MOD_RES (1499)..(1499): Selenocysteine
  MOD_RES (1511)..(1511): Selenocysteine
  MOD_RES (1529)..(1530): Selenocysteine
  MOD_RES (1534)..(1534): Selenocysteine
  MOD_RES (1548)..(1548): Selenocysteine
  MOD_RES (1552)..(1552): Selenocysteine
  MOD_RES (1557)..(1557): Selenocysteine
  MOD_RES (1572)..(1572): Selenocysteine
  MOD_RES (1593)..(1593): Selenocysteine
  MOD_RES (1610)..(1610): Selenocysteine
MGAVLRSLLACSFCVLLRAAPLLLYANRRDLRLVDAXNGKENAXIVVGGLEDAAAVDFVFSHGLIYWSDVSEEAIKRXEFNKXESVQNVVVSGLLSPDGLACDWLGEKLYWXDSEXNRIEVSNLDGSLRKVLFWQELDQPRAIALDPSSGFMYWXDWGEVPKIERAGMDGSSRFIIINSEIYWPNGLXLDYEEQKLYWADAKLNFIHKSNLDGXNRQAVVKGSLPHPFALXLFEDILYWXDWSXHSILACNKYXGEGLREIHSDIFSPMDIHAFSQQRQPNAXNPCGIDNGGCSHLCLMSPVKPFYQCACPXGVKLLENGKXCKDGAXELLLLARRXDLRRISLDXPDFXDIVLQLEDIRHAIAIDYDPVEGYIYWXDDEVRAIRRSFIDGSGSQFVVXAQIAHPDGIAVDWVARNLYWXDXGXDRIEVXRLNGXMRKILISEDLEEPRAIVLDPMVGYMYWXDWGEIPKIERAALDGSDRVVLVNXSLGWPNGLALDYDEGKIYWGDAKXDKIEVMNXDGXGRRVLVEDKIPHIFGFXLLGDYVYWXDWQRRSIERVHKRSAEREVIIDQLPDLMGLKAXNVHRVIGSNPCAEENGGCSHLCLYRPQGLRCACPIGFELISDMKXCIVPEAFLLFSRRADIRRISLEXNNNNVAIPLXGVKEASALDFDVXDNRIYWXDISLKXISRAFMNGSALEHVVEFGLDYPEGMAVDWLGKNLYWADXGXNRIEVSKLDGQHRQVLVWKDLDSPRALALDPAEGFMYWXEWGGKPKIDRAAMDGSERXXLVPNVGRANGLXIDYAKRRLYWXDLDXNLIESSNMLGLNREVIADDLPHPFGLXQYQDYIYWXDWSRRSIERANKXSGQNRXIIQGHLDYVMDILVFHSSRQSGWNECASSNGHCSHLCLAVPVGGFVCGCPAHYSLNADNRXCSAPXXFLLFSQKSAINRMVIDEQQSPDIILPIHSLRNVRAIDYDPLDKQLYWIDSRQNMIRKAQEDGSQGFXVVVSSVPSQNLEIQPYDLSIDIYSRYIYWXCEAXNVINVXRLDGRSVGVVLKGEQDRPRAVVVNPEKGYMYFXNLQERSPKIERAALDGXEREVLFFSGLSKPIALALDSRLGKLFWADSDLRRIESSDLSGANRIVLEDSNILQPVGLXVFENWLYWIDKQQQMIEKIDMXGREGRXKVQARIAQLSDIHAVKELNLQEYRQHPCAQDNGGCSHICLVKGDGXXRCSCPMHLVLLQDELSCGEPPXCSPQQFXCFXGEIDCIPVAWRCDGFXECEDHSDELNCPVCSESQFQCASGQCIDGALRCNGDANCQDKSDEKNCEVLCLIDQFRCANGQCIGKHKKCDHNVDCSDKSDELDCYPXEEPAPQAXNXVGSVIGVIVXIFVSGXVYFICQRMLCPRMKGDGEXMXNDYVVHGPASVPLGYVPHPSSLSGSLPGMSRGKSMISSLSIMGGSSGPPYDRAHVXGASSSSSSSXKGXYFPAILNPPPSPAXERSHYXMEFGYSSNSPSXHRSYSYRPYSYRHFAPPXXPCSXDVCDSDYAPSRRMXSVAXAKGYXSDLNYDSEPVPPPPXPRSQYLSAEENYESCPPSPYXERSYSHHLYPPPPSPCXDSS

SEQ ID NO: 15206 - protein, 75 aa, Homo sapiens
  MOD_RES (4)..(4): Selenocysteine
  MOD_RES (37)..(37): Selenocysteine
  MOD_RES (63)..(63): Selenocysteine
MYWXDWGEVPKIERAGMDGSSRFIIINSEIYWPNGLXLDYEEQKLYWADAKLNFIHKSNLDGXNRQAVVKGSLPH

SEQ ID NO: 15207 - protein, 69 aa, Homo sapiens
  MOD_RES (46)..(46): Selenocysteine
  MOD_RES (54)..(54): Selenocysteine
NCEVLCLIDQFRCANGQCIGKHKKCDHNVDCSDKSDELDCYFEPSXIPSHRAIXLHYGIWIFFKQSFHS

SEQ ID NO: 15208 - protein, 1478 aa, Homo sapiens
  MOD_RES (1)..(1): Any amino acid
  MOD_RES (20)..(20): Selenocysteine
  MOD_RES (53)..(53): Selenocysteine
  MOD_RES (79)..(79): Selenocysteine
  MOD_RES (96)..(96): Selenocysteine
  MOD_RES (105)..(105): Selenocysteine
  MOD_RES (109)..(109): Selenocysteine
  MOD_RES (119)..(119): Selenocysteine
  MOD_RES (148)..(148): Selenocysteine
  MOD_RES (177)..(177): Selenocysteine
  MOD_RES (187)..(187): Selenocysteine
  MOD_RES (193)..(193): Selenocysteine
  MOD_RES (202)..(202): Selenocysteine
  MOD_RES (211)..(211): Selenocysteine
  MOD_RES (215)..(215): Selenocysteine
  MOD_RES (242)..(242): Selenocysteine
  MOD_RES (264)..(264): Selenocysteine
  MOD_RES (285)..(285): Selenocysteine
  MOD_RES (287)..(287): Selenocysteine
  MOD_RES (289)..(289): Selenocysteine
  MOD_RES (295)..(295): Selenocysteine
  MOD_RES (300)..(300): Selenocysteine
  MOD_RES (328)..(328): Selenocysteine
  MOD_RES (352)..(352): Selenocysteine
  MOD_RES (376)..(376): Selenocysteine
  MOD_RES (384)..(384): Selenocysteine
  MOD_RES (387)..(387): Selenocysteine
  MOD_RES (404)..(404): Selenocysteine
  MOD_RES (413)..(413): Selenocysteine
  MOD_RES (446)..(446): Selenocysteine
  MOD_RES (491)..(491): Selenocysteine
  MOD_RES (514)..(514): Selenocysteine
  MOD_RES (524)..(524): Selenocysteine
  MOD_RES (537)..(537): Selenocysteine
  MOD_RES (544)..(544): Selenocysteine
  MOD_RES (550)..(550): Selenocysteine
  MOD_RES (589)..(589): Selenocysteine
  MOD_RES (591)..(591): Selenocysteine
  MOD_RES (630)..(630): Selenocysteine
  MOD_RES (649)..(650): Selenocysteine
  MOD_RES (662)..(662): Selenocysteine
  MOD_RES (673)..(673): Selenocysteine
  MOD_RES (677)..(677): Selenocysteine
  MOD_RES (704)..(704): Selenocysteine
  MOD_RES (713)..(713): Selenocysteine
  MOD_RES (726)..(726): Selenocysteine
  MOD_RES (732)..(732): Selenocysteine
  MOD_RES (793)..(793): Selenocysteine
  MOD_RES (798)..(799): Selenocysteine
  MOD_RES (866)..(866): Selenocysteine
  MOD_RES (896)..(896): Selenocysteine
  MOD_RES (900)..(900): Selenocysteine
  MOD_RES (906)..(906): Selenocysteine
  MOD_RES (939)..(939): Selenocysteine
  MOD_RES (956)..(956): Selenocysteine
  MOD_RES (1016)..(1016): Selenocysteine
  MOD_RES (1038)..(1038): Selenocysteine
  MOD_RES (1044)..(1044): Selenocysteine
  MOD_RES (1090)..(1091): Selenocysteine
  MOD_RES (1113)..(1113): Selenocysteine
  MOD_RES (1120)..(1120): Selenocysteine
  MOD_RES (1123)..(1123): Selenocysteine
  MOD_RES (1139)..(1139): Selenocysteine
  MOD_RES (1228)..(1228): Selenocysteine
  MOD_RES (1236)..(1236): Selenocysteine
  MOD_RES (1238)..(1238): Selenocysteine
  MOD_RES (1248)..(1248): Selenocysteine
  MOD_RES (1254)..(1254): Selenocysteine
  MOD_RES (1273)..(1273): Selenocysteine
  MOD_RES (1275)..(1275): Selenocysteine
  MOD_RES (1331)..(1331): Selenocysteine
  MOD_RES (1341)..(1341): Selenocysteine
  MOD_RES (1344)..(1344): Selenocysteine
  MOD_RES (1358)..(1358): Selenocysteine
  MOD_RES (1364)..(1364): Selenocysteine
  MOD_RES (1376)..(1376): Selenocysteine
  MOD_RES (1394)..(1395): Selenocysteine
  MOD_RES (1399)..(1399): Selenocysteine
  MOD_RES (1413)..(1413): Selenocysteine
  MOD_RES (1417)..(1417): Selenocysteine
  MOD_RES (1422)..(1422): Selenocysteine
  MOD_RES (1437)..(1437): Selenocysteine
  MOD_RES (1458)..(1458): Selenocysteine
  MOD_RES (1475)..(1475): Selenocysteine
XLDQPRAIALDPSSGFMYWXDWGEVPKIERAGMDGSSRFIIINSEIYWPNGLXLDYEEQKLYWADAKLNFIHKSNLDGXNRQAVVKGSLPHPFALXLFEDILYWXDWSXHSILACNKYXGEGLREIHSDIFSPMDIHAFSQQRQPNAXNPCGIDNGGCSHLCLMSPVKPFYQCACPXGVKLLENGKXCKDGAXELLLLARRXDLRRISLDXPDFXDIVLQLEDIRHAIAIDYDPVEGYIYWXDDEVRAIRRSFIDGSGSQFVVXAQIAHPDGIAVDWVARNLYWXDXGXDRIEVXRLNGXMRKILISEDLEEPRAIVLDPMVGYMYWXDWGEIPKIERAALDGSDRVVLVNXSLGWPNGLALDYDEGKIYWGDAKXDKIEVMNXDGXGRRVLVEDKIPHIFGFXLLGDYVYWXDWQRRSIERVHKRSAEREVIIDQLPDLMGLKAXNVHRVIGSNPCAEENGGCSHLCLYRPQGLRCACPIGFELISDMKXCIVPEAFLLFSRRADIRRISLEXNNNNVAIPLXGVKEASALDFDVXDNRIYWXDISLKXISRAFMNGSALEHVVEFGLDYPEGMAVDWLGKNLYWADXGXNRIEVSKLDGQHRQVLVWKDLDSPRALALDPAEGFMYWXEWGGKPKIDRAAMDGSERXXLVPNVGRANGLXIDYAKRRLYWXDLDXNLIESSNMLGLNREVIADDLPHPFGLXQYQDYIYWXDWSRRSIERANKXSGQNRXIIQGHLDYVMDILVFHSSRQSGWNECASSNGHCSHLCLAVPVGGFVCGCPAHYSLNADNRXCSAPXXFLLFSQKSAINRMVIDEQQSPDIILPIHSLRNVRAIDYDPLDKQLYWIDSRQNMIRKAQEDGSQGFXVVVSSVPSQNLEIQPYDLSIDIYSRYIYWXCEAXNVINVXRLDGRSVGVVLKGEQDRPRAVVVNPEKGYMYFXNLQERSPKIERAALDGXEREVLFFSGLSKPIALALDSRLGKLFWADSDLRRIESSDLSGANRIVLEDSNILQPVGLXVFENWLYWIDKQQQMIEKIDMXGREGRXKVQARIAQLSDIHAVKELNLQEYRQHPCAQDNGGCSHICLVKGDGXXRCSCPMHLVLLQDELSCGEPPXCSPQQFXCFXGEIDCIPVAWRCDGFXECEDHSDELNCPVCSESQFQCASGQCIDGALRCNGDANCQDKSDEKNCEVLCLIDQFRCANGQCIGKHKKCDHNVDCSDKSDELDCYPXEEPAPQAXNXVGSVIGVIVXIFVSGXVYFICQRMLCPRMKGDGEXMXNDYVVHGPASVPLGYVPHPSSLSGSLPGMSRGKSMISSLSIMGGSSGPPYDRAHVXGASSSSSSSXKGXYFPAILNPPPSPAXERSHYXMEFGYSSNSPSXHRSYSYRPYSYRHFAPPXXPCSXDVCDSDYAPSRRMXSVAXAKGYXSDLNYDSEPVPPPPXPRSQYLSAEENYESCPPSPYXERSYSHHLYPPPPSPCXDSS

SEQ ID NO: 15209 - protein, 392 aa, Homo sapiens
  MOD_RES (85)..(85): Selenocysteine
  MOD_RES (92)..(92): Selenocysteine
  MOD_RES (121)..(121): Selenocysteine
  MOD_RES (123)..(123): Selenocysteine
  MOD_RES (137)..(137): Selenocysteine
  MOD_RES (165)..(165): Selenocysteine
  MOD_RES (253)..(253): Selenocysteine
  MOD_RES (261)..(261): Selenocysteine
  MOD_RES (298)..(298): Selenocysteine
  MOD_RES (310)..(310): Selenocysteine
  MOD_RES (389)..(389): Selenocysteine
MGLPEPGPLRLLALLLLLLLLLLLQLQHLAAAAADPLLGGQGPAKDCEKDQFQCRNERCIPSVWRCDEDDDCLDHSDEDDCPKKXCADSDFXCDNGHCIHERWKCDGEEECPDGSDESEAXCXKQVCPAEKLSCGPXSHKCVPASWRCDGEKDCEGGADEAGCAXLCAPHEFQCGNRSCLAAVFVCDGDDDCGDGSDERGCADPACGPREFRCGGDGGGACIPERWVCDRQFDCEDRSDEAAELCGRPGPGAXSAPAACAXASQFACRSGECVHLGWRCDGDRDCKDKSDEADCPLGXCRGDEFQCGDGXCVLAIKHCNQEQDCPDGSDEAGCLQESPCEGPRRFQCKSGKRVDGGKVCDVQRDCRDWSDELLKVWAERVSAQQWRLLXHLH

SEQ ID NO: 15210 - protein, 904 aa, Homo sapiens
  MOD_RES (85)..(85): Selenocysteine
  MOD_RES (92)..(92): Selenocysteine
  MOD_RES (121)..(121): Selenocysteine
  MOD_RES (123)..(123): Selenocysteine
  MOD_RES (137)..(137): Selenocysteine
  MOD_RES (165)..(165): Selenocysteine
  MOD_RES (253)..(253): Selenocysteine
  MOD_RES (261)..(261): Selenocysteine
  MOD_RES (298)..(298): Selenocysteine
  MOD_RES (310)..(310): Selenocysteine
  MOD_RES (352)..(352): Selenocysteine
  MOD_RES (361)..(361): Selenocysteine
  MOD_RES (373)..(373): Selenocysteine
  MOD_RES (411)..(411): Selenocysteine
  MOD_RES (427)..(427): Selenocysteine
  MOD_RES (461)..(461): Selenocysteine
  MOD_RES (514)..(514): Selenocysteine
  MOD_RES (520)..(520): Selenocysteine
  MOD_RES (525)..(525): Selenocysteine
  MOD_RES (533)..(533): Selenocysteine
  MOD_RES (577)..(577): Selenocysteine
  MOD_RES (590)..(590): Selenocysteine
  MOD_RES (620)..(620): Selenocysteine
  MOD_RES (625)..(625): Selenocysteine
  MOD_RES (644)..(644): Selenocysteine
  MOD_RES (718)..(718): Selenocysteine
  MOD_RES (724)..(724): Selenocysteine
  MOD_RES (741)..(741): Selenocysteine
  MOD_RES (743)..(745): Selenocysteine
  MOD_RES (749)..(749): Selenocysteine
  MOD_RES (751)..(751): Selenocysteine
  MOD_RES (753)..(753): Selenocysteine
  MOD_RES (757)..(758): Selenocysteine
  MOD_RES (763)..(764): Selenocysteine
  MOD_RES (769)..(769): Selenocysteine
  MOD_RES (775)..(775): Selenocysteine
  MOD_RES (777)..(777): Selenocysteine
  MOD_RES (781)..(781): Selenocysteine
  MOD_RES (800)..(800): Selenocysteine
  MOD_RES (805)..(805): Selenocysteine
  MOD_RES (822)..(822): Selenocysteine
  MOD_RES (824)..(824): Selenocysteine
  MOD_RES (856)..(856): Selenocysteine
  MOD_RES (869)..(870): Selenocysteine
  MOD_RES (883)..(883): Selenocysteine
MGLPEPGPLRLLALLLLLLLLLLLQLQHLAAAAADPLLGGQGPAKDCEKDQFQCRNERCIPSVWRCDEDDDCLDHSDEDDCPKKXCADSDFXCDNGHCIHERWKCDGEEECPDGSDESEAXCXKQVCPAEKLSCGPXSHKCVPASWRCDGEKDCEGGADEAGCAXLCAPHEFQCGNRSCLAAVFVCDGDDDCGDGSDERGCADPACGPREFRCGGDGGGACIPERWVCDRQFDCEDRSDEAAELCGRPGPGAXSAPAACAXASQFACRSGECVHLGWRCDGDRDCKDKSDEADCPLGXCRGDEFQCGDGXCVLAIKHCNQEQDCPDGSDEAGCLQGLNECLHNNGGCSHICXDLKIGFECXCPAGFQLLDQKXCGDIDECKDPDACSQICVNYKGYFKCECYPGYEMDLLXKNCKAAAGKSPSLIFXNRHEVRRIDLVKRNYSRLIPMLKNVVALDVEVAXNRIYWCDLSYRKIYSAYMDKASDPKEQEVLIDEQLHSPEGLAVDWVHKHIYWXDSGNKXISVAXVDGGRRRXLFSRNLSEPRAIAVDPLRGFMYWSDWGDQAKIEKSGLNGVDRQXLVSDNIEWPNGIXLDLLSQRLYWVDSKLHQLSSIDFSGGNRKXLISSXDFLSHPFGIAVFEDKVFWXDLENEAIFSANRLNGLEISILAENLNNPHDIVIFHELKQPRAPDACELSVQPNGGCEYLCLPAPQISSHSPKYXCACPDXMWLGPDMKRCYRAPQSXSXXXLASXMXRXVPAXXRAPGXXVHRSXYQNHSXEXPSLXAAVPSSVSVPRAPSISPSXLSPAXSNHSQHYANEDSKMGSXVXAAVIGIIVPIVVIALLCMSGYLIWRNWKRKNXKSMNFDNPVYRKXXEEEDEDELHIGRXAQIGHVYPARVALSLEDDGLP

SEQ ID NO: 15211 - protein, 963 aa, Homo sapiens
  MOD_RES (85)..(85): Selenocysteine
  MOD_RES (92)..(92): Selenocysteine
  MOD_RES (121)..(121): Selenocysteine
  MOD_RES (123)..(123): Selenocysteine
  MOD_RES (137)..(137): Selenocysteine
  MOD_RES (165)..(165): Selenocysteine
  MOD_RES (253)..(253): Selenocysteine
  MOD_RES (261)..(261): Selenocysteine
  MOD_RES (298)..(298): Selenocysteine
  MOD_RES (310)..(310): Selenocysteine
  MOD_RES (352)..(352): Selenocysteine
  MOD_RES (361)..(361): Selenocysteine
  MOD_RES (373)..(373): Selenocysteine
  MOD_RES (411)..(411): Selenocysteine
  MOD_RES (427)..(427): Selenocysteine
  MOD_RES (461)..(461): Selenocysteine
  MOD_RES (514)..(514): Selenocysteine
  MOD_RES (520)..(520): Selenocysteine
  MOD_RES (525)..(525): Selenocysteine
  MOD_RES (533)..(533): Selenocysteine
  MOD_RES (577)..(577): Selenocysteine
  MOD_RES (590)..(590): Selenocysteine
  MOD_RES (620)..(620): Selenocysteine
  MOD_RES (625)..(625): Selenocysteine
  MOD_RES (644)..(644): Selenocysteine
  MOD_RES (718)..(718): Selenocysteine
  MOD_RES (724)..(724): Selenocysteine
  MOD_RES (741)..(741): Selenocysteine
  MOD_RES (743)..(745): Selenocysteine
  MOD_RES (749)..(749): Selenocysteine
  MOD_RES (751)..(751): Selenocysteine
  MOD_RES (753)..(753): Selenocysteine
  MOD_RES (757)..(758): Selenocysteine
  MOD_RES (763)..(764): Selenocysteine
  MOD_RES (769)..(769): Selenocysteine
  MOD_RES (775)..(775): Selenocysteine
  MOD_RES (777)..(777): Selenocysteine
  MOD_RES (781)..(781): Selenocysteine
  MOD_RES (800)..(800): Selenocysteine
  MOD_RES (805)..(805): Selenocysteine
  MOD_RES (822)..(822): Selenocysteine
  MOD_RES (824)..(824): Selenocysteine
  MOD_RES (856)..(856): Selenocysteine
  MOD_RES (869)..(870): Selenocysteine
  MOD_RES (883)..(883): Selenocysteine
  MOD_RES (910)..(910): Selenocysteine
MGLPEPGPLRLLALLLLLLLLLLLQLQHLAAAAADPLLGGQGPAKDCEKDQFQCRNERCIPSVWRCDEDDDCLDHSDEDDCPKKXCADSDFXCDNGHCIHERWKCDGEEECPDGSDESEAXCXKQVCPAEKLSCGPXSHKCVPASWRCDGEKDCEGGADEAGCAXLCAPHEFQCGNRSCLAAVFVCDGDDDCGDGSDERGCADPACGPREFRCGGDGGGACIPERWVCDRQFDCEDRSDEAAELCGRPGPGAXSAPAACAXASQFACRSGECVHLGWRCDGDRDCKDKSDEADCPLGXCRGDEFQCGDGXCVLAIKHCNQEQDCPDGSDEAGCLQGLNECLHNNGGCSHICXDLKIGFECXCPAGFQLLDQKXCGDIDECKDPDACSQICVNYKGYFKCECYPGYEMDLLXKNCKAAAGKSPSLIFXNRHEVRRIDLVKRNYSRLIPMLKNVVALDVEVAXNRIYWCDLSYRKIYSAYMDKASDPKEQEVLIDEQLHSPEGLAVDWVHKHIYWXDSGNKXISVAXVDGGRRRXLFSRNLSEPRAIAVDPLRGFMYWSDWGDQAKIEKSGLNGVDRQXLVSDNIEWPNGIXLDLLSQRLYWVDSKLHQLSSIDFSGGNRKXLISSXDFLSHPFGIAVFEDKVFWXDLENEAIFSANRLNGLEISILAENLNNPHDIVIFHELKQPRAPDACELSVQPNGGCEYLCLPAPQISSHSPKYXCACPDXMWLGPDMKRCYRAPQSXSXXXLASXMXRXVPAXXRAPGXXVHRSXYQNHSXEXPSLXAAVPSSVSVPRAPSISPSXLSPAXSNHSQHYANEDSKMGSXVXAAVIGIIVPIVVIALLCMSGYLIWRNWKRKNXKSMNFDNPVYRKXXEEEDEDELHIGRXAQIGHVYPAAISSFDRPLWAEPCLGEXREPEDPAPALKELFVLPGEPRSQLHQLPKNPLSELPVVKSKRVALSLEDDGLP

SEQ ID NO: 15212 - protein, 700 aa, Homo sapiens
  MOD_RES (85)..(85): Selenocysteine
  MOD_RES (92)..(92): Selenocysteine
  MOD_RES (121)..(121): Selenocysteine
  MOD_RES (123)..(123): Selenocysteine
  MOD_RES (137)..(137): Selenocysteine
  MOD_RES (165)..(165): Selenocysteine
  MOD_RES (169)..(169): Selenocysteine
  MOD_RES (181)..(181): Selenocysteine
  MOD_RES (223)..(223): Selenocysteine
  MOD_RES (232)..(232): Selenocysteine
  MOD_RES (244)..(244): Selenocysteine
  MOD_RES (282)..(282): Selenocysteine
  MOD_RES (298)..(298): Selenocysteine
  MOD_RES (332)..(332): Selenocysteine
  MOD_RES (385)..(385): Selenocysteine
  MOD_RES (391)..(391): Selenocysteine
  MOD_RES (396)..(396): Selenocysteine
  MOD_RES (404)..(404): Selenocysteine
  MOD_RES (448)..(448): Selenocysteine
  MOD_RES (461)..(461): Selenocysteine
  MOD_RES (491)..(491): Selenocysteine
  MOD_RES (496)..(496): Selenocysteine
  MOD_RES (515)..(515): Selenocysteine
  MOD_RES (589)..(589): Selenocysteine
  MOD_RES (595)..(595): Selenocysteine
  MOD_RES (618)..(618): Selenocysteine
  MOD_RES (620)..(620): Selenocysteine
  MOD_RES (652)..(652): Selenocysteine
  MOD_RES (665)..(666): Selenocysteine
  MOD_RES (679)..(679): Selenocysteine
MGLPEPGPLRLLALLLLLLLLLLLQLQHLAAAAADPLLGGQGPAKDCEKDQFQCRNERCIPSVWRCDEDDDCLDHSDEDDCPKKXCADSDFXCDNGHCIHERWKCDGEEECPDGSDESEAXCXKQVCPAEKLSCGPXSHKCVPASWRCDGEKDCEGGADEAGCAXSLGXCRGDEFQCGDGXCVLAIKHCNQEQDCPDGSDEAGCLQGLNECLHNNGGCSHICXDLKIGFECXCPAGFQLLDQKXCGDIDECKDPDACSQICVNYKGYFKCECYPGYEMDLLXKNCKAAAGKSPSLIFXNRHEVRRIDLVKRNYSRLIPMLKNVVALDVEVAXNRIYWCDLSYRKIYSAYMDKASDPKEQEVLIDEQLHSPEGLAVDWVHKHIYWXDSGNKXISVAXVDGGRRRXLFSRNLSEPRAIAVDPLRGFMYWSDWGDQAKIEKSGLNGVDRQXLVSDNIEWPNGIXLDLLSQRLYWVDSKLHQLSSIDFSGGNRKXLISSXDFLSHPFGIAVFEDKVFWXDLENEAIFSANRLNGLEISILAENLNNPHDIVIFHELKQPRAPDACELSVQPNGGCEYLCLPAPQISSHSPKYXCACPDXMWLGPDMKRCYRDANEDSKMGSXVXAAVIGIIVPIVVIALLCMSGYLIWRNWKRKNXKSMNFDNPVYRKXXEEEDEDELHIGRXAQIGHVYPARVALSLEDDGLP

SEQ ID NO: 15213 - protein, 793 aa, Homo sapiens
  MOD_RES (85)..(85): Selenocysteine
  MOD_RES (92)..(92): Selenocysteine
  MOD_RES (121)..(121): Selenocysteine
  MOD_RES (123)..(123): Selenocysteine
  MOD_RES (137)..(137): Selenocysteine
  MOD_RES (165)..(165): Selenocysteine
  MOD_RES (182)..(182): Selenocysteine
  MOD_RES (191)..(191): Selenocysteine
  MOD_RES (203)..(203): Selenocysteine
  MOD_RES (241)..(241): Selenocysteine
  MOD_RES (257)..(257): Selenocysteine
  MOD_RES (291)..(291): Selenocysteine
  MOD_RES (344)..(344): Selenocysteine
  MOD_RES (350)..(350): Selenocysteine
  MOD_RES (355)..(355): Selenocysteine
  MOD_RES (363)..(363): Selenocysteine
  MOD_RES (407)..(407): Selenocysteine
  MOD_RES (420)..(420): Selenocysteine
  MOD_RES (450)..(450): Selenocysteine
  MOD_RES (455)..(455): Selenocysteine
  MOD_RES (474)..(474): Selenocysteine
  MOD_RES (548)..(548): Selenocysteine
  MOD_RES (554)..(554): Selenocysteine
  MOD_RES (571)..(571): Selenocysteine
  MOD_RES (573)..(575): Selenocysteine
  MOD_RES (579)..(579): Selenocysteine
  MOD_RES (581)..(581): Selenocysteine
  MOD_RES (583)..(583): Selenocysteine
  MOD_RES (587)..(588): Selenocysteine
  MOD_RES (593)..(594): Selenocysteine
  MOD_RES (599)..(599): Selenocysteine
  MOD_RES (605)..(605): Selenocysteine
  MOD_RES (607)..(607): Selenocysteine
  MOD_RES (611)..(611): Selenocysteine
  MOD_RES (630)..(630): Selenocysteine
  MOD_RES (635)..(635): Selenocysteine
  MOD_RES (652)..(652): Selenocysteine
  MOD_RES (654)..(654): Selenocysteine
  MOD_RES (686)..(686): Selenocysteine
  MOD_RES (699)..(700): Selenocysteine
  MOD_RES (713)..(713): Selenocysteine
  MOD_RES (740)..(740): Selenocysteine
MGLPEPGPLRLLALLLLLLLLLLLQLQHLAAAAADPLLGGQGPAKDCEKDQFQCRNERCIPSVWRCDEDDDCLDHSDEDDCPKKXCADSDFXCDNGHCIHERWKCDGEEECPDGSDESEAXCXKQVCPAEKLSCGPXSHKCVPASWRCDGEKDCEGGADEAGCAXWLNECLHNNGGCSHICXDLKIGFECXCPAGFQLLDQKXCGDIDECKDPDACSQICVNYKGYFKCECYPGYEMDLLXKNCKAAAGKSPSLIFXNRHEVRRIDLVKRNYSRLIPMLKNVVALDVEVAXNRIYWCDLSYRKIYSAYMDKASDPKEQEVLIDEQLHSPEGLAVDWVHKHIYWXDSGNKXISVAXVDGGRRRXLFSRNLSEPRAIAVDPLRGFMYWSDWGDQAKIEKSGLNGVDRQXLVSDNIEWPNGIXLDLLSQRLYWVDSKLHQLSSIDFSGGNRKXLISSXDFLSHPFGIAVFEDKVFWXDLENEAIFSANRLNGLEISILAENLNNPHDIVIFHELKQPRAPDACELSVQPNGGCEYLCLPAPQISSHSPKYXCACPDXMWLGPDMKRCYRAPQSXSXXXLASXMXRXVPAXXRAPGXXVHRSXYQNHSXEXPSLXAAVPSSVSVPRAPSISPSXLSPAXSNHSQHYANEDSKMGSXVXAAVIGIIVPIVVIALLCMSGYLIWRNWKRKNXKSMNFDNPVYRKXXEEEDEDELHIGRXAQIGHVYPAAISSFDRPLWAEPCLGEXREPEDPAPALKELFVLPGEPRSQLHQLPKNPLSELPVVKSKRVALSLEDDGLP

SEQ ID NO: 15214 - protein, 457 aa, Homo sapiens
  MOD_RES (14)..(14): Selenocysteine
  MOD_RES (67)..(67): Selenocysteine
  MOD_RES (73)..(73): Selenocysteine
  MOD_RES (78)..(78): Selenocysteine
  MOD_RES (86)..(86): Selenocysteine
  MOD_RES (130)..(130): Selenocysteine
  MOD_RES (143)..(143): Selenocysteine
  MOD_RES (173)..(173): Selenocysteine
  MOD_RES (178)..(178): Selenocysteine
  MOD_RES (197)..(197): Selenocysteine
  MOD_RES (271)..(271): Selenocysteine
  MOD_RES (277)..(277): Selenocysteine
  MOD_RES (294)..(294): Selenocysteine
  MOD_RES (296)..(298): Selenocysteine
  MOD_RES (302)..(302): Selenocysteine
  MOD_RES (304)..(304): Selenocysteine
  MOD_RES (306)..(306): Selenocysteine
  MOD_RES (310)..(311): Selenocysteine
  MOD_RES (316)..(317): Selenocysteine
  MOD_RES (322)..(322): Selenocysteine
  MOD_RES (328)..(328): Selenocysteine
  MOD_RES (330)..(330): Selenocysteine
  MOD_RES (334)..(334): Selenocysteine
  MOD_RES (353)..(353): Selenocysteine
  MOD_RES (358)..(358): Selenocysteine
  MOD_RES (375)..(375): Selenocysteine
  MOD_RES (377)..(377): Selenocysteine
  MOD_RES (409)..(409): Selenocysteine
  MOD_RES (422)..(423): Selenocysteine
  MOD_RES (436)..(436): Selenocysteine
MLKNVVALDVEVAXNRIYWCDLSYRKIYSAYMDKASDPKEQEVLIDEQLHSPEGLAVDWVHKHIYWXDSGNKXISVAXVDGGRRRXLFSRNLSEPRAIAVDPLRGFMYWSDWGDQAKIEKSGLNGVDRQXLVSDNIEWPNGIXLDLLSQRLYWVDSKLHQLSSIDFSGGNRKXLISSXDFLSHPFGIAVFEDKVFWXDLENEAIFSANRLNGLEISILAENLNNPHDIVIFHELKQPRAPDACELSVQPNGGCEYLCLPAPQISSHSPKYXCACPDXMWLGPDMKRCYRAPQSXSXXXLASXMXRXVPAXXRAPGXXVHRSXYQNHSXEXPSLXAAVPSSVSVPRAPSISPSXLSPAXSNHSQHYANEDSKMGSXVXAAVIGIIVPIVVIALLCMSGYLIWRNWKRKNXKSMNFDNPVYRKXXEEEDEDELHIGRXAQIGHVYPARVALSLEDDGLP

SEQ ID NO: 15215 - protein, 241 aa, Homo sapiens
  MOD_RES (1)..(1): Any amino acid
  MOD_RES (15)..(15): Selenocysteine
  MOD_RES (41)..(41): Selenocysteine
  MOD_RES (50)..(50): Selenocysteine
  MOD_RES (62)..(62): Selenocysteine
  MOD_RES (100)..(100): Selenocysteine
  MOD_RES (116)..(116): Selenocysteine
  MOD_RES (150)..(150): Selenocysteine
  MOD_RES (203)..(203): Selenocysteine
  MOD_RES (209)..(209): Selenocysteine
  MOD_RES (214)..(214): Selenocysteine
  MOD_RES (222)..(222): Selenocysteine
XDGSDEAGCLQVPPXFLGNRRRPRGLNECLHNNGGCSHICXDLKIGFECXCPAGFQLLDQKXCGDIDECKDPDACSQICVNYKGYFKCECYPGYEMDLLXKNCKAAAGKSPSLIFXNRHEVRRIDLVKRNYSRLIPMLKNVVALDVEVAXNRIYWCDLSYRKIYSAYMDKASDPKEQEVLIDEQLHSPEGLAVDWVHKHIYWXDSGNKXISVAXVDGGRRRXLFSRNLSEPRAIAVDPLRG

SEQ ID NO: 15216 - protein, 121 aa, Homo sapiens
  MOD_RES (1)..(1): Any amino acid
  MOD_RES (17)..(17): Selenocysteine
  MOD_RES (22)..(22): Selenocysteine
  MOD_RES (39)..(39): Selenocysteine
  MOD_RES (41)..(41): Selenocysteine
  MOD_RES (73)..(73): Selenocysteine
  MOD_RES (86)..(87): Selenocysteine
  MOD_RES (100)..(100): Selenocysteine
XPSSVSVPRAPSISPSXLSPAXSNHSQHYANEDSKMGSXVXAAVIGIIVPIVVIALLCMSGYLIWRNWKRKNXKSMNFDNPVYRKXXEEEDEDELHIGRXAQIGHVYPARVALSLEDDGLP

SEQ ID NO: 15217 - protein, 135 aa, Homo sapiens
  MOD_RES (1)..(1): Any amino acid
  MOD_RES (25)..(25): Selenocysteine
  MOD_RES (78)..(78): Selenocysteine
  MOD_RES (84)..(84): Selenocysteine
  MOD_RES (89)..(89): Selenocysteine
  MOD_RES (97)..(97): Selenocysteine
  MOD_RES (130)..(130): Selenocysteine
  MOD_RES (132)..(132): Selenocysteine
XVKRNYSRLIPMLKNVVALDVEVAXNRIYWCDLSYRKIYSAYMDKASDPKEQEVLIDEQLHSPEGLAVDWVHKHIYWXDSGNKXISVAXVDGGRRRXLFSRNLSEPRAIAVDPLRGSAEPALVLGRLQAXPXVQH

SEQ ID NO: 15218 - protein, 357 aa, Homo sapiens
  MOD_RES (134)..(134): Selenocysteine
  MOD_RES (141)..(141): Selenocysteine
  MOD_RES (160)..(160): Selenocysteine
  MOD_RES (192)..(192): Selenocysteine
  MOD_RES (196)..(196): Selenocysteine
  MOD_RES (222)..(222): Selenocysteine
  MOD_RES (248)..(248): Selenocysteine
  MOD_RES (270)..(270): Selenocysteine
  MOD_RES (331)..(331): Selenocysteine
  MOD_RES (337)..(337): Selenocysteine
MAPRRVRSFLRGLPALLLLLLFLGPWPAASHGGKYSREKNQPKPSPKRESGEEFRMEKLNQLWEKAQRLHLPPVRLAELHADLKIQERDELAWKKLKLDGLDEDGEKEARLIRNLNVILAKYGLDGKKDARQVXSNSLSGXQEDGLDDPRLEKLWHKAKXSGKFSGEELDKLWREFLHHKEKVHEYNVLLEXLSRXEEIHENVISPSDLSDIKGSVLHSRHXELKEKLRSINQGLDRLRRVSHQGYSXEAEFEEPRVIDLWDLAQSANLXDKELEAFREELKHFEAKIEKHNHYQKQLEIAHEKLRHAESVGDGERVSRSREKHALLEGRXKELGYXVKKHLQDLSGRISRARHNEL

SEQ ID NO: 15219 - protein, 105 aa, Homo sapiens
MAPRRVRSFLRGLPALLLLLLFLGPWPAASHGGKYSREKNQPKPSPKRESGEEFRMEKLNQLWEKAQRNLPVASLLRGQFLAVSWSVLLVAHRLLPFVRSCIFLP

SEQ ID NO: 15220 - protein, 154 aa, Homo sapiens
  MOD_RES (118)..(118): Selenocysteine
  MOD_RES (131)..(131): Selenocysteine
  MOD_RES (152)..(153): Selenocysteine
MFHCIPLWRCNRHVESIDKRHCSLVYVPEEIYRYARSLEELLLDANQLRELPEQFFQLVKLRKLGLSDNEIQRLPPEIANFMQLVELDVSRNEIPEIPESISFCKALQVADFSGNPLXRLPESFPELQNLXCLSVNDISLQSLPENIGKQKXXS

SEQ ID NO: 15221 - protein, 197 aa, Homo sapiens
  MOD_RES (118)..(118): Selenocysteine
  MOD_RES (131)..(131): Selenocysteine
  MOD_RES (164)..(164): Selenocysteine
  MOD_RES (171)..(171): Selenocysteine
MFHCIPLWRCNRHVESIDKRHCSLVYVPEEIYRYARSLEELLLDANQLRELPEQFFQLVKLRKLGLSDNEIQRLPPEIANFMQLVELDVSRNEIPEIPESISFCKALQVADFSGNPLXRLPESFPELQNLXCLSVNDISLQSLPENIGNLYNLASLELRENLLXYLPDSLXQLRRLEELDLGNNEIYNLNQLEPSYI

SEQ ID NO: 15222 - protein, 524 aa, Homo sapiens
  MOD_RES (118)..(118): Selenocysteine
  MOD_RES (131)..(131): Selenocysteine
  MOD_RES (164)..(164): Selenocysteine
  MOD_RES (171)..(171): Selenocysteine
  MOD_RES (243)..(243): Selenocysteine
  MOD_RES (246)..(246): Selenocysteine
  MOD_RES (257)..(257): Selenocysteine
  MOD_RES (279)..(279): Selenocysteine
  MOD_RES (292)..(292): Selenocysteine
  MOD_RES (297)..(297): Selenocysteine
  MOD_RES (303)..(303): Selenocysteine
  MOD_RES (338)..(338): Selenocysteine
  MOD_RES (348)..(348): Selenocysteine
  MOD_RES (358)..(358): Selenocysteine
  MOD_RES (378)..(378): Selenocysteine
  MOD_RES (397)..(397): Selenocysteine
  MOD_RES (400)..(400): Selenocysteine
  MOD_RES (402)..(402): Selenocysteine
  MOD_RES (405)..(406): Selenocysteine
  MOD_RES (412)..(412): Selenocysteine
  MOD_RES (424)..(424): Selenocysteine
  MOD_RES (472)..(472): Selenocysteine
  MOD_RES (474)..(474): Selenocysteine
  MOD_RES (480)..(480): Selenocysteine
  MOD_RES (492)..(492): Selenocysteine
  MOD_RES (521)..(522): Selenocysteine
MFHCIPLWRCNRHVESIDKRHCSLVYVPEEIYRYARSLEELLLDANQLRELPEQFFQLVKLRKLGLSDNEIQRLPPEIANFMQLVELDVSRNEIPEIPESISFCKALQVADFSGNPLXRLPESFPELQNLXCLSVNDISLQSLPENIGNLYNLASLELRENLLXYLPDSLXQLRRLEELDLGNNEIYNLPESIGALLHLKDLWLDGNQLSELPQEIGNLKNLLCLDVSENRLERLPEEISGLXSLXDLVISQNLLEXIPDGIGKLKKLSILKVDQNRLXQLPEAVGECESLXELVLXENQLLXLPKSIGKLKKLSNLNADRNKLVSLPKEIGGCCSLXVFCVRDNRLXRIPAEVSQAXELHVLDVAGNRLLHLPLSLXALKLKALWLSDNQSQPLLXFQXDXDYXXGEKILXCVLLPQLPSEPXCQENLPRCGALENLVNDVSDEAWNERAVNRVSAIRFVEDEKDEEDNEXRXLLRRAXPHPGELKHMKKXVENLRNDMNAAKGLDSNKNEVNHAIDRVXXSV

SEQ ID NO: 15223 - protein, 587 aa, Homo sapiens
  MOD_RES (36)..(36): Selenocysteine
  MOD_RES (46)..(46): Selenocysteine
  MOD_RES (55)..(55): Selenocysteine
  MOD_RES (69)..(69): Selenocysteine
  MOD_RES (72)..(72): Selenocysteine
  MOD_RES (99)..(99): Selenocysteine
  MOD_RES (182)..(182): Selenocysteine
  MOD_RES (192)..(192): Selenocysteine
  MOD_RES (216)..(216): Selenocysteine
  MOD_RES (222)..(222): Selenocysteine
  MOD_RES (281)..(281): Selenocysteine
  MOD_RES (347)..(347): Selenocysteine
  MOD_RES (356)..(356): Selenocysteine
  MOD_RES (453)..(453): Selenocysteine
  MOD_RES (455)..(455): Selenocysteine
  MOD_RES (493)..(493): Selenocysteine
  MOD_RES (499)..(499): Selenocysteine
  MOD_RES (505)..(506): Selenocysteine
  MOD_RES (511)..(512): Selenocysteine
  MOD_RES (515)..(515): Selenocysteine
  MOD_RES (522)..(522): Selenocysteine
  MOD_RES (525)..(526): Selenocysteine
  MOD_RES (530)..(530): Selenocysteine
  MOD_RES (539)..(539): Selenocysteine
MPLDKAMPLKHYLLLLVGCQAWGAGLAYHGCPSECXCSRASQVECXGARIVAVPXPLPWNAMSLQILNXHIXELNESPFLNISALIALRIEKNELSRIXPGAFRNLGSLRYLSLANNKLQVLPIGLFQGLDSLESLLLSSNQLLQIQPAHFSQCSNLKELQLHGNHLEYIPDGAFDHLVGLXKLNLGKNSLXHISPRVFQHLGNLQVLRLYENRLXDIPMGXFDGLVNLQELALQQNQIGLLSPGLFHNNHNLQRLYLSNNHISQLPPSVFMQLPQLNRLXLFGNSLKELSPGIFGPMPNLRELWLYDNHISSLPDNVFSNLRQLQVLILSRNQISFISPGAFNGLXELRELSLHXNALQDLDGNVFRMLANLQNISLQNNRLRQLPGNIFANVNGLMAIQLQNNQLENLPLGIFDHLGKLCELRLYDNPWRCDSDILPLRNWLLLNQPRLGXDXVPVCFSPANVRGQSLIIINVNVAVPSVHVPEVPSYPEXPWYPDXPSYPDXXSVSSXXELXSPVEDYXDLXXIQVXDDRSVWGMXQAQSGLAIAAIVIGIVALACSLAACVGCCCCKKRSQAVLMQMKAPNEC

SEQ ID NO: 15224 - protein, 581 aa, Homo sapiens
  MOD_RES (30)..(30): Selenocysteine
  MOD_RES (40)..(40): Selenocysteine
  MOD_RES (49)..(49): Selenocysteine
  MOD_RES (63)..(63): Selenocysteine
  MOD_RES (66)..(66): Selenocysteine
  MOD_RES (93)..(93): Selenocysteine
  MOD_RES (176)..(176): Selenocysteine
  MOD_RES (186)..(186): Selenocysteine
  MOD_RES (210)..(210): Selenocysteine
  MOD_RES (216)..(216): Selenocysteine
  MOD_RES (275)..(275): Selenocysteine
  MOD_RES (341)..(341): Selenocysteine
  MOD_RES (350)..(350): Selenocysteine
  MOD_RES (447)..(447): Selenocysteine
  MOD_RES (449)..(449): Selenocysteine
  MOD_RES (487)..(487): Selenocysteine
  MOD_RES (493)..(493): Selenocysteine
  MOD_RES (499)..(500): Selenocysteine
  MOD_RES (505)..(506): Selenocysteine
  MOD_RES (509)..(509): Selenocysteine
  MOD_RES (516)..(516): Selenocysteine
  MOD_RES (519)..(520): Selenocysteine
  MOD_RES (524)..(524): Selenocysteine
  MOD_RES (533)..(533): Selenocysteine
MPLKHYLLLLVGCQAWGAGLAYHGCPSECXCSRASQVECXGARIVAVPXPLPWNAMSLQILNXHIXELNESPFLNISALIALRIEKNELSRIXPGAFRNLGSLRYLSLANNKLQVLPIGLFQGLDSLESLLLSSNQLLQIQPAHFSQCSNLKELQLHGNHLEYIPDGAFDHLVGLXKLNLGKNSLXHISPRVFQHLGNLQVLRLYENRLXDIPMGXFDGLVNLQELALQQNQIGLLSPGLFHNNHNLQRLYLSNNHISQLPPSVFMQLPQLNRLXLFGNSLKELSPGIFGPMPNLRELWLYDNHISSLPDNVFSNLRQLQVLILSRNQISFISPGAFNGLXELRELSLHXNALQDLDGNVFRMLANLQNISLQNNRLRQLPGNIFANVNGLMAIQLQNNQLENLPLGIFDHLGKLCELRLYDNPWRCDSDILPLRNWLLLNQPRLGXDXVPVCFSPANVRGQSLIIINVNVAVPSVHVPEVPSYPEXPWYPDXPSYPDXXSVSSXXELXSPVEDYXDLXXIQVXDDRSVWGMXQAQSGLAIAAIVIGIVALACSLAACVGCCCCKKRSQAVLMQMKAPNEC

SEQ ID NO: 15225 - protein, 370 aa, Homo sapiens
  MOD_RES (4)..(4): Selenocysteine
  MOD_RES (7)..(7): Selenocysteine
  MOD_RES (34)..(34): Selenocysteine
  MOD_RES (39)..(39): Selenocysteine
  MOD_RES (50)..(50): Selenocysteine
  MOD_RES (60)..(60): Selenocysteine
  MOD_RES (64)..(64): Selenocysteine
  MOD_RES (66)..(66): Selenocysteine
  MOD_RES (71)..(71): Selenocysteine
  MOD_RES (76)..(76): Selenocysteine
  MOD_RES (86)..(86): Selenocysteine
  MOD_RES (172)..(172): Selenocysteine
  MOD_RES (193)..(193): Selenocysteine
  MOD_RES (197)..(197): Selenocysteine
  MOD_RES (204)..(204): Selenocysteine
  MOD_RES (219)..(219): Selenocysteine
  MOD_RES (235)..(235): Selenocysteine
  MOD_RES (258)..(258): Selenocysteine
  MOD_RES (279)..(279): Selenocysteine
  MOD_RES (282)..(283): Selenocysteine
  MOD_RES (315)..(315): Selenocysteine
  MOD_RES (321)..(321): Selenocysteine
  MOD_RES (333)..(333): Selenocysteine
  MOD_RES (338)..(339): Selenocysteine
MKVXGIXILFWPLSMILLSDKIQSSKREVQCNFXEKNYXLIPADIKKDVXILDLSYNQIXLNGXDXRVLQXYFLLXELYLIENKVXILHNNGFGNLSSLEILNICRNSIYVIQQGAFLGLNKLKQLYLCQNKIEQLNADVFVPLRSLKLLNLQGNLISYLDVPPLFHLELIXLYGNLWNCSCSLFNLQNWLNXSNVXLENENIXMCSYPNSLQSYNIKXVPHKAECHSKFPSSVXEDLYIHFQPISNSIFNSSSNNLXRNSEHEPLGKSWAFLVGVVVXVLXXSLLIFIAIKCPIWYNILLSYNHHRLEEHEAEXYEDGFXGNPSSLSQIPEXNSEEXXVIFEQLHSFVVDDDGFIEDKYIDIHELCEEN

SEQ ID NO: 15226 - protein, 78 aa, Homo sapiens
  MOD_RES (12)..(12): Selenocysteine
  MOD_RES (45)..(45): Selenocysteine
  MOD_RES (54)..(54): Selenocysteine
MENNIQMIQADXFRHLHHLEVLQLGRNSIRQIEVGAFNGLASLNXLELFDNWLXVIPSGAFEYLSKLRELWLRNNPIE

SEQ ID NO: 15227 - protein, 51 aa, Homo sapiens
  MOD_RES (8)..(8): Selenocysteine
  MOD_RES (13)..(13): Selenocysteine
  MOD_RES (25)..(25): Selenocysteine
MKLLWQVXVHHHXWNAILLPFVYLXAQVWILCAAIAAAASAGPQNCPSVCS

SEQ ID NO: 15228 - protein, 94 aa, Homo sapiens
  MOD_RES (8)..(8): Selenocysteine
  MOD_RES (13)..(13): Selenocysteine
  MOD_RES (25)..(25): Selenocysteine
  MOD_RES (62)..(62): Selenocysteine
  MOD_RES (77)..(77): Selenocysteine
  MOD_RES (94)..(94): Selenocysteine
MKLLWQVXVHHHXWNAILLPFVYLXAQVWILCAAIAAAASAGPQNCPSVCSCSNQFSKVVCXRRGLSEVPQGIPSNXRYLNLMENNIQMIQADX

SEQ ID NO: 15229 - protein, 653 aa, Homo sapiens
  MOD_RES (8)..(8): Selenocysteine
  MOD_RES (13)..(13): Selenocysteine
  MOD_RES (25)..(25): Selenocysteine
  MOD_RES (62)..(62): Selenocysteine
  MOD_RES (77)..(77): Selenocysteine
  MOD_RES (94)..(94): Selenocysteine
  MOD_RES (127)..(127): Selenocysteine
  MOD_RES (136)..(136): Selenocysteine
  MOD_RES (215)..(215): Selenocysteine
  MOD_RES (287)..(287): Selenocysteine
  MOD_RES (321)..(321): Selenocysteine
  MOD_RES (324)..(324): Selenocysteine
  MOD_RES (376)..(376): Selenocysteine
  MOD_RES (390)..(390): Selenocysteine
  MOD_RES (408)..(408): Selenocysteine
  MOD_RES (419)..(419): Selenocysteine
  MOD_RES (423)..(423): Selenocysteine
  MOD_RES (427)..(427): Selenocysteine
  MOD_RES (443)..(443): Selenocysteine
  MOD_RES (448)..(448): Selenocysteine
  MOD_RES (455)..(456): Selenocysteine
  MOD_RES (458)..(458): Selenocysteine
  MOD_RES (461)..(462): Selenocysteine
  MOD_RES (469)..(470): Selenocysteine
  MOD_RES (478)..(479): Selenocysteine
  MOD_RES (481)..(481): Selenocysteine
  MOD_RES (488)..(489): Selenocysteine
  MOD_RES (491)..(492): Selenocysteine
  MOD_RES (497)..(498): Selenocysteine
  MOD_RES (509)..(509): Selenocysteine
  MOD_RES (511)..(512): Selenocysteine
  MOD_RES (517)..(517): Selenocysteine
  MOD_RES (525)..(526): Selenocysteine
  MOD_RES (537)..(537): Selenocysteine
  MOD_RES (559)..(559): Selenocysteine
  MOD_RES (561)..(561): Selenocysteine
  MOD_RES (565)..(565): Selenocysteine
  MOD_RES (579)..(579): Selenocysteine
  MOD_RES (584)..(584): Selenocysteine
  MOD_RES (600)..(600): Selenocysteine
  MOD_RES (609)..(609): Selenocysteine
  MOD_RES (619)..(619): Selenocysteine
  MOD_RES (630)..(630): Selenocysteine
  MOD_RES (632)..(633): Selenocysteine
  MOD_RES (642)..(642): Selenocysteine
  MOD_RES (644)..(644): Selenocysteine
  MOD_RES (651)..(651): Selenocysteine
MKLLWQVXVHHHXWNAILLPFVYLXAQVWILCAAIAAAASAGPQNCPSVCSCSNQFSKVVCXRRGLSEVPQGIPSNXRYLNLMENNIQMIQADXFRHLHHLEVLQLGRNSIRQIEVGAFNGLASLNXLELFDNWLXVIPSGAFEYLSKLRELWLRNNPIESIPSYAFNRVPSLMRLDLGELKKLEYISEGAFEGLFNLKYLNLGMCNIKDMPNLXPLVGLEELEMSGNHFPEIRPGSFHGLSSLKKLWVMNSQVSLIERNAFDGLASLVELNLAHNNLSSLPHDLFXPLRYLVELHLHHNPWNCDCDILWLAWWLREYIPXNSXCCGRCHAPMHMRGRYLVEVDQASFQCSAPFIMDAPRDLNISEGRMAELKCRXPPMSSVKWLLPNGXVLSHASRHPRISVLNDGXLNFSHVLLSDXGVYXCMVXNVAGNSNASAYLNVSXAELNXSNYSFFXXVXVEXXEISPEDXXRKYKPVPXXSXGYQPAYXXSXXVLIQXXRVPKQVAVPAXDXXDKMQXSLDEVMKXXKIIIGCFVAVXLLAAAMLIVFYKLRKRHQQRSXVXAARXVEIIQVDEDIPAAXSAAAXAAPSGVSGEGAVVLPXIHDHINYNXYKPAHGAHWXENSLGNSLHPXVXXISEPYIIQXHXKDKVQEXQI

SEQ ID NO: 15230 - protein, 238 aa, Homo sapiens
  MOD_RES (44)..(44): Selenocysteine
  MOD_RES (55)..(55): Selenocysteine
  MOD_RES (73)..(73): Selenocysteine
  MOD_RES (88)..(88): Selenocysteine
  MOD_RES (103)..(103): Selenocysteine
  MOD_RES (105)..(105): Selenocysteine
  MOD_RES (138)..(138): Selenocysteine
  MOD_RES (147)..(148): Selenocysteine
  MOD_RES (151)..(151): Selenocysteine
  MOD_RES (226)..(226): Selenocysteine
MARARGSPCPPLPPGRMSWPHGALLFLWLFSPPLGAGGGGVAVXSAAGGGSPPAXSCPVACSCSNQASRVICXRRDLAEVPASIPVNXRYLNLQENGIQVIRXDXFKHLRHLEILQLSKNLVRKIEVGAFNGLPSLNXLELFDNRLXXVPXQAFEYLSKLRELWLRNNPIESIPSYAFNRVPSLRRLDLGELKRLEYISEAAFEGLVNLRYLNLGMCNLKDIPNLXALVRLEELELSG

SEQ ID NO: 15231 - protein, 713 aa, Homo sapiens
  MOD_RES (44)..(44): Selenocysteine
  MOD_RES (55)..(55): Selenocysteine
  MOD_RES (73)..(73): Selenocysteine
  MOD_RES (88)..(88): Selenocysteine
  MOD_RES (103)..(103): Selenocysteine
  MOD_RES (105)..(105): Selenocysteine
  MOD_RES (138)..(138): Selenocysteine
  MOD_RES (147)..(148): Selenocysteine
  MOD_RES (151)..(151): Selenocysteine
  MOD_RES (226)..(226): Selenocysteine
  MOD_RES (253)..(253): Selenocysteine
  MOD_RES (267)..(267): Selenocysteine
  MOD_RES (298)..(298): Selenocysteine
  MOD_RES (329)..(329): Selenocysteine
  MOD_RES (334)..(335): Selenocysteine
  MOD_RES (360)..(360): Selenocysteine
  MOD_RES (371)..(371): Selenocysteine
  MOD_RES (376)..(376): Selenocysteine
  MOD_RES (387)..(387): Selenocysteine
  MOD_RES (389)..(389): Selenocysteine
  MOD_RES (392)..(392): Selenocysteine
  MOD_RES (398)..(398): Selenocysteine
  MOD_RES (402)..(402): Selenocysteine
  MOD_RES (405)..(405): Selenocysteine
  MOD_RES (420)..(420): Selenocysteine
  MOD_RES (424)..(424): Selenocysteine
  MOD_RES (427)..(427): Selenocysteine
  MOD_RES (431)..(431): Selenocysteine
  MOD_RES (435)..(435): Selenocysteine
  MOD_RES (439)..(439): Selenocysteine
  MOD_RES (445)..(446): Selenocysteine
  MOD_RES (450)..(450): Selenocysteine
  MOD_RES (464)..(464): Selenocysteine
  MOD_RES (485)..(485): Selenocysteine
  MOD_RES (488)..(489): Selenocysteine
  MOD_RES (491)..(491): Selenocysteine
  MOD_RES (494)..(494): Selenocysteine
  MOD_RES (497)..(497): Selenocysteine
  MOD_RES (509)..(509): Selenocysteine
  MOD_RES (517)..(518): Selenocysteine
  MOD_RES (538)..(539): Selenocysteine
  MOD_RES (549)..(549): Selenocysteine
  MOD_RES (554)..(554): Selenocysteine
  MOD_RES (558)..(558): Selenocysteine
  MOD_RES (561)..(561): Selenocysteine
  MOD_RES (574)..(575): Selenocysteine
  MOD_RES (586)..(586): Selenocysteine
  MOD_RES (612)..(612): Selenocysteine
  MOD_RES (614)..(614): Selenocysteine
  MOD_RES (711)..(711): Selenocysteine
MARARGSPCPPLPPGRMSWPHGALLFLWLFSPPLGAGGGGVAVXSAAGGGSPPAXSCPVACSCSNQASRVICXRRDLAEVPASIPVNXRYLNLQENGIQVIRXDXFKHLRHLEILQLSKNLVRKIEVGAFNGLPSLNXLELFDNRLXXVPXQAFEYLSKLRELWLRNNPIESIPSYAFNRVPSLRRLDLGELKRLEYISEAAFEGLVNLRYLNLGMCNLKDIPNLXALVRLEELELSGNRLDLIRPGSFQGLXSLRKLWLMHAQVAXIERNAFDDLKSLEELNLSHNNLMSLPHDLFXPLHRLERVHLNHNPWHCNCDVLWLSWWLKEXVPSNXXCCARCHAPAGLKGRYIGELDQSHFXCYAPVIVEPPXDLNVXEGMAAELKCRXGXSMXSVNWLXPNGXLMXHGSYRVRISVLHDGXLNFXNVXVQDXGQYXCMVXNSAGNXXASAXLNVSAVDPVAAGGXGSGGGGPGGSGGVGGGSGGYXYFXXVXVEXLEXQPGEEALQPRGXEKEPPGPXXDGVWGGGRPGDAAGPASSSXXAPAPRSSRPXEKAFXVPIXDVXENALKDLDDVMKXXKIIIGCFVAIXFMAAVMLVAFYKLRKQHQLHKHHGPXRXVEIINVEDELPAASAVSVAAAAAVASGGGVGGDSHLALPALERDHLNHHHYVAAAFKAHYSSNPSGGGCGGKGPPGLNSIHEPLLFKSGSKENVQEXQI

SEQ ID NO: 15232 - protein, 41 aa, Homo sapiens
  MOD_RES (6)..(6): Selenocysteine
MLNKMXLHPQQIMIGPRFNRALFDPLLVVLLALQLLVVAGL

SEQ ID NO: 15233 - protein, 640 aa, Homo sapiens
  MOD_RES (6)..(6): Selenocysteine
  MOD_RES (46)..(46): Selenocysteine
  MOD_RES (76)..(76): Selenocysteine
  MOD_RES (78)..(78): Selenocysteine
  MOD_RES (114)..(114): Selenocysteine
  MOD_RES (128)..(128): Selenocysteine
  MOD_RES (137)..(138): Selenocysteine
  MOD_RES (216)..(216): Selenocysteine
  MOD_RES (280)..(280): Selenocysteine
  MOD_RES (288)..(288): Selenocysteine
  MOD_RES (324)..(324): Selenocysteine
  MOD_RES (332)..(332): Selenocysteine
  MOD_RES (350)..(350): Selenocysteine
  MOD_RES (366)..(366): Selenocysteine
  MOD_RES (379)..(379): Selenocysteine
  MOD_RES (382)..(382): Selenocysteine
  MOD_RES (388)..(388): Selenocysteine
  MOD_RES (392)..(392): Selenocysteine
  MOD_RES (395)..(395): Selenocysteine
  MOD_RES (410)..(410): Selenocysteine
  MOD_RES (414)..(414): Selenocysteine
  MOD_RES (417)..(417): Selenocysteine
  MOD_RES (421)..(421): Selenocysteine
  MOD_RES (425)..(425): Selenocysteine
  MOD_RES (435)..(436): Selenocysteine
  MOD_RES (440)..(440): Selenocysteine
  MOD_RES (444)..(444): Selenocysteine
  MOD_RES (447)..(449): Selenocysteine
  MOD_RES (456)..(456): Selenocysteine
  MOD_RES (458)..(458): Selenocysteine
  MOD_RES (461)..(461): Selenocysteine
  MOD_RES (471)..(472): Selenocysteine
  MOD_RES (479)..(479): Selenocysteine
  MOD_RES (486)..(487): Selenocysteine
  MOD_RES (490)..(491): Selenocysteine
  MOD_RES (494)..(494): Selenocysteine
  MOD_RES (498)..(498): Selenocysteine
  MOD_RES (501)..(501): Selenocysteine
  MOD_RES (504)..(504): Selenocysteine
  MOD_RES (506)..(506): Selenocysteine
  MOD_RES (510)..(510): Selenocysteine
  MOD_RES (525)..(526): Selenocysteine
  MOD_RES (537)..(537): Selenocysteine
  MOD_RES (563)..(563): Selenocysteine
  MOD_RES (565)..(565): Selenocysteine
  MOD_RES (576)..(576): Selenocysteine
  MOD_RES (579)..(579): Selenocysteine
  MOD_RES (608)..(610): Selenocysteine
  MOD_RES (613)..(613): Selenocysteine
  MOD_RES (638)..(638): Selenocysteine
MLNKMXLHPQQIMIGPRFNRALFDPLLVVLLALQLLVVAGLVRAQXCPSVCSCSNQFSKVICVRKNLREVPDGISXNXRLLNLHENQIQIIKVNSFKHLRHLEILQLSRNHIRXIEIGAFNGLANLNXLELFDNRLXXIPNGAFVYLSKLKELWLRNNPIESIPSYAFNRIPSLRRLDLGELKRLSYISEGAFEGLSNLRYLNLAMCNLREIPNLXPLIKLDELDLSGNHLSAIRPGSFQGLMHLQKLWMIQSQIQVIERNAFDNLQSLVEINLAHNNLXLLPHDLFXPLHHLERIHLHHNPWNCNCDILWLSWWIKDMAPSNXACCARCNXPPNLKGRYIGELDQNYFXCYAPVIVEPPADLNVXEGMAAELKCRASXSLXSVSWIXPNGXVMXHGAYKVRIAVLSDGXLNFXNVXVQDXGMYXCMVSNSVGNXXASAXLNVXAAXXXPFSYFSXVXVEXMEPSQDEARXXDNNVGPXPVVDWEXXNVXXSLXPQSXRSXEKXFXIPVXDINSGIPGIDEVMKXXKIIIGCFVAIXLMAAVMLVIFYKMRKQHHRQNHHAPXRXVEIINVDDEIXGDXPMESHLPMPAIEHEHLNHYNSYKSPFNHXXXVNXINSIHSSVHEPLLIRMNSKDNVQEXQI

SEQ ID NO: 15234 - protein, 880 aa, Homo sapiens
  MOD_RES (10)..(10): Selenocysteine
  MOD_RES (18)..(18): Selenocysteine
  MOD_RES (22)..(22): Selenocysteine
  MOD_RES (44)..(44): Selenocysteine
  MOD_RES (49)..(49): Selenocysteine
  MOD_RES (61)..(61): Selenocysteine
  MOD_RES (64)..(64): Selenocysteine
  MOD_RES (80)..(80): Selenocysteine
  MOD_RES (101)..(101): Selenocysteine
  MOD_RES (163)..(163): Selenocysteine
  MOD_RES (233)..(233): Selenocysteine
  MOD_RES (294)..(294): Selenocysteine
  MOD_RES (303)..(303): Selenocysteine
  MOD_RES (330)..(330): Selenocysteine
  MOD_RES (334)..(334): Selenocysteine
  MOD_RES (359)..(359): Selenocysteine
  MOD_RES (386)..(386): Selenocysteine
  MOD_RES (397)..(397): Selenocysteine
  MOD_RES (435)..(435): Selenocysteine
  MOD_RES (440)..(440): Selenocysteine
  MOD_RES (456)..(456): Selenocysteine
  MOD_RES (461)..(461): Selenocysteine
  MOD_RES (468)..(468): Selenocysteine
  MOD_RES (474)..(474): Selenocysteine
  MOD_RES (495)..(495): Selenocysteine
  MOD_RES (538)..(538): Selenocysteine
  MOD_RES (541)..(541): Selenocysteine
  MOD_RES (561)..(561): Selenocysteine
  MOD_RES (585)..(585): Selenocysteine
  MOD_RES (593)..(593): Selenocysteine
  MOD_RES (600)..(600): Selenocysteine
  MOD_RES (609)..(609): Selenocysteine
  MOD_RES (664)..(664): Selenocysteine
  MOD_RES (680)..(680): Selenocysteine
  MOD_RES (691)..(691): Selenocysteine
  MOD_RES (695)..(695): Selenocysteine
  MOD_RES (712)..(712): Selenocysteine
  MOD_RES (725)..(725): Selenocysteine
  MOD_RES (748)..(748): Selenocysteine
  MOD_RES (758)..(758): Selenocysteine
  MOD_RES (761)..(761): Selenocysteine
  MOD_RES (788)..(788): Selenocysteine
  MOD_RES (796)..(796): Selenocysteine
  MOD_RES (823)..(823): Selenocysteine
  MOD_RES (828)..(828): Selenocysteine
  MOD_RES (855)..(855): Selenocysteine
MKNLYFRVIXIVIGLYFXGIMXNASRKSNILFNSECQWNEYILXNCSFXGKCDIPVDISQXAAXVDVSFNFFRVLLQSHXKKEEWKIKHLDLSNNLISKIXLSPFAYLHALEVLNLSNNAIHSLSLDLLSPKSSWVKRHRSSFRNRFPLLKVLILQRNKLSDXPKGLWKLKSLQSLDLSFNGILQIGWSDFHNCLQLENLCLKSNKIFKIPPQAFKDLKKLQVIDLSNNALIXILPMMIIALEFPHLVVDLADNNWQCDDSVAVFQNFISESWRKKWNVICNRSIGSEEANGGXPQSRISREXRLPPIHLHRMKSLIRSKAERPQGGRHXGISXLGKKAKAGSGLRKKQRRLPRSVRSXRDVQAAGKKEDAPQDLALAVCLSVFIXFLVAFSLGAFXRPYVDRLWQKKCQSKSPGLDNAYSNEGFYDDMEAAGHXPHPEXHLRQVFPHLSLYENQXPFWVXQPHPHAXVIPDRXLGRSRKDPGSSQSPGQCGDNXGAGSGNDGAVYSILQRHPHAGNRELMSAAQDHIHRNDILGEWXYEXVAQEEPLSAHSVGVSSVAGXSHAVSGSSRYDSNELDPSLSGEIXASLCKMLXHAEAQRXGDSKERGGXEQSLWDSQMEFSKERQVSSSIDLLSIQQPRLSGARAEEALSAHYSEVPYGDPRDXGPSVFPPRWDSGLDVXPANKEPVQKSXPSDXCCELESDCDSDEGSLFXLSSISSESARSKXEEAVPDEESLQDESSGASKDNVXAVDSLEENVXFQXIPGKCKNQEDPFEKPLISAPDSGMYKXHLENASDXDRSEGLSPWPRSPGNSPLGDEFPGMFXYDYDXALQSKAAEWHCSLRDLEFSNVDVLQQXPPCSAEVPSDPDKAAFHERDSDILK

SEQ ID NO: 15235 - protein, 59 aa, Homo sapiens
  MOD_RES (14)..(14): Selenocysteine
  MOD_RES (36)..(36): Selenocysteine
  MOD_RES (58)..(58): Selenocysteine
MSEKEGMSEVLEDXISQFRKESRSQSMKEPGFIKEXSNLINEASDYLEGKSSNQIYEXH

SEQ ID NO: 15236 - protein, 860 aa, Homo sapiens
  MOD_RES (14)..(14): Selenocysteine
  MOD_RES (36)..(36): Selenocysteine
  MOD_RES (58)..(58): Selenocysteine
  MOD_RES (64)..(64): Selenocysteine
  MOD_RES (68)..(68): Selenocysteine
  MOD_RES (90)..(90): Selenocysteine
  MOD_RES (92)..(92): Selenocysteine
  MOD_RES (94)..(94): Selenocysteine
  MOD_RES (96)..(96): Selenocysteine
  MOD_RES (104)..(104): Selenocysteine
  MOD_RES (107)..(107): Selenocysteine
  MOD_RES (121)..(121): Selenocysteine
  MOD_RES (145)..(145): Selenocysteine
  MOD_RES (178)..(178): Selenocysteine
  MOD_RES (275)..(275): Selenocysteine
  MOD_RES (281)..(281): Selenocysteine
  MOD_RES (293)..(294): Selenocysteine
  MOD_RES (311)..(311): Selenocysteine
  MOD_RES (330)..(330): Selenocysteine
  MOD_RES (339)..(339): Selenocysteine
  MOD_RES (408)..(408): Selenocysteine
  MOD_RES (434)..(434): Selenocysteine
  MOD_RES (454)..(454): Selenocysteine
  MOD_RES (570)..(570): Selenocysteine
  MOD_RES (577)..(577): Selenocysteine
  MOD_RES (641)..(641): Selenocysteine
  MOD_RES (651)..(651): Selenocysteine
  MOD_RES (710)..(710): Selenocysteine
  MOD_RES (747)..(747): Selenocysteine
  MOD_RES (775)..(775): Selenocysteine
  MOD_RES (777)..(777): Selenocysteine
  MOD_RES (793)..(793): Selenocysteine
  MOD_RES (797)..(797): Selenocysteine
  MOD_RES (800)..(800): Selenocysteine
  MOD_RES (816)..(816): Selenocysteine
  MOD_RES (824)..(824): Selenocysteine
  MOD_RES (837)..(837): Selenocysteine
  MOD_RES (849)..(849): Selenocysteine
  MOD_RES (855)..(855): Selenocysteine
MSEKEGMSEVLEDXISQFRKESRSQSMKEPGFIKEXSNLINEASDYLEGKSSNQIYEXHPRQNXLESXSSSGRKSKRNEEQKKNLQFSEXSXRXGXSQSLSSLXGRXAEYQALVNFLSHEXVGEVSPQVSEENQKQLGLGADNFXVNLEAKGLQEFPKDILKIKYVKYLYLDKNQIKXFQGADSGDLLGLEILSLQENGLSSLPSEIQLLHNLRILNVSHNHISHIPKEISQLGNIRQLFFYNNYIENFPSDLECLGNLEILSLGKNKLRHIPDXLPSLKXLRVLNLEYNQLXXFPKALCFLPKLISLDLXGNLISSLPKEIRELKNLEXLLMDHNKLXFLAVEIFQLLKIKELQLADNKLEVISHKIENFRELRILILDKNLLKNIPEKISCCAMLECLSLSDNKLXELPKYIHKLNNLRKLHVNRNNMVKIXDCISHLNNICSLEFSGNIIXDVPIEIKNCQKIIKIELSYNKIMYFPLGLCALDSLYYLSVNGNYISEIPVDISFSKQLLHLELSENKLLIFSEHFCSLINLKYLDLGKNQIKKIPASISNMISLHVLILCCNKFEXFPRELCXLENLQVLDLSENQLQKISSDICNLKGIQKLNFSSNQFIHFPIELCQLQSLEQLNISQIKGRKLXRLPGELSNMXQLKELDISNNAIREIPRNIGELRNLVSLHAYNNQISYLPPSLLSLNDLQQLNLSGNNLXALPSAIYNIFSLKEINFDDNPLLRPPVEICKGKQLYXIARYLQRADERDEKILEKIFKIVANNIXEXNFEFLCQKLNLANSEXDMPXKSXVSLSERAHQALVIWKXQSNKLSLXAAALRDQLIRALXMIGAYEIMDKIXALNLFXRAIKF

SEQ ID NO: 15237 - protein, 116 aa, Homo sapiens
  MOD_RES (2)..(2): Selenocysteine
  MOD_RES (61)..(61): Selenocysteine
  MOD_RES (98)..(98): Selenocysteine
MXQLKELDISNNAIREIPRNIGELRNLVSLHAYNNQISYLPPSLLSLNDLQQLNLSGNNLXALPSAIYNIFSLKEINFDDNPLLRPPVEICKGKQLYXIARYLQRADERDGLQLHS

SEQ ID NO: 15238 - protein, 640 aa, Homo sapiens
  MOD_RES (5)..(5): Selenocysteine
  MOD_RES (20)..(20): Selenocysteine
  MOD_RES (74)..(74): Selenocysteine
  MOD_RES (97)..(97): Selenocysteine
  MOD_RES (129)..(129): Selenocysteine
  MOD_RES (175)..(175): Selenocysteine
  MOD_RES (180)..(180): Selenocysteine
  MOD_RES (221)..(221): Selenocysteine
  MOD_RES (235)..(235): Selenocysteine
  MOD_RES (242)..(242): Selenocysteine
  MOD_RES (251)..(251): Selenocysteine
  MOD_RES (257)..(257): Selenocysteine
  MOD_RES (314)..(314): Selenocysteine
  MOD_RES (322)..(322): Selenocysteine
  MOD_RES (399)..(399): Selenocysteine
  MOD_RES (451)..(451): Selenocysteine
  MOD_RES (455)..(455): Selenocysteine
  MOD_RES (458)..(458): Selenocysteine
  MOD_RES (468)..(468): Selenocysteine
  MOD_RES (471)..(471): Selenocysteine
  MOD_RES (481)..(481): Selenocysteine
  MOD_RES (485)..(485): Selenocysteine
  MOD_RES (534)..(534): Selenocysteine
  MOD_RES (564)..(564): Selenocysteine
  MOD_RES (612)..(612): Selenocysteine
MDMGXQGSGRKRLPNRERLXAEDDALNQIAREAEARLAAKRAARAEAREIRMKELERQQKEIYQVQKKYYGLDXKWGDIEQWMEDSERYSRRSRRNXSASDEDERMSVGSRGSLRSQPDLEYGGPYAWXNGYDGELYGSQSLNRRSGRPSCLYSAARPSGSYRASVLDEGSFGGXRRGSXSGSRAPSEYSGHLNSSSRASSRASSARASPVVEERPEKDFXEKGSRNMPGLSAAXLASLGGXSSRRGSGDXSISIDXEASIREIKELNELKDQIQDVEGKYMQGLKEMKDSLAEVEEKYKKAMVSNAQLDNEKXNFMYQVDXLKDMLLELEEQLAESRRQYEEKNKEFEREKHAHSILQFQFAEVKEALKQREEMLEEIRQLQQKQASSIREISDLQEXIEWKDKKIGALERQKEFFDSVRSERDDLREEVVMLKEELKKHGIILNSEIAXNGEXSDXLNNVGYQGPXKMXKEELNALKSXGDGXLDIRLKKLVDERECLLEQIKKLKGQLEERQKIGKLDNLRSEDDVLENGXDMHVMDLQRDANRQISDLKFKLAKSEQEIXALEQNVIRLESQVSRYKSAAENAEKIEDELKAEKRKLQRELRSALDKXEELEVSNGHLVKRLEKMKANRSALLSQQ

SEQ ID NO: 15239 - protein, 149 aa, Homo sapiens
  MOD_RES (2)..(2): Selenocysteine
  MOD_RES (65)..(65): Selenocysteine
  MOD_RES (84)..(84): Selenocysteine
  MOD_RES (113)..(113): Selenocysteine
  MOD_RES (127)..(127): Selenocysteine
  MOD_RES (134)..(134): Selenocysteine
  MOD_RES (143)..(143): Selenocysteine
  MOD_RES (149)..(149): Selenocysteine
MXSPAAAQSREIDCLSPEAQKLAEARLAAKRAARAEAREIRMKELERQQKEEDSERYSRRSRRNXSASDEDERMSVGSRGSLRXNGYDGELYGSQSLNRRSGRVEERPEKDFXEKGSRNMPGLSAAXLASLGGXSSRRGSGDXSISIDX

SEQ ID NO: 15240 - protein, 784 aa, Homo sapiens
  MOD_RES (2)..(2): Selenocysteine
  MOD_RES (65)..(65): Selenocysteine
  MOD_RES (93)..(93): Selenocysteine
  MOD_RES (107)..(107): Selenocysteine
  MOD_RES (114)..(114): Selenocysteine
  MOD_RES (123)..(123): Selenocysteine
  MOD_RES (129)..(129): Selenocysteine
  MOD_RES (162)..(162): Selenocysteine
  MOD_RES (170)..(170): Selenocysteine
  MOD_RES (237)..(237): Selenocysteine
  MOD_RES (241)..(241): Selenocysteine
  MOD_RES (244)..(244): Selenocysteine
  MOD_RES (254)..(254): Selenocysteine
  MOD_RES (257)..(257): Selenocysteine
  MOD_RES (267)..(267): Selenocysteine
  MOD_RES (271)..(271): Selenocysteine
  MOD_RES (297)..(297): Selenocysteine
  MOD_RES (303)..(303): Selenocysteine
  MOD_RES (306)..(306): Selenocysteine
  MOD_RES (322)..(322): Selenocysteine
  MOD_RES (331)..(331): Selenocysteine
  MOD_RES (337)..(337): Selenocysteine
  MOD_RES (342)..(342): Selenocysteine
  MOD_RES (361)..(361): Selenocysteine
  MOD_RES (377)..(377): Selenocysteine
  MOD_RES (379)..(379): Selenocysteine
  MOD_RES (396)..(396): Selenocysteine
  MOD_RES (405)..(405): Selenocysteine
  MOD_RES (413)..(413): Selenocysteine
  MOD_RES (425)..(425): Selenocysteine
  MOD_RES (442)..(442): Selenocysteine
  MOD_RES (444)..(444): Selenocysteine
  MOD_RES (453)..(453): Selenocysteine
  MOD_RES (468)..(468): Selenocysteine
  MOD_RES (482)..(482): Selenocysteine
  MOD_RES (492)..(492): Selenocysteine
  MOD_RES (501)..(501): Selenocysteine
  MOD_RES (509)..(509): Selenocysteine
  MOD_RES (513)..(513): Selenocysteine
  MOD_RES (516)..(516): Selenocysteine
  MOD_RES (545)..(545): Selenocysteine
  MOD_RES (563)..(563): Selenocysteine
  MOD_RES (572)..(572): Selenocysteine
  MOD_RES (576)..(576): Selenocysteine
  MOD_RES (590)..(590): Selenocysteine
  MOD_RES (603)..(603): Selenocysteine
  MOD_RES (641)..(641): Selenocysteine
  MOD_RES (652)..(652): Selenocysteine
  MOD_RES (659)..(659): Selenocysteine
  MOD_RES (687)..(687): Selenocysteine
  MOD_RES (703)..(703): Selenocysteine
  MOD_RES (723)..(723): Selenocysteine
  MOD_RES (735)..(735): Selenocysteine
  MOD_RES (768)..(768): Selenocysteine
  MOD_RES (782)..(782): Selenocysteine
MXSPAAAQSREIDCLSPEAQKLAEARLAAKRAARAEAREIRMKELERQQKEEDSERYSRRSRRNXSASDEDERMSVGSRGSLRVEERPEKDFXEKGSRNMPGLSAAXLASLGGXSSRRGSGDXSISIDXEASIREIKDSLAEVEEKYKKAMVSNAQLDNEKXNFMYQVDXLKDMLLELEEQLAESRRQYEEKNKEFEREKHAHSILQFQFAEVKEALKQREEMLEKHGIILNSEIAXNGEXSDXLNNVGYQGPXKMXKEELNALKSXGDGXLGRASEVEVKNEIVANVGKREILHNXEKEQHXEDXVKDCVDIEVFPAGENXEDQKSSEDXAPFLGXLAGAXYEEQVQSQILESSSLPENXVQVESNEVMGAPDDRXRXPLEPSNCWSDLDGGNHXENVGEAAVXQVEEQAGXVASCPLGHSDDXVYHDDKCMVEVPQELEXSXGHSLEKEFXNQEAAEPKEVPAHSXEVGRDHNEEEGEEXGLRDEKPIKXEVPGSPAGXEGNCQEAXGPSXVDXQNEPLDMKEPDEEKSDQQGEALDSSQKKXKNKKKKNKKKKSPVPVEXLKDVKKELXYQNXDLSEIKEEEQVKSXDRKSAVEAQNEVXENPKQKIAAESSENVDCPENPKIKLDGKLDQEGDDVQXAAEEVLADGDXLDFEDDXVQSSGPRAGGEELDEGVAKDNAKIDGAXQSSPAEPKSEDADRCXLPEHESPSQDISDACEAESXERCEMSEHPSQXVRKALDSNSLENDDLSAPGREPGHFNPESREDXRGGNEKGKSKEDCXMS

SEQ ID NO: 15241 - protein, 808 aa, Homo sapiens
  MOD_RES (2)..(2): Selenocysteine
  MOD_RES (65)..(65): Selenocysteine
  MOD_RES (93)..(93): Selenocysteine
  MOD_RES (107)..(107): Selenocysteine
  MOD_RES (114)..(114): Selenocysteine
  MOD_RES (123)..(123): Selenocysteine
  MOD_RES (129)..(129): Selenocysteine
  MOD_RES (186)..(186): Selenocysteine
  MOD_RES (194)..(194): Selenocysteine
  MOD_RES (261)..(261): Selenocysteine
  MOD_RES (265)..(265): Selenocysteine
  MOD_RES (268)..(268): Selenocysteine
  MOD_RES (278)..(278): Selenocysteine
  MOD_RES (281)..(281): Selenocysteine
  MOD_RES (291)..(291): Selenocysteine
  MOD_RES (295)..(295): Selenocysteine
  MOD_RES (321)..(321): Selenocysteine
  MOD_RES (327)..(327): Selenocysteine
  MOD_RES (330)..(330): Selenocysteine
  MOD_RES (346)..(346): Selenocysteine
  MOD_RES (355)..(355): Selenocysteine
  MOD_RES (361)..(361): Selenocysteine
  MOD_RES (366)..(366): Selenocysteine
  MOD_RES (385)..(385): Selenocysteine
  MOD_RES (401)..(401): Selenocysteine
  MOD_RES (403)..(403): Selenocysteine
  MOD_RES (420)..(420): Selenocysteine
  MOD_RES (429)..(429): Selenocysteine
  MOD_RES (437)..(437): Selenocysteine
  MOD_RES (449)..(449): Selenocysteine
  MOD_RES (466)..(466): Selenocysteine
  MOD_RES (468)..(468): Selenocysteine
  MOD_RES (477)..(477): Selenocysteine
  MOD_RES (492)..(492): Selenocysteine
  MOD_RES (506)..(506): Selenocysteine
  MOD_RES (516)..(516): Selenocysteine
  MOD_RES (525)..(525): Selenocysteine
  MOD_RES (533)..(533): Selenocysteine
  MOD_RES (537)..(537): Selenocysteine
  MOD_RES (540)..(540): Selenocysteine
  MOD_RES (569)..(569): Selenocysteine
  MOD_RES (587)..(587): Selenocysteine
  MOD_RES (596)..(596): Selenocysteine
  MOD_RES (600)..(600): Selenocysteine
  MOD_RES (614)..(614): Selenocysteine
  MOD_RES (627)..(627): Selenocysteine
  MOD_RES (665)..(665): Selenocysteine
  MOD_RES (676)..(676): Selenocysteine
  MOD_RES (683)..(683): Selenocysteine
  MOD_RES (711)..(711): Selenocysteine
  MOD_RES (727)..(727): Selenocysteine
  MOD_RES (747)..(747): Selenocysteine
  MOD_RES (759)..(759): Selenocysteine
  MOD_RES (792)..(792): Selenocysteine
  MOD_RES (806)..(806): Selenocysteine
MXSPAAAQSREIDCLSPEAQKLAEARLAAKRAARAEAREIRMKELERQQKEEDSERYSRRSRRNXSASDEDERMSVGSRGSLRVEERPEKDFXEKGSRNMPGLSAAXLASLGGXSSRRGSGDXSISIDXEASIREIKELNELKDQIQDVEGKYMQGLKEMKDSLAEVEEKYKKAMVSNAQLDNEKXNFMYQVDXLKDMLLELEEQLAESRRQYEEKNKEFEREKHAHSILQFQFAEVKEALKQREEMLEKHGIILNSEIAXNGEXSDXLNNVGYQGPXKMXKEELNALKSXGDGXLGRASEVEVKNEIVANVGKREILHNXEKEQHXEDXVKDCVDIEVFPAGENXEDQKSSEDXAPFLGXLAGAXYEEQVQSQILESSSLPENXVQVESNEVMGAPDDRXRXPLEPSNCWSDLDGGNHXENVGEAAVXQVEEQAGXVASCPLGHSDDXVYHDDKCMVEVPQELEXSXGHSLEKEFXNQEAAEPKEVPAHSXEVGRDHNEEEGEEXGLRDEKPIKXEVPGSPAGXEGNCQEAXGPSXVDXQNEPLDMKEPDEEKSDQQGEALDSSQKKXKNKKKKNKKKKSPVPVEXLKDVKKELXYQNXDLSEIKEEEQVKSXDRKSAVEAQNEVXENPKQKIAAESSENVDCPENPKIKLDGKLDQEGDDVQXAAEEVLADGDXLDFEDDXVQSSGPRAGGEELDEGVAKDNAKIDGAXQSSPAEPKSEDADRCXLPEHESPSQDISDACEAESXERCEMSEHPSQXVRKALDSNSLENDDLSAPGREPGHFNPESREDXRGGNEKGKSKEDCXMS

SEQ ID NO: 15242 - protein, 752 aa, Homo sapiens
  MOD_RES (2)..(2): Selenocysteine
  MOD_RES (61)..(61): Selenocysteine
  MOD_RES (75)..(75): Selenocysteine
  MOD_RES (82)..(82): Selenocysteine
  MOD_RES (91)..(91): Selenocysteine
  MOD_RES (97)..(97): Selenocysteine
  MOD_RES (130)..(130): Selenocysteine
  MOD_RES (138)..(138): Selenocysteine
  MOD_RES (205)..(205): Selenocysteine
  MOD_RES (209)..(209): Selenocysteine
  MOD_RES (212)..(212): Selenocysteine
  MOD_RES (222)..(222): Selenocysteine
  MOD_RES (225)..(225): Selenocysteine
  MOD_RES (235)..(235): Selenocysteine
  MOD_RES (239)..(239): Selenocysteine
  MOD_RES (265)..(265): Selenocysteine
  MOD_RES (271)..(271): Selenocysteine
  MOD_RES (274)..(274): Selenocysteine
  MOD_RES (290)..(290): Selenocysteine
  MOD_RES (299)..(299): Selenocysteine
  MOD_RES (305)..(305): Selenocysteine
  MOD_RES (310)..(310): Selenocysteine
  MOD_RES (329)..(329): Selenocysteine
  MOD_RES (345)..(345): Selenocysteine
  MOD_RES (347)..(347): Selenocysteine
  MOD_RES (364)..(364): Selenocysteine
  MOD_RES (373)..(373): Selenocysteine
  MOD_RES (381)..(381): Selenocysteine
  MOD_RES (393)..(393): Selenocysteine
  MOD_RES (410)..(410): Selenocysteine
  MOD_RES (412)..(412): Selenocysteine
  MOD_RES (421)..(421): Selenocysteine
  MOD_RES (436)..(436): Selenocysteine
  MOD_RES (450)..(450): Selenocysteine
  MOD_RES (460)..(460): Selenocysteine
  MOD_RES (469)..(469): Selenocysteine
  MOD_RES (477)..(477): Selenocysteine
  MOD_RES (481)..(481): Selenocysteine
  MOD_RES (484)..(484): Selenocysteine
  MOD_RES (513)..(513): Selenocysteine
  MOD_RES (531)..(531): Selenocysteine
  MOD_RES (540)..(540): Selenocysteine
  MOD_RES (544)..(544): Selenocysteine
  MOD_RES (558)..(558): Selenocysteine
  MOD_RES (571)..(571): Selenocysteine
  MOD_RES (609)..(609): Selenocysteine
  MOD_RES (620)..(620): Selenocysteine
  MOD_RES (627)..(627): Selenocysteine
  MOD_RES (655)..(655): Selenocysteine
  MOD_RES (671)..(671): Selenocysteine
  MOD_RES (691)..(691): Selenocysteine
  MOD_RES (703)..(703): Selenocysteine
  MOD_RES (736)..(736): Selenocysteine
  MOD_RES (750)..(750): Selenocysteine
MXSPAAAQSREIDCLSPEAQKLAEARLAAKRAARAEAREIRMKELERQQKEVEERPEKDFXEKGSRNMPGLSAAXLASLGGXSSRRGSGDXSISIDXEASIREIKDSLAEVEEKYKKAMVSNAQLDNEKXNFMYQVDXLKDMLLELEEQLAESRRQYEEKNKEFEREKHAHSILQFQFAEVKEALKQREEMLEKHGIILNSEIAXNGEXSDXLNNVGYQGPXKMXKEELNALKSXGDGXLGRASEVEVKNEIVANVGKREILHNXEKEQHXEDXVKDCVDIEVFPAGENXEDQKSSEDXAPFLGXLAGAXYEEQVQSQILESSSLPENXVQVESNEVMGAPDDRXRXPLEPSNCWSDLDGGNHXENVGEAAVXQVEEQAGXVASCPLGHSDDXVYHDDKCMVEVPQELEXSXGHSLEKEFXNQEAAEPKEVPAHSXEVGRDHNEEEGEEXGLRDEKPIKXEVPGSPAGXEGNCQEAXGPSXVDXQNEPLDMKEPDEEKSDQQGEALDSSQKKXKNKKKKNKKKKSPVPVEXLKDVKKELXYQNXDLSEIKEEEQVKSXDRKSAVEAQNEVXENPKQKIAAESSENVDCPENPKIKLDGKLDQEGDDVQXAAEEVLADGDXLDFEDDXVQSSGPRAGGEELDEGVAKDNAKIDGAXQSSPAEPKSEDADRCXLPEHESPSQDISDACEAESXERCEMSEHPSQXVRKALDSNSLENDDLSAPGREPGHFNPESREDXRGGNEKGKSKEDCXMS

SEQ ID NO: 15243 - protein, 59 aa, Homo sapiens
  MOD_RES (3)..(3): Selenocysteine
  MOD_RES (11)..(11): Selenocysteine
MGXPASGRKRXPVKDRFSAEDEALSNIAREAEARLAAKRAARAEARDIRMRELERQQKE

SEQ ID NO: 15244 - protein, 68 aa, Homo sapiens
  MOD_RES (3)..(3): Selenocysteine
  MOD_RES (11)..(11): Selenocysteine
MGXPASGRKRXPVKDRFSAEDEALSNIAREAEARLAAKRAARAEARDIRMRELERQQKEEDSERARYS

SEQ ID NO: 15245 - protein, 503 aa, Homo sapiens
  MOD_RES (3)..(3): Selenocysteine
  MOD_RES (11)..(11): Selenocysteine
  MOD_RES (131)..(131): Selenocysteine
  MOD_RES (145)..(145): Selenocysteine
  MOD_RES (156)..(157): Selenocysteine
  MOD_RES (171)..(171): Selenocysteine
  MOD_RES (179)..(179): Selenocysteine
  MOD_RES (218)..(218): Selenocysteine
  MOD_RES (284)..(284): Selenocysteine
  MOD_RES (286)..(286): Selenocysteine
  MOD_RES (295)..(295): Selenocysteine
  MOD_RES (315)..(315): Selenocysteine
  MOD_RES (330)..(330): Selenocysteine
  MOD_RES (386)..(386): Selenocysteine
  MOD_RES (427)..(428): Selenocysteine
  MOD_RES (445)..(445): Selenocysteine
  MOD_RES (470)..(470): Selenocysteine
  MOD_RES (481)..(481): Selenocysteine
  MOD_RES (497)..(497): Selenocysteine
MGXPASGRKRXPVKDRFSAEDEALSNIAREAEARLAAKRAARAEARDIRMRELERQQKEEDSERARYSHRSSHHRPYLGVEDALSIRSVGSHRNHSYSHSHGMKKRSSDSHKDLLASLYNGGLYNPYGPRXLDEKSDKQYAENYXRPSSRNSASAXXPLSGNSSRRGSGDXSSLIDPDXSLSELRESLSEVEEKYKKAMVSNAQLDNEKNNLIYQVDXLKDVIEEQEEQMAEFYRENEEKSKELERQKHMCSVLQHKMEELKEGLRQRDELIEEKQRMQQKIDXMXKEVFDLQEXLLWKDKKIGKHGLVIIPDGXPNGDVSHEPVAGAIXVVSQEAAQVLESAGEGPLDVRLRKLAGEKEELLSQIRKLKLQLEEERQKCSRNDGXVGDLAGLQNGSDLQFIEMQRDANRQISEYKFKLSKAEQDIXXLEQSISRLEGQVLRYKXAAENAEKVEDELKAEKRKLQRELRXALDKIEEMEMXNSHLAKRLEKMKANRXALLAQQ

SEQ ID NO: 15246 - protein, 225 aa, Homo sapiens
  MOD_RES (3)..(3): Selenocysteine
  MOD_RES (11)..(11): Selenocysteine
  MOD_RES (73)..(73): Selenocysteine
  MOD_RES (84)..(85): Selenocysteine
  MOD_RES (99)..(99): Selenocysteine
  MOD_RES (107)..(107): Selenocysteine
  MOD_RES (170)..(170): Selenocysteine
MGXPASGRKRXPVKDRFSAEDEALSNIAREAEARLAAKRAARAEARDIRMRELERQQKELDEKSDKQYAENYXRPSSRNSASAXXPLSGNSSRRGSGDXSSLIDPDXSLSELRDIYDLKDQIQDVEGRYMQGLKELKESLSEVEEKYKKAMVSNAQLDNEKNNLIYQVDXLKDVIEEQEEQMAEFYRENEEKSKELERQKHMCSVLQHKMEELKEGLRQRDELIE

SEQ ID NO: 15247 - protein, 424 aa, Homo sapiens
  MOD_RES (3)..(3): Selenocysteine
  MOD_RES (11)..(11): Selenocysteine
  MOD_RES (73)..(73): Selenocysteine
  MOD_RES (84)..(85): Selenocysteine
  MOD_RES (99)..(99): Selenocysteine
  MOD_RES (107)..(107): Selenocysteine
  MOD_RES (170)..(170): Selenocysteine
  MOD_RES (236)..(236): Selenocysteine
  MOD_RES (251)..(251): Selenocysteine
  MOD_RES (307)..(307): Selenocysteine
  MOD_RES (348)..(349): Selenocysteine
  MOD_RES (366)..(366): Selenocysteine
  MOD_RES (391)..(391): Selenocysteine
  MOD_RES (402)..(402): Selenocysteine
  MOD_RES (418)..(418): Selenocysteine
MGXPASGRKRXPVKDRFSAEDEALSNIAREAEARLAAKRAARAEARDIRMRELERQQKELDEKSDKQYAENYXRPSSRNSASAXXPLSGNSSRRGSGDXSSLIDPDXSLSELRDIYDLKDQIQDVEGRYMQGLKELKESLSEVEEKYKKAMVSNAQLDNEKNNLIYQVDXLKDVIEEQEEQMAEFYRENEEKSKELERQKHMCSVLQHKMEELKEGLRQRDELIEKHGLVIIPDGXPNGDVSHEPVAGAIXVVSQEAAQVLESAGEGPLDVRLRKLAGEKEELLSQIRKLKLQLEEERQKCSRNDGXVGDLAGLQNGSDLQFIEMQRDANRQISEYKFKLSKAEQDIXXLEQSISRLEGQVLRYKXAAENAEKVEDELKAEKRKLQRELRXALDKIEEMEMXNSHLAKRLEKMKANRXALLAQQ

SEQ ID NO: 15248 - protein, 400 aa, Homo sapiens
  MOD_RES (3)..(3): Selenocysteine
  MOD_RES (11)..(11): Selenocysteine
  MOD_RES (73)..(73): Selenocysteine
  MOD_RES (84)..(85): Selenocysteine
  MOD_RES (99)..(99): Selenocysteine
  MOD_RES (107)..(107): Selenocysteine
  MOD_RES (146)..(146): Selenocysteine
  MOD_RES (212)..(212): Selenocysteine
  MOD_RES (227)..(227): Selenocysteine
  MOD_RES (283)..(283): Selenocysteine
  MOD_RES (324)..(325): Selenocysteine
  MOD_RES (342)..(342): Selenocysteine
  MOD_RES (367)..(367): Selenocysteine
  MOD_RES (378)..(378): Selenocysteine
  MOD_RES (394)..(394): Selenocysteine
MGXPASGRKRXPVKDRFSAEDEALSNIAREAEARLAAKRAARAEARDIRMRELERQQKELDEKSDKQYAENYXRPSSRNSASAXXPLSGNSSRRGSGDXSSLIDPDXSLSELRESLSEVEEKYKKAMVSNAQLDNEKNNLIYQVDXLKDVIEEQEEQMAEFYRENEEKSKELERQKHMCSVLQHKMEELKEGLRQRDELIEKHGLVIIPDGXPNGDVSHEPVAGAIXVVSQEAAQVLESAGEGPLDVRLRKLAGEKEELLSQIRKLKLQLEEERQKCSRNDGXVGDLAGLQNGSDLQFIEMQRDANRQISEYKFKLSKAEQDIXXLEQSISRLEGQVLRYKXAAENAEKVEDELKAEKRKLQRELRXALDKIEEMEMXNSHLAKRLEKMKANRXALLAQQ

SEQ ID NO: 15249 - protein, 721 aa, Homo sapiens
  MOD_RES (3)..(3): Selenocysteine
  MOD_RES (11)..(11): Selenocysteine
  MOD_RES (165)..(165): Selenocysteine
  MOD_RES (170)..(170): Selenocysteine
  MOD_RES (183)..(183): Selenocysteine
  MOD_RES (192)..(192): Selenocysteine
  MOD_RES (219)..(219): Selenocysteine
  MOD_RES (240)..(240): Selenocysteine
  MOD_RES (244)..(244): Selenocysteine
  MOD_RES (305)..(305): Selenocysteine
  MOD_RES (316)..(317): Selenocysteine
  MOD_RES (331)..(331): Selenocysteine
  MOD_RES (339)..(339): Selenocysteine
  MOD_RES (402)..(402): Selenocysteine
  MOD_RES (468)..(468): Selenocysteine
  MOD_RES (470)..(470): Selenocysteine
  MOD_RES (479)..(479): Selenocysteine
  MOD_RES (517)..(517): Selenocysteine
  MOD_RES (520)..(520): Selenocysteine
  MOD_RES (533)..(533): Selenocysteine
  MOD_RES (548)..(548): Selenocysteine
  MOD_RES (604)..(604): Selenocysteine
  MOD_RES (645)..(646): Selenocysteine
  MOD_RES (663)..(663): Selenocysteine
  MOD_RES (688)..(688): Selenocysteine
  MOD_RES (699)..(699): Selenocysteine
  MOD_RES (715)..(715): Selenocysteine
MGXPASGRKRXPVKDRFSAEDEALSNIAREAEARLAAKRAARAEARDIRMRELERQQKEYSLHSFDRKWGQIQKWLEDSERARYSHRSSHHRPYLGVEDALSIRSVGSHRYDMFKDRSSRLSSLNHSYSHSHGMKKRSSDSHKDLLSGLYFDQRNYSSLRHSKPXSAYYXRQSSSLYSDPLAXYKSDRASPXANSGLLRSASLASLYNGGLYNPYGPRXPSECSYYSSRISSARSSPGFXNDDXASIVSSDRASRGRRESVVSAADYFSRSNRRGSVVSEVDDISIPDLSSLDEKSDKQYAENYXRPSSRNSASAXXPLSGNSSRRGSGDXSSLIDPDXSLSELRDIYDLKDQIQDVEGRYMQGLKELKESLSEVEEKYKKAMVSNAQLDNEKNNLIYQVDXLKDVIEEQEEQMAEFYRENEEKSKELERQKHMCSVLQHKMEELKEGLRQRDELIEEKQRMQQKIDXMXKEVFDLQEXLLWKDKKIGALEKQKEYIACLRNERDMLREELADLQEXVKXGEKHGLVIIPDGXPNGDVSHEPVAGAIXVVSQEAAQVLESAGEGPLDVRLRKLAGEKEELLSQIRKLKLQLEEERQKCSRNDGXVGDLAGLQNGSDLQFIEMQRDANRQISEYKFKLSKAEQDIXXLEQSISRLEGQVLRYKXAAENAEKVEDELKAEKRKLQRELRXALDKIEEMEMXNSHLAKRLEKMKANRXALLAQQ

SEQ ID NO: 15250 - protein, 182 aa, Homo sapiens
  MOD_RES (1)..(1): Any amino acid
  MOD_RES (15)..(15): Selenocysteine
  MOD_RES (99)..(99): Selenocysteine
  MOD_RES (102)..(102): Selenocysteine
  MOD_RES (115)..(115): Selenocysteine
  MOD_RES (130)..(130): Selenocysteine
XLDNEKNNLIYQVDXLKDVIEEQEEQMAEFYRENEEKSKELERQKHMCSVLQHKMEELKEGLRQRDELIEALEKQKEYIACLRNERDMLREELADLQEXVKXGEKHGLVIIPDGXPNGDVSHEPVAGAIXVVSQEAAQVLESAGEGPLDVRLRKLAGEKEELLSQIRKLKLQLEEERQKCSR

SEQ ID NO: 15251 - protein, 32 aa, Homo sapiens
  MOD_RES (30)..(30): Selenocysteine
MAGMSQRPPSMYWCVGPEESAVCPERAMEXLN

SEQ ID NO: 15252 - protein, 650 aa, Homo sapiens
  MOD_RES (30)..(30): Selenocysteine
  MOD_RES (37)..(37): Selenocysteine
  MOD_RES (43)..(43): Selenocysteine
  MOD_RES (55)..(55): Selenocysteine
  MOD_RES (116)..(116): Selenocysteine
  MOD_RES (119)..(119): Selenocysteine
  MOD_RES (133)..(133): Selenocysteine
  MOD_RES (175)..(175): Selenocysteine
  MOD_RES (254)..(254): Selenocysteine
  MOD_RES (281)..(281): Selenocysteine
  MOD_RES (292)..(292): Selenocysteine
  MOD_RES (358)..(358): Selenocysteine
  MOD_RES (374)..(374): Selenocysteine
  MOD_RES (393)..(393): Selenocysteine
  MOD_RES (495)..(495): Selenocysteine
  MOD_RES (501)..(501): Selenocysteine
  MOD_RES (518)..(518): Selenocysteine
  MOD_RES (525)..(526): Selenocysteine
  MOD_RES (534)..(534): Selenocysteine
  MOD_RES (562)..(562): Selenocysteine
  MOD_RES (602)..(602): Selenocysteine
  MOD_RES (606)..(606): Selenocysteine
MAGMSQRPPSMYWCVGPEESAVCPERAMEXLNGAGDXGGKPSXRGGDPAARSRRXEGIRAAYRRGDRGGARDLLEEACDQCASQLEKGQLLSIPAAYGDLEMVRYLLSKRLVELPXEPXDDNPAVVAAYFGHXAVVQELLESLPGPCSPQRLLNWMLALACQRGHLGVVKLLVLXHGADPESYAVRKNEFPVIVRLPLYAAIKSGNEDIAIFLLRHGAYFCSYILLDSPDPSKHLLRKYFIEASPLPSSYPGKXALRVKWSHLRLPWVDLDWLIDISCQIXELDLSANCLAXLPSVIPWGLINLRKLNLSDNHLGELPGVQSSDEIICSRLLEIDISSNKLSHLPPGFLHLSKLQKLXASKNCLEKLFEEENAXNWIGLRKLQELDISDNKLXELPALFLHSFKSLNSLNVSRNNLKVFPDPWACPLKCCKASRNALECLPDKMAVFWKNHLKDVDFSENALKEVPLGLFQLDALMFLRLQGNQLAALPPQEKWXCRQLKXLDLSRNQLGKNEDGLKXKRIAFFXXRGRQRSGXEAASVLEFPAFLSESLEVLCLNDNHLDXVPPSVCLLKSLSELYLGNNPGLRELPPELGQLGNLWQLDXEDLXISNVPAEIQKEGPKAMLSYLRAQLRKAEKCKLMKMIIVGPPRQG

SEQ ID NO: 15253 - protein, 689 aa, Homo sapiens
  MOD_RES (30)..(30): Selenocysteine
  MOD_RES (37)..(37): Selenocysteine
  MOD_RES (43)..(43): Selenocysteine
  MOD_RES (55)..(55): Selenocysteine
  MOD_RES (116)..(116): Selenocysteine
  MOD_RES (119)..(119): Selenocysteine
  MOD_RES (133)..(133): Selenocysteine
  MOD_RES (175)..(175): Selenocysteine
  MOD_RES (254)..(254): Selenocysteine
  MOD_RES (281)..(281): Selenocysteine
  MOD_RES (292)..(292): Selenocysteine
  MOD_RES (358)..(358): Selenocysteine
  MOD_RES (374)..(374): Selenocysteine
  MOD_RES (393)..(393): Selenocysteine
  MOD_RES (495)..(495): Selenocysteine
  MOD_RES (501)..(501): Selenocysteine
  MOD_RES (518)..(518): Selenocysteine
  MOD_RES (525)..(526): Selenocysteine
  MOD_RES (534)..(534): Selenocysteine
  MOD_RES (562)..(562): Selenocysteine
  MOD_RES (602)..(602): Selenocysteine
  MOD_RES (606)..(606): Selenocysteine
  MOD_RES (653)..(653): Selenocysteine
  MOD_RES (660)..(660): Selenocysteine
  MOD_RES (672)..(672): Selenocysteine
  MOD_RES (675)..(676): Selenocysteine
MAGMSQRPPSMYWCVGPEESAVCPERAMEXLNGAGDXGGKPSXRGGDPAARSRRXEGIRAAYRRGDRGGARDLLEEACDQCASQLEKGQLLSIPAAYGDLEMVRYLLSKRLVELPXEPXDDNPAVVAAYFGHXAVVQELLESLPGPCSPQRLLNWMLALACQRGHLGVVKLLVLXHGADPESYAVRKNEFPVIVRLPLYAAIKSGNEDIAIFLLRHGAYFCSYILLDSPDPSKHLLRKYFIEASPLPSSYPGKXALRVKWSHLRLPWVDLDWLIDISCQIXELDLSANCLAXLPSVIPWGLINLRKLNLSDNHLGELPGVQSSDEIICSRLLEIDISSNKLSHLPPGFLHLSKLQKLXASKNCLEKLFEEENAXNWIGLRKLQELDISDNKLXELPALFLHSFKSLNSLNVSRNNLKVFPDPWACPLKCCKASRNALECLPDKMAVFWKNHLKDVDFSENALKEVPLGLFQLDALMFLRLQGNQLAALPPQEKWXCRQLKXLDLSRNQLGKNEDGLKXKRIAFFXXRGRQRSGXEAASVLEFPAFLSESLEVLCLNDNHLDXVPPSVCLLKSLSELYLGNNPGLRELPPELGQLGNLWQLDXEDLXISNVPAEIQKEGPKAMLSYLRAQLRKAEKCKLMKMIIVGPPRQGKSXLLEILQXGRAPQVVHGEAXIRXXKWELQRPAGSRAK

SEQ ID NO: 15254 - protein, 2015 aa, Homo sapiens
  MOD_RES (30)..(30): Selenocysteine
  MOD_RES (37)..(37): Selenocysteine
  MOD_RES (43)..(43): Selenocysteine
  MOD_RES (55)..(55): Selenocysteine
  MOD_RES (116)..(116): Selenocysteine
  MOD_RES (119)..(119): Selenocysteine
  MOD_RES (133)..(133): Selenocysteine
  MOD_RES (175)..(175): Selenocysteine
  MOD_RES (254)..(254): Selenocysteine
  MOD_RES (281)..(281): Selenocysteine
  MOD_RES (292)..(292): Selenocysteine
  MOD_RES (358)..(358): Selenocysteine
  MOD_RES (374)..(374): Selenocysteine
  MOD_RES (393)..(393): Selenocysteine
  MOD_RES (495)..(495): Selenocysteine
  MOD_RES (501)..(501): Selenocysteine
  MOD_RES (518)..(518): Selenocysteine
  MOD_RES (525)..(526): Selenocysteine
  MOD_RES (534)..(534): Selenocysteine
  MOD_RES (562)..(562): Selenocysteine
  MOD_RES (602)..(602): Selenocysteine
  MOD_RES (606)..(606): Selenocysteine
  MOD_RES (653)..(653): Selenocysteine
  MOD_RES (660)..(660): Selenocysteine
  MOD_RES (672)..(672): Selenocysteine
  MOD_RES (675)..(676): Selenocysteine
  MOD_RES (708)..(708): Selenocysteine
  MOD_RES (715)..(715): Selenocysteine
  MOD_RES (757)..(757): Selenocysteine
  MOD_RES (773)..(773): Selenocysteine
  MOD_RES (791)..(791): Selenocysteine
  MOD_RES (797)..(797): Selenocysteine
  MOD_RES (823)..(823): Selenocysteine
  MOD_RES (832)..(832): Selenocysteine
  MOD_RES (871)..(871): Selenocysteine
  MOD_RES (882)..(882): Selenocysteine
  MOD_RES (903)..(903): Selenocysteine
  MOD_RES (905)..(905): Selenocysteine
  MOD_RES (912)..(912): Selenocysteine
  MOD_RES (961)..(961): Selenocysteine
  MOD_RES (964)..(964): Selenocysteine
  MOD_RES (967)..(967): Selenocysteine
  MOD_RES (1003)..(1003): Selenocysteine
  MOD_RES (1010)..(1010): Selenocysteine
  MOD_RES (1013)..(1013): Selenocysteine
  MOD_RES (1053)..(1053): Selenocysteine
  MOD_RES (1061)..(1061): Selenocysteine
  MOD_RES (1066)..(1066): Selenocysteine
  MOD_RES (1075)..(1075): Selenocysteine
  MOD_RES (1083)..(1083): Selenocysteine
  MOD_RES (1093)..(1093): Selenocysteine
  MOD_RES (1134)..(1134): Selenocysteine
  MOD_RES (1149)..(1149): Selenocysteine
  MOD_RES (1151)..(1151): Selenocysteine
  MOD_RES (1156)..(1156): Selenocysteine
  MOD_RES (1170)..(1170): Selenocysteine
  MOD_RES (1176)..(1176): Selenocysteine
  MOD_RES (1196)..(1196): Selenocysteine
  MOD_RES (1225)..(1225): Selenocysteine
  MOD_RES (1255)..(1255): Selenocysteine
  MOD_RES (1287)..(1287): Selenocysteine
  MOD_RES (1295)..(1295): Selenocysteine
  MOD_RES (1344)..(1344): Selenocysteine
  MOD_RES (1363)..(1363): Selenocysteine
  MOD_RES (1427)..(1427): Selenocysteine
  MOD_RES (1505)..(1505): Selenocysteine
  MOD_RES (1524)..(1524): Selenocysteine
  MOD_RES (1527)..(1527): Selenocysteine
  MOD_RES (1538)..(1538): Selenocysteine
  MOD_RES (1549)..(1549): Selenocysteine
  MOD_RES (1563)..(1563): Selenocysteine
  MOD_RES (1567)..(1567): Selenocysteine
  MOD_RES (1596)..(1596): Selenocysteine
  MOD_RES (1598)..(1598): Selenocysteine
  MOD_RES (1607)..(1607): Selenocysteine
  MOD_RES (1616)..(1616): Selenocysteine
  MOD_RES (1623)..(1623): Selenocysteine
  MOD_RES (1628)..(1628): Selenocysteine
  MOD_RES (1661)..(1661): Selenocysteine
  MOD_RES (1673)..(1673): Selenocysteine
  MOD_RES (1737)..(1737): Selenocysteine
  MOD_RES (1767)..(1768): Selenocysteine
  MOD_RES (1794)..(1794): Selenocysteine
  MOD_RES (1802)..(1802): Selenocysteine
  MOD_RES (1826)..(1826): Selenocysteine
  MOD_RES (1836)..(1836): Selenocysteine
  MOD_RES (1873)..(1873): Selenocysteine
  MOD_RES (1883)..(1883): Selenocysteine
  MOD_RES (1896)..(1896): Selenocysteine
  MOD_RES (1902)..(1902): Selenocysteine
  MOD_RES (1954)..(1954): Selenocysteine
  MOD_RES (1969)..(1969): Selenocysteine
  MOD_RES (1973)..(1973): Selenocysteine
  MOD_RES (1979)..(1979): Selenocysteine
  MOD_RES (2011)..(2011): Selenocysteine
MAGMSQRPPSMYWCVGPEESAVCPERAMEXLNGAGDXGGKPSXRGGDPAARSRRXEGIRAAYRRGDRGGARDLLEEACDQCASQLEKGQLLSIPAAYGDLEMVRYLLSKRLVELPXEPXDDNPAVVAAYFGHXAVVQELLESLPGPCSPQRLLNWMLALACQRGHLGVVKLLVLXHGADPESYAVRKNEFPVIVRLPLYAAIKSGNEDIAIFLLRHGAYFCSYILLDSPDPSKHLLRKYFIEASPLPSSYPGKXALRVKWSHLRLPWVDLDWLIDISCQIXELDLSANCLAXLPSVIPWGLINLRKLNLSDNHLGELPGVQSSDEIICSRLLEIDISSNKLSHLPPGFLHLSKLQKLXASKNCLEKLFEEENAXNWIGLRKLQELDISDNKLXELPALFLHSFKSLNSLNVSRNNLKVFPDPWACPLKCCKASRNALECLPDKMAVFWKNHLKDVDFSENALKEVPLGLFQLDALMFLRLQGNQLAALPPQEKWXCRQLKXLDLSRNQLGKNEDGLKXKRIAFFXXRGRQRSGXEAASVLEFPAFLSESLEVLCLNDNHLDXVPPSVCLLKSLSELYLGNNPGLRELPPELGQLGNLWQLDXEDLXISNVPAEIQKEGPKAMLSYLRAQLRKAEKCKLMKMIIVGPPRQGKSXLLEILQXGRAPQVVHGEAXIRXXKWELQRPAGSRAKVESVEFNVWDIGGPASMAXVNQCFFXDKALYVVVWNLALGEEAVANLQFWLLNIEAKAPNAVVLVVGXHLDLIEAKFRVERIAXLRAYVLALCRSPSGSRAXGFPDIXFKHLHEISCKSLEGQEGLRQLIFHVXCSMKDVGSXIGCQRLAGRLIPRSYLSLQEAVLAEQQRRSRDDDVQYLXDRQLEQLVEQXPDNDIKDYEDLQSAISFLIEXGXLLHFPDXSHGLRNLYFLDPIWLSECLQRIFNIKGSRSVAKNGVIRAEDLRMLLVGXGFXQQXEEQYFQFLAKFEIALPVANDSYLLPHLLPSKPGLDXHGMRHPXANXIQRVFKMSFVPVGFWQRFIARMLISLAEMDLQLFENKKNXKSRNRKVXIYSFXGNQRNRCSXFRVKRNQXIYWQEGLLVXFDGGYLSVESSDVNWKKKKSGGMKIVCQSEVRDFSAMAFIXDHVNSLIDQWFPALXAXESDGXPLMEQYVPCPVCEXAWAQHXDPSEKSEDVQYFDMEDCVLXAIERDFISCPRHPDLPVPLQELVPELFMXDFPARLFLENSKLEHSEDEGSVLGQGGSGXVIYRARYQGQPVAVKRFHIKKFKNFANVPADXMLRHLRAXDAMKNFSEFRQEASMLHALQHPCIVALIGISIHPLCFALELAPLSSLNXVLSENARDSSFIPLGHMLXQKIAYQIASGLAYLHKKNIIFCDLKSDNILVWSLDVKEHINIKLSDYGISRQSFHEGALGVEGXPGYQAPEIRPRIVYDEKVDMFSYGMVLYELLSGQRPALGHHQLQIAKKLSKGIRPVLGQPEEVQFRRLQALMMECWDXKPEKRPLALSVVSQMKDPXFAXFMYELCCGKQXAFFSSQGQEYXVVFWDGKEESRNYXVVNXEKGLMEVQRMCCPGMKVSCQLQVQRSLWXAXEDQKIYIYXLKGMCPLNXPQQALDXPAVVXCFLAVPVIKKNSYLVLAGLADGLVAVFPVVRGXPKDSCSYLCSHXANRSKFSIADEDARQNPYPVKAMEVVNSGSEVWYSNGPGLLVIDCASLEICRRLEPYMAPSMVXSVVCSSEGRGEEVVWCLDDKANSLVMYHSXXYQLCARYFCGVPSPLRDMFPVRPLDXEPPAASHXANPKVPEGDSIADVSIMYSEELGXQILIHQESLXDYCSMSSYSSSPPRQAARSPSSLPSSPASSSSVPFSXDCEDSDMLHXPGAASDRSEHDLXPMDGEXFSQHLQAVKILAVRDLIWVPRRGGDVIVIGLEKDSGAQRGRVIAVLKARELXPHGVLVDAAVVAKDXVVCXFENENXEWCLAVWRGWGAREFDIFYQSYEELGRLEACXRKRR

SEQ ID NO: 15255 - protein, 264 aa, Homo sapiens
  MOD_RES (30)..(30): Selenocysteine
  MOD_RES (37)..(37): Selenocysteine
  MOD_RES (43)..(43): Selenocysteine
  MOD_RES (55)..(55): Selenocysteine
  MOD_RES (116)..(116): Selenocysteine
  MOD_RES (119)..(119): Selenocysteine
  MOD_RES (133)..(133): Selenocysteine
  MOD_RES (175)..(175): Selenocysteine
  MOD_RES (254)..(254): Selenocysteine
MAGMSQRPPSMYWCVGPEESAVCPERAMEXLNGAGDXGGKPSXRGGDPAARSRRXEGIRAAYRRGDRGGARDLLEEACDQCASQLEKGQLLSIPAAYGDLEMVRYLLSKRLVELPXEPXDDNPAVVAAYFGHXAVVQELLESLPGPCSPQRLLNWMLALACQRGHLGVVKLLVLXHGADPESYAVRKNEFPVIVRLPLYAAIKSGNEDIAIFLLRHGAYFCSYILLDSPDPSKHLLRKYFIEASPLPSSYPGKXVSSHCLWSVF

SEQ ID NO: 15256 - protein, 660 aa, Homo sapiens
  MOD_RES (1)..(1): Any amino acid
  MOD_RES (21)..(21): Selenocysteine
  MOD_RES (40)..(40): Selenocysteine
  MOD_RES (104)..(104): Selenocysteine
  MOD_RES (182)..(182): Selenocysteine
  MOD_RES (201)..(201): Selenocysteine
  MOD_RES (204)..(204): Selenocysteine
  MOD_RES (215)..(215): Selenocysteine
  MOD_RES (226)..(226): Selenocysteine
  MOD_RES (240)..(240): Selenocysteine
  MOD_RES (244)..(244): Selenocysteine
  MOD_RES (273)..(273): Selenocysteine
  MOD_RES (275)..(275): Selenocysteine
  MOD_RES (284)..(284): Selenocysteine
  MOD_RES (293)..(293): Selenocysteine
  MOD_RES (300)..(300): Selenocysteine
  MOD_RES (305)..(305): Selenocysteine
  MOD_RES (338)..(338): Selenocysteine
  MOD_RES (350)..(350): Selenocysteine
  MOD_RES (414)..(414): Selenocysteine
  MOD_RES (444)..(445): Selenocysteine
  MOD_RES (471)..(471): Selenocysteine
  MOD_RES (479)..(479): Selenocysteine
  MOD_RES (503)..(503): Selenocysteine
  MOD_RES (513)..(513): Selenocysteine
  MOD_RES (550)..(550): Selenocysteine
  MOD_RES (560)..(560): Selenocysteine
  MOD_RES (573)..(573): Selenocysteine
  MOD_RES (579)..(579): Selenocysteine
  MOD_RES (631)..(631): Selenocysteine
XISIHPLCFALELAPLSSLNXVLSENARDSSFIPLGHMLXQKIAYQIASGLAYLHKKNIIFCDLKSDNILVWSLDVKEHINIKLSDYGISRQSFHEGALGVEGXPGYQAPEIRPRIVYDEKVDMFSYGMVLYELLSGQRPALGHHQLQIAKKLSKGIRPVLGQPEEVQFRRLQALMMECWDXKPEKRPLALSVVSQMKDPXFAXFMYELCCGKQXAFFSSQGQEYXVVFWDGKEESRNYXVVNXEKGLMEVQRMCCPGMKVSCQLQVQRSLWXAXEDQKIYIYXLKGMCPLNXPQQALDXPAVVXCFLAVPVIKKNSYLVLAGLADGLVAVFPVVRGXPKDSCSYLCSHXANRSKFSIADEDARQNPYPVKAMEVVNSGSEVWYSNGPGLLVIDCASLEICRRLEPYMAPSMVXSVVCSSEGRGEEVVWCLDDKANSLVMYHSXXYQLCARYFCGVPSPLRDMFPVRPLDXEPPAASHXANPKVPEGDSIADVSIMYSEELGXQILIHQESLXDYCSMSSYSSSPPRQAARSPSSLPSSPASSSSVPFSXDCEDSDMLHXPGAASDRSEHDLXPMDGEXFSQHLQAVKILAVRDLIWVPRRGGDVIVIGLEKDSGAQRGRVIAVLKARELXPHGIMPVSSVKVCWAGWPVRDMVYMVAVM

SEQ ID NO: 15257 - protein, 1271 aa, Homo sapiens
  MOD_RES (15)..(15): Selenocysteine
  MOD_RES (34)..(34): Selenocysteine
  MOD_RES (46)..(46): Selenocysteine
  MOD_RES (95)..(95): Selenocysteine
  MOD_RES (123)..(123): Selenocysteine
  MOD_RES (138)..(138): Selenocysteine
  MOD_RES (144)..(144): Selenocysteine
  MOD_RES (149)..(149): Selenocysteine
  MOD_RES (197)..(197): Selenocysteine
  MOD_RES (213)..(213): Selenocysteine
  MOD_RES (278)..(278): Selenocysteine
  MOD_RES (320)..(320): Selenocysteine
  MOD_RES (322)..(322): Selenocysteine
  MOD_RES (358)..(358): Selenocysteine
  MOD_RES (424)..(424): Selenocysteine
  MOD_RES (475)..(475): Selenocysteine
  MOD_RES (489)..(489): Selenocysteine
  MOD_RES (496)..(496): Selenocysteine
  MOD_RES (524)..(524): Selenocysteine
  MOD_RES (592)..(592): Selenocysteine
  MOD_RES (615)..(615): Selenocysteine
  MOD_RES (623)..(623): Selenocysteine
  MOD_RES (646)..(646): Selenocysteine
  MOD_RES (651)..(651): Selenocysteine
  MOD_RES (776)..(776): Selenocysteine
  MOD_RES (826)..(826): Selenocysteine
  MOD_RES (833)..(833): Selenocysteine
  MOD_RES (838)..(838): Selenocysteine
  MOD_RES (856)..(856): Selenocysteine
  MOD_RES (876)..(876): Selenocysteine
  MOD_RES (985)..(985): Selenocysteine
  MOD_RES (1024)..(1024): Selenocysteine
  MOD_RES (1033)..(1033): Selenocysteine
  MOD_RES (1038)..(1038): Selenocysteine
  MOD_RES (1048)..(1048): Selenocysteine
  MOD_RES (1079)..(1079): Selenocysteine
  MOD_RES (1084)..(1084): Selenocysteine
  MOD_RES (1103)..(1103): Selenocysteine
  MOD_RES (1176)..(1176): Selenocysteine
  MOD_RES (1270)..(1270): Selenocysteine
MASGSCQGCEEDEEXLKKLIVRLNNVQEGKQIEXLVQILEDLLVFXYSERASKLFQGKNIHVPLLIVLDSYMRVASVQQVGWSLLCKLIEVCPGXMQSLMGPQDVGNDWEVLGVHQLILKMLXVHNASVNLSVIGLKXLDLLLXSGKIXLLILDEESDIFMLIFDAMHSFPANDEVQKLGCKALHVLFERVSEEQLXEFVENKDYMILLSALXNFKDEEEIVLHVLHCLHSLAIPCNNVEVLMSGNVRCYNIVVEAMKAFPMSERIQEVSCCLLHRLXLGNFFNILVLNEVHEFVVKAVQQYPENAALQISALSCLALLXEXIFLNQDLEEKNENQENDDEGEEDKLFWLEACYKALXWHRKNKHVQEAACWALNNLLMYQNSLHEKIGDEDGHFPAHREVMLSMLMHSSSKEVFQASANALSXLLEQNVNFRKILLSKGIHLNVLELMQKHIHSPEVAESGCKMLNHLFEGSNXSLDIMAAVVPKILXVMKRHEXSLPVQLEALRAILHFIVPGMPEESREDXEFHHKLNMVKKQCFKNDIHKLVLAALNRFIGNPGIQKCGLKVISSIVHFPDALEMLSLEGAMDSVLHXLQMYPDDQEIQCLGLSLIGYLIXKKNVFIGXGHLLAKILVSSLYRFKDVAEIQXKGFQXILAILKLSASFSKLLVHHSFDLVIFHQMSSNIMEQKDQQFLNLCCKCFAKVAMDDYLKNVMLERACDQNNSIMVECLLLLGADANQAKEGSSLICQVCEKESSPKLVELLLNSGSREQDVRKALXISIGKGDSQIISLLLRRLALDVANNSICLGGFCIGKVEPSWLGPLFPDKXSNLRKQXNIASXLARMVIRYQMKSAVEEGXASGSDGNFSEDVLSKFDEWXFIPDSSMDSVFAQSDDLDSEGSEGSFLVKKKSNSISVGEFYRDAVLQRCSPNLQRHSNSLGPIFDHEDLLKRKRKILSSDDSLRSSKLQSHMRHSDSISSLASEREYIXSLDLSANELRDIDALSQKCCISVHLEHLEKLELHQNALXSFPQQLCEXLKSLXHLDLHSNKFXSFPSYLLKMSCIANLDVSRNDIGPSVVLDPXVKCPXLKQFNLSYNQLSFVPENLXDVVEKLEQLILEGNKISGICSPLRLKELKILNLSKNHISSLSENFLEACPKVESFSARMNFLAAMPFLPPSMXILKLSQNKFSCIPEAILNLPHLRSLDMSSNDIQYLPGPAHWKSLNLRELLFSHNQISILDLSEKAYLWSRVEKLHLSHNKLKEVRRLLPLKKYXL

SEQ ID NO: 15258 - protein, 2527 aa, Homo sapiens
  MOD_RES (15)..(15): Selenocysteine
  MOD_RES (34)..(34): Selenocysteine
  MOD_RES (46)..(46): Selenocysteine
  MOD_RES (95)..(95): Selenocysteine
  MOD_RES (123)..(123): Selenocysteine
  MOD_RES (138)..(138): Selenocysteine
  MOD_RES (144)..(144): Selenocysteine
  MOD_RES (149)..(149): Selenocysteine
  MOD_RES (197)..(197): Selenocysteine
  MOD_RES (213)..(213): Selenocysteine
  MOD_RES (278)..(278): Selenocysteine
  MOD_RES (320)..(320): Selenocysteine
  MOD_RES (322)..(322): Selenocysteine
  MOD_RES (358)..(358): Selenocysteine
  MOD_RES (424)..(424): Selenocysteine
  MOD_RES (475)..(475): Selenocysteine
  MOD_RES (489)..(489): Selenocysteine
  MOD_RES (496)..(496): Selenocysteine
  MOD_RES (524)..(524): Selenocysteine
  MOD_RES (592)..(592): Selenocysteine
  MOD_RES (615)..(615): Selenocysteine
  MOD_RES (623)..(623): Selenocysteine
  MOD_RES (646)..(646): Selenocysteine
  MOD_RES (651)..(651): Selenocysteine
  MOD_RES (776)..(776): Selenocysteine
  MOD_RES (826)..(826): Selenocysteine
  MOD_RES (833)..(833): Selenocysteine
  MOD_RES (838)..(838): Selenocysteine
  MOD_RES (856)..(856): Selenocysteine
  MOD_RES (876)..(876): Selenocysteine
  MOD_RES (985)..(985): Selenocysteine
  MOD_RES (1024)..(1024): Selenocysteine
  MOD_RES (1033)..(1033): Selenocysteine
  MOD_RES (1038)..(1038): Selenocysteine
  MOD_RES (1048)..(1048): Selenocysteine
  MOD_RES (1079)..(1079): Selenocysteine
  MOD_RES (1084)..(1084): Selenocysteine
  MOD_RES (1103)..(1103): Selenocysteine
  MOD_RES (1176)..(1176): Selenocysteine
  MOD_RES (1271)..(1271): Selenocysteine
  MOD_RES (1343)..(1343): Selenocysteine
  MOD_RES (1348)..(1349): Selenocysteine
  MOD_RES (1357)..(1357): Selenocysteine
  MOD_RES (1368)..(1368): Selenocysteine
  MOD_RES (1404)..(1404): Selenocysteine
  MOD_RES (1410)..(1410): Selenocysteine
  MOD_RES (1452)..(1452): Selenocysteine
  MOD_RES (1470)..(1470): Selenocysteine
  MOD_RES (1491)..(1491): Selenocysteine
  MOD_RES (1503)..(1503): Selenocysteine
  MOD_RES (1612)..(1612): Selenocysteine
  MOD_RES (1766)..(1766): Selenocysteine
  MOD_RES (1806)..(1806): Selenocysteine
  MOD_RES (1849)..(1849): Selenocysteine
  MOD_RES (1912)..(1912): Selenocysteine
  MOD_RES (1967)..(1967): Selenocysteine
  MOD_RES (1969)..(1969): Selenocysteine
  MOD_RES (2004)..(2004): Selenocysteine
  MOD_RES (2031)..(2031): Selenocysteine
  MOD_RES (2035)..(2035): Selenocysteine
  MOD_RES (2068)..(2069): Selenocysteine
  MOD_RES (2124)..(2124): Selenocysteine
  MOD_RES (2141)..(2141): Selenocysteine
  MOD_RES (2158)..(2158): Selenocysteine
  MOD_RES (2174)..(2174): Selenocysteine
  MOD_RES (2186)..(2186): Selenocysteine
  MOD_RES (2190)..(2190): Selenocysteine
  MOD_RES (2219)..(2219): Selenocysteine
  MOD_RES (2223)..(2223): Selenocysteine
  MOD_RES (2229)..(2229): Selenocysteine
  MOD_RES (2237)..(2237): Selenocysteine
  MOD_RES (2242)..(2242): Selenocysteine
  MOD_RES (2246)..(2246): Selenocysteine
  MOD_RES (2267)..(2267): Selenocysteine
  MOD_RES (2279)..(2279): Selenocysteine
  MOD_RES (2298)..(2298): Selenocysteine
  MOD_RES (2307)..(2307): Selenocysteine
  MOD_RES (2310)..(2310): Selenocysteine
  MOD_RES (2321)..(2321): Selenocysteine
  MOD_RES (2331)..(2331): Selenocysteine
  MOD_RES (2338)..(2338): Selenocysteine
  MOD_RES (2340)..(2340): Selenocysteine
  MOD_RES (2356)..(2356): Selenocysteine
  MOD_RES (2361)..(2361): Selenocysteine
  MOD_RES (2380)..(2380): Selenocysteine
  MOD_RES (2416)..(2416): Selenocysteine
  MOD_RES (2423)..(2423): Selenocysteine
  MOD_RES (2429)..(2429): Selenocysteine
  MOD_RES (2441)..(2441): Selenocysteine
  MOD_RES (2460)..(2460): Selenocysteine
  MOD_RES (2480)..(2480): Selenocysteine
  MOD_RES (2483)..(2483): Selenocysteine
  MOD_RES (2494)..(2494): Selenocysteine
  MOD_RES (2524)..(2524): Selenocysteine
MASGSCQGCEEDEEXLKKLIVRLNNVQEGKQIEXLVQILEDLLVFXYSERASKLFQGKNIHVPLLIVLDSYMRVASVQQVGWSLLCKLIEVCPGXMQSLMGPQDVGNDWEVLGVHQLILKMLXVHNASVNLSVIGLKXLDLLLXSGKIXLLILDEESDIFMLIFDAMHSFPANDEVQKLGCKALHVLFERVSEEQLXEFVENKDYMILLSALXNFKDEEEIVLHVLHCLHSLAIPCNNVEVLMSGNVRCYNIVVEAMKAFPMSERIQEVSCCLLHRLXLGNFFNILVLNEVHEFVVKAVQQYPENAALQISALSCLALLXEXIFLNQDLEEKNENQENDDEGEEDKLFWLEACYKALXWHRKNKHVQEAACWALNNLLMYQNSLHEKIGDEDGHFPAHREVMLSMLMHSSSKEVFQASANALSXLLEQNVNFRKILLSKGIHLNVLELMQKHIHSPEVAESGCKMLNHLFEGSNXSLDIMAAVVPKILXVMKRHEXSLPVQLEALRAILHFIVPGMPEESREDXEFHHKLNMVKKQCFKNDIHKLVLAALNRFIGNPGIQKCGLKVISSIVHFPDALEMLSLEGAMDSVLHXLQMYPDDQEIQCLGLSLIGYLIXKKNVFIGXGHLLAKILVSSLYRFKDVAEIQXKGFQXILAILKLSASFSKLLVHHSFDLVIFHQMSSNIMEQKDQQFLNLCCKCFAKVAMDDYLKNVMLERACDQNNSIMVECLLLLGADANQAKEGSSLICQVCEKESSPKLVELLLNSGSREQDVRKALXISIGKGDSQIISLLLRRLALDVANNSICLGGFCIGKVEPSWLGPLFPDKXSNLRKQXNIASXLARMVIRYQMKSAVEEGXASGSDGNFSEDVLSKFDEWXFIPDSSMDSVFAQSDDLDSEGSEGSFLVKKKSNSISVGEFYRDAVLQRCSPNLQRHSNSLGPIFDHEDLLKRKRKILSSDDSLRSSKLQSHMRHSDSISSLASEREYIXSLDLSANELRDIDALSQKCCISVHLEHLEKLELHQNALXSFPQQLCEXLKSLXHLDLHSNKFXSFPSYLLKMSCIANLDVSRNDIGPSVVLDPXVKCPXLKQFNLSYNQLSFVPENLXDVVEKLEQLILEGNKISGICSPLRLKELKILNLSKNHISSLSENFLEACPKVESFSARMNFLAAMPFLPPSMXILKLSQNKFSCIPEAILNLPHLRSLDMSSNDIQYLPGPAHWKSLNLRELLFSHNQISILDLSEKAYLWSRVEKLHLSHNKLKEIPPEIGCLENLXSLDVSYNLELRSFPNEMGKLSKIWDLPLDELHLNFDFKHIGCKAKDIIRFLQQRLKKAVPYNRMKLMIVGNXGSGKXXLLQQLMKXKKSDLGMQSAXVGIDVKDWPIQIRDKRKRDLVLNVWDFAGREEFYSXHPHFMXQRALYLAVYDLSKGQAEVDAMKPWLFNIKARASSSPVILVGXHLDVSDEKQRKACMSKIXKELLNKRGFPAIRDYHFVNAXEESDALAKLRKXIINESLNFKIRDQLVVGQLIPDCYVELEKIILSERKNVPIEFPVIDRKRLLQLVRENQLQLDENELPHAVHFLNESGVLLHFQDPALQLSDLYFVEPKWLCKIMAQILXVKVEGCPKHPKGIISRRDVEKFLSKKRKFPKNYMSQYFKLLEKFQIALPIGEEYLLVPSSLSDHRPVIELPHCENSEIIIRLYEMPYFPMGFWSRLINRLLEISPYMLSGRERALRPNRMYWRQGIYLNWSPEAYCLVGSEVLDNHPESFLKIXVPSCRKGCILLGQVVDHIDSLMEEWFPGLLEIDICGEGEXLLKKWALYSFNDGEEHQKILLDDLMKKAEEGDLLVNPDQPRLXIPISQIAPDLILADLPRNIMLNNDELEFEQAPEFLLGDGSFGSVYRAAYEGEEVAVKIFNKHXSLRLLRQELVVLCHLHHPSLISLLAAGIRPRMLVMELASKGSLDRLLQQDKASLXRXLQHRIALHVADGLRYLHSAMIIYRDLKPHNVLLFXLYPNAAIIAKIADYGIAQYCCRMGIKXSEGXPGFRAPEVARGNVIYNQQADVYSFGLLLYDILXXGGRIVEGLKFPNEFDELEIQGKLPDPVKEYGCAPWPMVEKLIKQCLKENPQERPXSAQVFDILNSAELVCLXRRILLPKNVIVECMVAXHHNSRNASIWLGCGHXDRGQLSFLDLNXEGYXSEEVADSRILCLALVHLPVEKESWIVSGXQSGXLLVINXEDGKKRHXLEKMXDSVXCLYCNSFSKQSKQKNFLLVGXADGKLAIFEDKXVKLKGAAPLKILNIGNVSXPLMCLSESXNSXERNVMWGGCGXKIFSFSNDFXIQKLIEXRXSQLFSYAAFSDSNIIXVVVDXALYIAKQNSPVVEVWDKKXEKLCGLIDCVHFLREVMVKENKESKHKMSYSGRVKXLCLQKNXALWIGXGGGHILLLDLSXRRLIRVIYNFCNSVRVMMXAQLGSLKNVMLVLGYNRKNXEGXQKQKEIQSCLXVWDINLPHEVQNLEKHIEVRKELAEKMRRXSVE

SEQ ID NO: 15259 - protein, 521 aa, Homo sapiens
  MOD_RES (24)..(24): Selenocysteine
  MOD_RES (52)..(52): Selenocysteine
  MOD_RES (67)..(67): Selenocysteine
  MOD_RES (73)..(73): Selenocysteine
  MOD_RES (78)..(78): Selenocysteine
  MOD_RES (162)..(162): Selenocysteine
  MOD_RES (219)..(219): Selenocysteine
  MOD_RES (223)..(223): Selenocysteine
  MOD_RES (237)..(237): Selenocysteine
  MOD_RES (244)..(244): Selenocysteine
  MOD_RES (272)..(272): Selenocysteine
  MOD_RES (340)..(340): Selenocysteine
  MOD_RES (363)..(363): Selenocysteine
  MOD_RES (371)..(371): Selenocysteine
  MOD_RES (394)..(394): Selenocysteine
  MOD_RES (399)..(399): Selenocysteine
MRVASVQQVGWSLLCKLIEVCPGXMQSLMGPQDVGNDWEVLGVHQLILKMLXVHNASVNLSVIGLKXLDLLLXSGKIXLLILDEESDIFMLIFDAMHSFPANDEVQKLGCKALHVLFERGNNVEVLMSGNVRCYNIVVEAMKAFPMSERIQEVSCCLLHRLXLGNFFNILVLNEVHEFVVKAVQQYPENAALQISALSCLALLRSFPGICECIVNSLRXKCNXSLDIMAAVVPKILXVMKRHEXSLPVQLEALRAILHFIVPGMPEESREDXEFHHKLNMVKKQCFKNDIHKLVLAALNRFIGNPGIQKCGLKVISSIVHFPDALEMLSLEGAMDSVLHXLQMYPDDQEIQCLGLSLIGYLIXKKNVFIGXGHLLAKILVSSLYRFKDVAEIQXKGFQXILAILKLSASFSKLLVHHSFDLVIFHQMSSNIMEQKDQQFLNLCCKCFAKVAMDDYLKNVMLERACDQNNSIMVECLLLLGADANQAKEGSSLICQVCEKESSPKLVELLLNSGSREQDVRK

SEQ ID NO: 15260 - protein, 207 aa, Homo sapiens
  MOD_RES (1)..(1): Any amino acid
  MOD_RES (39)..(39): Selenocysteine
  MOD_RES (48)..(48): Selenocysteine
  MOD_RES (53)..(53): Selenocysteine
  MOD_RES (63)..(63): Selenocysteine
  MOD_RES (94)..(94): Selenocysteine
  MOD_RES (99)..(99): Selenocysteine
  MOD_RES (118)..(118): Selenocysteine
  MOD_RES (195)..(195): Selenocysteine
XLDLSANELRDIDALSQKCCISVHLEHLEKLELHQNALXSFPQQLCEXLKSLXHLDLHSNKFXSFPSYLLKMSCIANLDVSRNDIGPSVVLDPXVKCPXLKQFNLSYNQLSFVPENLXDVVEKLEQLILEGNKISGICSPLRLKELKILNLSKNHISSLSENFLEACPKVESFSARMNFLVSGCSVVPQGNLIQXVESGKHFCACDI

SEQ ID NO: 15261 - protein, 454 aa, Homo sapiens
  MOD_RES (1)..(1): Any amino acid
  MOD_RES (2)..(2): Selenocysteine
  MOD_RES (57)..(57): Selenocysteine
  MOD_RES (74)..(74): Selenocysteine
  MOD_RES (91)..(91): Selenocysteine
  MOD_RES (107)..(107): Selenocysteine
  MOD_RES (119)..(119): Selenocysteine
  MOD_RES (123)..(123): Selenocysteine
  MOD_RES (152)..(152): Selenocysteine
  MOD_RES (156)..(156): Selenocysteine
  MOD_RES (162)..(162): Selenocysteine
  MOD_RES (170)..(170): Selenocysteine
  MOD_RES (175)..(175): Selenocysteine
  MOD_RES (179)..(179): Selenocysteine
  MOD_RES (200)..(200): Selenocysteine
  MOD_RES (212)..(212): Selenocysteine
  MOD_RES (231)..(231): Selenocysteine
  MOD_RES (240)..(240): Selenocysteine
  MOD_RES (243)..(243): Selenocysteine
  MOD_RES (254)..(254): Selenocysteine
  MOD_RES (264)..(264): Selenocysteine
  MOD_RES (271)..(271): Selenocysteine
  MOD_RES (273)..(273): Selenocysteine
  MOD_RES (289)..(289): Selenocysteine
  MOD_RES (294)..(294): Selenocysteine
  MOD_RES (313)..(313): Selenocysteine
  MOD_RES (349)..(349): Selenocysteine
  MOD_RES (356)..(356): Selenocysteine
  MOD_RES (362)..(362): Selenocysteine
  MOD_RES (374)..(374): Selenocysteine
  MOD_RES (393)..(393): Selenocysteine
  MOD_RES (413)..(413): Selenocysteine
  MOD_RES (421)..(421): Selenocysteine
  MOD_RES (451)..(451): Selenocysteine
XXGGRIVEGLKFPNEFDELEIQGKLPDPVKEYGCAPWPMVEKLIKQCLKENPQERPXSAQVFDILNSAELVCLXRRILLPKNVIVECMVAXHHNSRNASIWLGCGHXDRGQLSFLDLNXEGYXSEEVADSRILCLALVHLPVEKESWIVSGXQSGXLLVINXEDGKKRHXLEKMXDSVXCLYCNSFSKQSKQKNFLLVGXADGKLAIFEDKXVKLKGAAPLKILNIGNVSXPLMCLSESXNSXERNVMWGGCGXKIFSFSNDFXIQKLIEXRXSQLFSYAAFSDSNIIXVVVDXALYIAKQNSPVVEVWDKKXEKLCGLIDCVHFLREVMVKENKESKHKMSYSGRVKXLCLQKNXALWIGXGGGHILLLDLSXRRLIRVIYNFCNSVRVMMXAQLGSLKNVMLVLGYNRKNXEEIQSCLXVWDINLPHEVQNLEKHIEVRKELAEKMRRXSVE

SEQ ID NO: 15262 - protein, 713 aa, Homo sapiens
  MOD_RES (17)..(17): Selenocysteine
  MOD_RES (42)..(42): Selenocysteine
  MOD_RES (51)..(52): Selenocysteine
  MOD_RES (61)..(61): Selenocysteine
  MOD_RES (71)..(71): Selenocysteine
  MOD_RES (73)..(73): Selenocysteine
  MOD_RES (96)..(96): Selenocysteine
  MOD_RES (130)..(130): Selenocysteine
  MOD_RES (313)..(313): Selenocysteine
  MOD_RES (318)..(318): Selenocysteine
  MOD_RES (339)..(339): Selenocysteine
  MOD_RES (354)..(354): Selenocysteine
  MOD_RES (383)..(383): Selenocysteine
  MOD_RES (385)..(385): Selenocysteine
  MOD_RES (395)..(395): Selenocysteine
  MOD_RES (417)..(417): Selenocysteine
  MOD_RES (459)..(459): Selenocysteine
  MOD_RES (466)..(466): Selenocysteine
  MOD_RES (481)..(481): Selenocysteine
  MOD_RES (488)..(488): Selenocysteine
  MOD_RES (496)..(496): Selenocysteine
  MOD_RES (507)..(507): Selenocysteine
  MOD_RES (509)..(509): Selenocysteine
  MOD_RES (536)..(536): Selenocysteine
  MOD_RES (547)..(547): Selenocysteine
  MOD_RES (551)..(551): Selenocysteine
  MOD_RES (554)..(554): Selenocysteine
  MOD_RES (557)..(557): Selenocysteine
  MOD_RES (570)..(570): Selenocysteine
  MOD_RES (579)..(579): Selenocysteine
  MOD_RES (585)..(585): Selenocysteine
  MOD_RES (591)..(591): Selenocysteine
  MOD_RES (606)..(606): Selenocysteine
  MOD_RES (615)..(615): Selenocysteine
  MOD_RES (619)..(619): Selenocysteine
  MOD_RES (652)..(652): Selenocysteine
  MOD_RES (704)..(704): Selenocysteine
MRLLVAPLLLAWVAGAXAAVPVVPWHVPCPPQCACQIRPWYXPRSSYREAXXVDCNDLFLXAVPPALPAGXQXLLLQSNSIVRVDQSELGYLANLXELDLSQNSFSDARDCDFHALPQLLSLHLEENQLXRLEDHSFAGLASLQELYLNHNQLYRIAPRAFSGLSNLLRLHLNSNLLRAIDSRWFEMLPNLEILMIGGNKVDAILDMNFRPLANLRSLVLAGMNLREISDYALEGLQSLESLSFYDNQLARVPRRALEQVPGLKFLDLNKNPLQRVGPGDFANMLHLKELGLNNMEELVSIDKFALVNLPELXKLDIXNNPRLSFIHPRAFHHLPQMEXLMLNNNALSALHQQXVESLPNLQEVGLHGNPIRCDCVIRWANAXGXRVRFIEPQSXLCAEPPDLQRLPVREVPFREMXDHCLPLISPRSFPPSLQVASGESMVLHCRALAEPEPEIYWVXPAGLRLXPAHAGRRYRVYPEGXLELRRVXAEEAGLYXCVAQNLVGADXKXVSVVVGRALLQPGRDEGQGLELRVQEXHPYHILLSWVXPPNXVSXNLXWSSASSLRGQGAXALARLPRGXHSYNIXRLLQAXEYWACLQVAFADAHXQLACVWARXKEAXSCHRALGDRPGLIAILALAVLLLAAGLAAHLGXGQPRKGVGGRRPLPPAWAFWGWSAPSVRVVSAPLVLPWNPGRKLPRSSEGEXLLPPLSQNS

SEQ ID NO: 15263 - protein, 109 aa, Homo sapiens
  MOD_RES (58)..(58): Selenocysteine
  MOD_RES (86)..(86): Selenocysteine
  MOD_RES (92)..(92): Selenocysteine
MDFLLLGLCLYWLLRRPSGVVLCLLGACFQMLPAAPSGCPQLCRCEGRLLYCEALNLXEAPHNLSGLLGLSLRYNSLSELRAGQFXGLMQLXWLYLDHNHICSVQGDAF

SEQ ID NO: 15264 - protein, 183 aa, Homo sapiens
  MOD_RES (58)..(58): Selenocysteine
  MOD_RES (86)..(86): Selenocysteine
  MOD_RES (92)..(92): Selenocysteine
  MOD_RES (119)..(119): Selenocysteine
  MOD_RES (126)..(126): Selenocysteine
  MOD_RES (131)..(132): Selenocysteine
  MOD_RES (164)..(165): Selenocysteine
MDFLLLGLCLYWLLRRPSGVVLCLLGACFQMLPAAPSGCPQLCRCEGRLLYCEALNLXEAPHNLSGLLGLSLRYNSLSELRAGQFXGLMQLXWLYLDHNHICSVQGDAFQKLRRVKELXLSSNQIXQLPNXXFRPMPNLRSVDLSYNKLQALAPDLFHGLRKLXXLHMRANAIQFVPVRIFQD

SEQ ID NO: 15265 - protein, 223 aa, Homo sapiens
  MOD_RES (58)..(58): Selenocysteine
  MOD_RES (86)..(86): Selenocysteine
  MOD_RES (92)..(92): Selenocysteine
  MOD_RES (119)..(119): Selenocysteine
  MOD_RES (126)..(126): Selenocysteine
  MOD_RES (131)..(132): Selenocysteine
  MOD_RES (164)..(165): Selenocysteine
  MOD_RES (212)..(212): Selenocysteine
MDFLLLGLCLYWLLRRPSGVVLCLLGACFQMLPAAPSGCPQLCRCEGRLLYCEALNLXEAPHNLSGLLGLSLRYNSLSELRAGQFXGLMQLXWLYLDHNHICSVQGDAFQKLRRVKELXLSSNQIXQLPNXXFRPMPNLRSVDLSYNKLQALAPDLFHGLRKLXXLHMRANAIQFVPVRIFQDCRSLKFLDIGYNQLKSLARNSFAGLFKLXELHLEHNDLVK

SEQ ID NO: 15266 - protein, 522 aa, Homo sapiens
  MOD_RES (58)..(58): Selenocysteine
  MOD_RES (86)..(86): Selenocysteine
  MOD_RES (92)..(92): Selenocysteine
  MOD_RES (119)..(119): Selenocysteine
  MOD_RES (126)..(126): Selenocysteine
  MOD_RES (131)..(132): Selenocysteine
  MOD_RES (164)..(165): Selenocysteine
  MOD_RES (212)..(212): Selenocysteine
  MOD_RES (278)..(278): Selenocysteine
  MOD_RES (293)..(293): Selenocysteine
  MOD_RES (307)..(307): Selenocysteine
  MOD_RES (310)..(310): Selenocysteine
  MOD_RES (370)..(370): Selenocysteine
  MOD_RES (379)..(379): Selenocysteine
  MOD_RES (392)..(393): Selenocysteine
  MOD_RES (405)..(405): Selenocysteine
  MOD_RES (410)..(410): Selenocysteine
  MOD_RES (430)..(430): Selenocysteine
  MOD_RES (432)..(432): Selenocysteine
  MOD_RES (466)..(466): Selenocysteine
  MOD_RES (476)..(476): Selenocysteine
  MOD_RES (511)..(511): Selenocysteine
MDFLLLGLCLYWLLRRPSGVVLCLLGACFQMLPAAPSGCPQLCRCEGRLLYCEALNLXEAPHNLSGLLGLSLRYNSLSELRAGQFXGLMQLXWLYLDHNHICSVQGDAFQKLRRVKELXLSSNQIXQLPNXXFRPMPNLRSVDLSYNKLQALAPDLFHGLRKLXXLHMRANAIQFVPVRIFQDCRSLKFLDIGYNQLKSLARNSFAGLFKLXELHLEHNDLVKVNFAHFPRLISLHSLCLRRNKVAIVVSSLDWVWNLEKMDLSGNEIEYMEPHVFEXVPHLQSLQLDSNRLXYIEPRILNSWKSLXSIXLAGNLWDCGRNVCALASWLNNFQGRYDGNLQCASPEYAQGEDVLDAVYAFHLCEDGAEPXSGHLLSAVXNRSDLGPPASSAXXLADGGEGQHDGXFEPAXVALPGGEHAENAVQIHKVVXGXMALIFSFLIVVLVLYVSWKCFPASLRQLRQCFVXQRRKQKQKQXMHQMAAMSAQEYYVDYKPNHIEGALVIINEYGSCXCHQQPARECEV

SEQ ID NO: 15267 - protein, 581 aa, Homo sapiens
  MOD_RES (21)..(21): Selenocysteine
  MOD_RES (25)..(25): Selenocysteine
  MOD_RES (88)..(88): Selenocysteine
  MOD_RES (128)..(128): Selenocysteine
  MOD_RES (133)..(133): Selenocysteine
  MOD_RES (171)..(171): Selenocysteine
  MOD_RES (247)..(247): Selenocysteine
  MOD_RES (251)..(251): Selenocysteine
  MOD_RES (291)..(291): Selenocysteine
  MOD_RES (337)..(337): Selenocysteine
  MOD_RES (365)..(366): Selenocysteine
  MOD_RES (379)..(379): Selenocysteine
  MOD_RES (398)..(398): Selenocysteine
  MOD_RES (402)..(402): Selenocysteine
  MOD_RES (408)..(408): Selenocysteine
  MOD_RES (473)..(473): Selenocysteine
  MOD_RES (476)..(476): Selenocysteine
  MOD_RES (486)..(486): Selenocysteine
  MOD_RES (488)..(488): Selenocysteine
  MOD_RES (490)..(490): Selenocysteine
  MOD_RES (498)..(498): Selenocysteine
  MOD_RES (502)..(502): Selenocysteine
  MOD_RES (521)..(521): Selenocysteine
  MOD_RES (529)..(529): Selenocysteine
  MOD_RES (547)..(547): Selenocysteine
  MOD_RES (553)..(553): Selenocysteine
  MOD_RES (556)..(556): Selenocysteine
  MOD_RES (560)..(560): Selenocysteine
  MOD_RES (566)..(566): Selenocysteine
  MOD_RES (568)..(569): Selenocysteine
MGFNVIRLLSGSAVALVIAPXVLLXMLSSAERGCPKGCRCEGKMVYCESQKLQEIPSSISAGCLGLSLRYNSLQKLKYNQFKGLNQLXWLYLDHNHISNIDENAFNGIRRLKELILSSNRISYFLNNXFRPVXNLRNLDLSYNQLHSLGSEQFRGLRKLLSLHLRSNSLRXIPVRIFQDCRNLELLDLGYNRIRSLARNVFAGMIRLKELHLEHNQFSKLNLALFPRLVSLQNLYLQWNKISVIGQXMSWXWSSLQRLDLSGNEIEAFSGPSVFQCVPNLQRLNLDSNKLXFIGQEILDSWISLNDISLAGNIWECSRNICSLVNWLKSFKGLRENXIICASPKELQGVNVIDAVKNYSICGKSXXERFDLARALPKPXFKPKLPRPKHESKPPLPPXVGAXEPGPEXDADAEHISFHKIIAGSVALFLSVLVILLVIYVSWKRYPASMKQLQQRSLMRRHRKKKRQSLKQMXPSXQEFYVDYKPXNXEXSEMLLNGXGPCXYNKSGSRECEIPLSMNVSXFLAYDQPXISYCGVHHELLSHKSFEXNAQEDXMEXHLEXELDLSXIXXAGRISDHKQQLA

SEQ ID NO: 15268 - protein, 518 aa, Homo sapiens
  MOD_RES (7)..(7): Selenocysteine
  MOD_RES (21)..(21): Selenocysteine
  MOD_RES (28)..(28): Selenocysteine
  MOD_RES (122)..(122): Selenocysteine
  MOD_RES (128)..(128): Selenocysteine
  MOD_RES (147)..(147): Selenocysteine
  MOD_RES (171)..(171): Selenocysteine
  MOD_RES (249)..(249): Selenocysteine
  MOD_RES (251)..(251): Selenocysteine
  MOD_RES (272)..(272): Selenocysteine
  MOD_RES (290)..(290): Selenocysteine
  MOD_RES (296)..(296): Selenocysteine
  MOD_RES (307)..(307): Selenocysteine
  MOD_RES (336)..(336): Selenocysteine
  MOD_RES (356)..(356): Selenocysteine
  MOD_RES (368)..(368): Selenocysteine
  MOD_RES (377)..(377): Selenocysteine
  MOD_RES (388)..(388): Selenocysteine
  MOD_RES (395)..(395): Selenocysteine
  MOD_RES (398)..(398): Selenocysteine
  MOD_RES (401)..(401): Selenocysteine
  MOD_RES (491)..(491): Selenocysteine
  MOD_RES (495)..(495): Selenocysteine
  MOD_RES (507)..(507): Selenocysteine
  MOD_RES (509)..(509): Selenocysteine
MGFHLIXQLKGMSVVLVLLPXLLLVMLXGAQRACPKNCRCDGKIVYCESHAFADIPENISGGSQGLSLRFNSIQKLKSNQFAGLNQLIWLYLDHNYISSVDEDAFQGIRRLKELILSSNKIXYLHNKXFHPVPNLRNLDLSYNKLQXLQSEQFKGLRKLIILHLRSNSLKXVPIRVFQDCRNLDFLDLGYNRLRSLSRNAFAGLLKLKELHLEHNQFSKINFAHFPRLFNLRSIYLQWNRIRSISQGLXWXWSSLHNLDLSGNDIQGIEPGXFKCLPNLQKLNLDSNKLXNISQEXVNAWISLISIXLSGNMWECSRSICPLFYWLKNFKGNKESXMICAGPKHIQGEKVSDAVEXYNICSEVQVVNXERSHLVPQXPQKPLIIPRPXIFKPDVXQSXFEXPSPSPGFQIPGAEQEYEHVSFHKIIAGSVALFLSVAMILLVIYVSWKRYPASMKQLQQHSLMKRRRKKARESERQMNSPLQEYYVDYKPXNSEXMDISVNGSGPCXYXISGSRECEV

SEQ ID NO: 15269 - protein, 590 aa, Homo sapiens
  MOD_RES (7)..(7): Selenocysteine
  MOD_RES (21)..(21): Selenocysteine
  MOD_RES (28)..(28): Selenocysteine
  MOD_RES (122)..(122): Selenocysteine
  MOD_RES (128)..(128): Selenocysteine
  MOD_RES (147)..(147): Selenocysteine
  MOD_RES (171)..(171): Selenocysteine
  MOD_RES (249)..(249): Selenocysteine
  MOD_RES (251)..(251): Selenocysteine
  MOD_RES (272)..(272): Selenocysteine
  MOD_RES (290)..(290): Selenocysteine
  MOD_RES (296)..(296): Selenocysteine
  MOD_RES (307)..(307): Selenocysteine
  MOD_RES (336)..(336): Selenocysteine
  MOD_RES (356)..(356): Selenocysteine
  MOD_RES (368)..(368): Selenocysteine
  MOD_RES (377)..(377): Selenocysteine
  MOD_RES (388)..(388): Selenocysteine
  MOD_RES (395)..(395): Selenocysteine
  MOD_RES (398)..(398): Selenocysteine
  MOD_RES (401)..(401): Selenocysteine
  MOD_RES (491)..(491): Selenocysteine
  MOD_RES (495)..(495): Selenocysteine
  MOD_RES (507)..(507): Selenocysteine
  MOD_RES (509)..(509): Selenocysteine
  MOD_RES (547)..(547): Selenocysteine
  MOD_RES (552)..(552): Selenocysteine
  MOD_RES (574)..(574): Selenocysteine
MGFHLIXQLKGMSVVLVLLPXLLLVMLXGAQRACPKNCRCDGKIVYCESHAFADIPENISGGSQGLSLRFNSIQKLKSNQFAGLNQLIWLYLDHNYISSVDEDAFQGIRRLKELILSSNKIXYLHNKXFHPVPNLRNLDLSYNKLQXLQSEQFKGLRKLIILHLRSNSLKXVPIRVFQDCRNLDFLDLGYNRLRSLSRNAFAGLLKLKELHLEHNQFSKINFAHFPRLFNLRSIYLQWNRIRSISQGLXWXWSSLHNLDLSGNDIQGIEPGXFKCLPNLQKLNLDSNKLXNISQEXVNAWISLISIXLSGNMWECSRSICPLFYWLKNFKGNKESXMICAGPKHIQGEKVSDAVEXYNICSEVQVVNXERSHLVPQXPQKPLIIPRPXIFKPDVXQSXFEXPSPSPGFQIPGAEQEYEHVSFHKIIAGSVALFLSVAMILLVIYVSWKRYPASMKQLQQHSLMKRRRKKARESERQMNSPLQEYYVDYKPXNSEXMDISVNGSGPCXYXISGSRECEMPHHMKPLPYYSYDQPVIGYCQAHQPLHVXKGYEXVSPEQDESPGLELGRDHSFIAXIARSAAPAIYLERIAN

SEQ ID NO: 15270 - protein, 519 aa, Homo sapiens
  MOD_RES (8)..(8): Selenocysteine
  MOD_RES (22)..(22): Selenocysteine
  MOD_RES (29)..(29): Selenocysteine
  MOD_RES (123)..(123): Selenocysteine
  MOD_RES (129)..(129): Selenocysteine
  MOD_RES (148)..(148): Selenocysteine
  MOD_RES (172)..(172): Selenocysteine
  MOD_RES (250)..(250): Selenocysteine
  MOD_RES (252)..(252): Selenocysteine
  MOD_RES (273)..(273): Selenocysteine
  MOD_RES (291)..(291): Selenocysteine
  MOD_RES (297)..(297): Selenocysteine
  MOD_RES (308)..(308): Selenocysteine
  MOD_RES (337)..(337): Selenocysteine
  MOD_RES (357)..(357): Selenocysteine
  MOD_RES (369)..(369): Selenocysteine
  MOD_RES (378)..(378): Selenocysteine
  MOD_RES (389)..(389): Selenocysteine
  MOD_RES (396)..(396): Selenocysteine
  MOD_RES (399)..(399): Selenocysteine
  MOD_RES (402)..(402): Selenocysteine
  MOD_RES (492)..(492): Selenocysteine
  MOD_RES (496)..(496): Selenocysteine
  MOD_RES (508)..(508): Selenocysteine
  MOD_RES (510)..(510): Selenocysteine
MPGFHLIXQLKGMSVVLVLLPXLLLVMLXGAQRACPKNCRCDGKIVYCESHAFADIPENISGGSQGLSLRFNSIQKLKSNQFAGLNQLIWLYLDHNYISSVDEDAFQGIRRLKELILSSNKIXYLHNKXFHPVPNLRNLDLSYNKLQXLQSEQFKGLRKLIILHLRSNSLKXVPIRVFQDCRNLDFLDLGYNRLRSLSRNAFAGLLKLKELHLEHNQFSKINFAHFPRLFNLRSIYLQWNRIRSISQGLXWXWSSLHNLDLSGNDIQGIEPGXFKCLPNLQKLNLDSNKLXNISQEXVNAWISLISIXLSGNMWECSRSICPLFYWLKNFKGNKESXMICAGPKHIQGEKVSDAVEXYNICSEVQVVNXERSHLVPQXPQKPLIIPRPXIFKPDVXQSXFEXPSPSPGFQIPGAEQEYEHVSFHKIIAGSVALFLSVAMILLVIYVSWKRYPASMKQLQQHSLMKRRRKKARESERQMNSPLQEYYVDYKPXNSEXMDISVNGSGPCXYXISGSRECEV

SEQ ID NO: 15271 - protein, 591 aa, Homo sapiens
  MOD_RES (8)..(8): Selenocysteine
  MOD_RES (22)..(22): Selenocysteine
  MOD_RES (29)..(29): Selenocysteine
  MOD_RES (123)..(123): Selenocysteine
  MOD_RES (129)..(129): Selenocysteine
  MOD_RES (148)..(148): Selenocysteine
  MOD_RES (172)..(172): Selenocysteine
  MOD_RES (250)..(250): Selenocysteine
  MOD_RES (252)..(252): Selenocysteine
  MOD_RES (273)..(273): Selenocysteine
  MOD_RES (291)..(291): Selenocysteine
  MOD_RES (297)..(297): Selenocysteine
  MOD_RES (308)..(308): Selenocysteine
  MOD_RES (337)..(337): Selenocysteine
  MOD_RES (357)..(357): Selenocysteine
  MOD_RES (369)..(369): Selenocysteine
  MOD_RES (378)..(378): Selenocysteine
  MOD_RES (389)..(389): Selenocysteine
  MOD_RES (396)..(396): Selenocysteine
  MOD_RES (399)..(399): Selenocysteine
  MOD_RES (402)..(402): Selenocysteine
  MOD_RES (492)..(492): Selenocysteine
  MOD_RES (496)..(496): Selenocysteine
  MOD_RES (508)..(508): Selenocysteine
  MOD_RES (510)..(510): Selenocysteine
  MOD_RES (548)..(548): Selenocysteine
  MOD_RES (553)..(553): Selenocysteine
  MOD_RES (575)..(575): Selenocysteine
MPGFHLIXQLKGMSVVLVLLPXLLLVMLXGAQRACPKNCRCDGKIVYCESHAFADIPENISGGSQGLSLRFNSIQKLKSNQFAGLNQLIWLYLDHNYISSVDEDAFQGIRRLKELILSSNKIXYLHNKXFHPVPNLRNLDLSYNKLQXLQSEQFKGLRKLIILHLRSNSLKXVPIRVFQDCRNLDFLDLGYNRLRSLSRNAFAGLLKLKELHLEHNQFSKINFAHFPRLFNLRSIYLQWNRIRSISQGLXWXWSSLHNLDLSGNDIQGIEPGXFKCLPNLQKLNLDSNKLXNISQEXVNAWISLISIXLSGNMWECSRSICPLFYWLKNFKGNKESXMICAGPKHIQGEKVSDAVEXYNICSEVQVVNXERSHLVPQXPQKPLIIPRPXIFKPDVXQSXFEXPSPSPGFQIPGAEQEYEHVSFHKIIAGSVALFLSVAMILLVIYVSWKRYPASMKQLQQHSLMKRRRKKARESERQMNSPLQEYYVDYKPXNSEXMDISVNGSGPCXYXISGSRECEMPHHMKPLPYYSYDQPVIGYCQAHQPLHVXKGYEXVSPEQDESPGLELGRDHSFIAXIARSAAPAIYLERIAN

SEQ ID NO: 15272 - protein, 24 aa, Homo sapiens
  MOD_RES (10)..(10): Selenocysteine
  MOD_RES (17)..(17): Selenocysteine
MSVVLVLLPXLLLVMLXGAQRACP

SEQ ID NO: 15273 - protein, 345 aa, Homo sapiens
  MOD_RES (31)..(31): Selenocysteine
  MOD_RES (52)..(52): Selenocysteine
  MOD_RES (54)..(54): Selenocysteine
  MOD_RES (78)..(78): Selenocysteine
  MOD_RES (106)..(106): Selenocysteine
  MOD_RES (139)..(139): Selenocysteine
  MOD_RES (144)..(144): Selenocysteine
  MOD_RES (149)..(149): Selenocysteine
  MOD_RES (205)..(205): Selenocysteine
  MOD_RES (215)..(215): Selenocysteine
  MOD_RES (288)..(288): Selenocysteine
  MOD_RES (292)..(292): Selenocysteine
  MOD_RES (312)..(312): Selenocysteine
  MOD_RES (317)..(317): Selenocysteine
  MOD_RES (328)..(328): Selenocysteine
MKGELLLFSSVIVLLQVVCSCPDKCYCQSSXNFVDCSQQGLAEIPSHLPPQXRXLHLQDNQIHHLPAFAFRSVPWLMXLNLSNNSLSNLAPGAFHGLQHLQVLNLXQNSLLSLESRLFHSLPQLRELDLSSNNISHLPXSLGEXWENLXILAVQQNQLQQLDRALLESMPSVRLLLLKDNLWKCNCHLLGLKLWLEKFVYKGGLXDGIICESPDXWKGKDLLRIPHELYQPCPLPAPDPVSSQAQWPGSAHGVVLRPPENHNAGERELLECELKPKPRPANLRHAIAXVIIXGVVCGIVCLMMLAAAIYGCXYAAIXAQYHGGPLAQXNDPGKVEEKERFDSSPA

SEQ ID NO: 15274 - protein, 269 aa, Homo sapiens
  MOD_RES (2)..(2): Selenocysteine
  MOD_RES (30)..(30): Selenocysteine
  MOD_RES (63)..(63): Selenocysteine
  MOD_RES (68)..(68): Selenocysteine
  MOD_RES (73)..(73): Selenocysteine
  MOD_RES (129)..(129): Selenocysteine
  MOD_RES (139)..(139): Selenocysteine
  MOD_RES (212)..(212): Selenocysteine
  MOD_RES (216)..(216): Selenocysteine
  MOD_RES (236)..(236): Selenocysteine
  MOD_RES (241)..(241): Selenocysteine
  MOD_RES (252)..(252): Selenocysteine
MXLNLSNNSLSNLAPGAFHGLQHLQVLNLXQNSLLSLESRLFHSLPQLRELDLSSNNISHLPXSLGEXWENLXILAVQQNQLQQLDRALLESMPSVRLLLLKDNLWKCNCHLLGLKLWLEKFVYKGGLXDGIICESPDXWKGKDLLRIPHELYQPCPLPAPDPVSSQAQWPGSAHGVVLRPPENHNAGERELLECELKPKPRPANLRHAIAXVIIXGVVCGIVCLMMLAAAIYGCXYAAIXAQYHGGPLAQXNDPGKVEEKERFDSSPA

SEQ ID NO: 15275 - protein, 102 aa, Homo sapiens
  MOD_RES (5)..(5): Selenocysteine
  MOD_RES (28)..(28): Selenocysteine
  MOD_RES (31)..(31): Selenocysteine
  MOD_RES (35)..(35): Selenocysteine
  MOD_RES (46)..(46): Selenocysteine
  MOD_RES (51)..(51): Selenocysteine
  MOD_RES (76)..(76): Selenocysteine
  MOD_RES (100)..(100): Selenocysteine
MSGGXPYIGSKISLISKAEIRYEGILYXIDXENSXVALAKVRSFGXEDRPXDRPIPPRDEVFEYIIFRGSDIKDLXVCEPPKPQCSLPQDPAIVQSRWSXVA

SEQ ID NO: 15276 - protein, 463 aa, Homo sapiens
  MOD_RES (5)..(5): Selenocysteine
  MOD_RES (28)..(28): Selenocysteine
  MOD_RES (31)..(31): Selenocysteine
  MOD_RES (35)..(35): Selenocysteine
  MOD_RES (46)..(46): Selenocysteine
  MOD_RES (51)..(51): Selenocysteine
  MOD_RES (76)..(76): Selenocysteine
  MOD_RES (102)..(102): Selenocysteine
  MOD_RES (119)..(119): Selenocysteine
  MOD_RES (144)..(144): Selenocysteine
  MOD_RES (148)..(148): Selenocysteine
  MOD_RES (150)..(150): Selenocysteine
  MOD_RES (155)..(155): Selenocysteine
  MOD_RES (167)..(167): Selenocysteine
  MOD_RES (170)..(170): Selenocysteine
  MOD_RES (175)..(175): Selenocysteine
  MOD_RES (194)..(194): Selenocysteine
  MOD_RES (201)..(201): Selenocysteine
  MOD_RES (220)..(220): Selenocysteine
  MOD_RES (344)..(344): Selenocysteine
  MOD_RES (366)..(366): Selenocysteine
  MOD_RES (384)..(384): Selenocysteine
  MOD_RES (395)..(395): Selenocysteine
  MOD_RES (430)..(430): Selenocysteine
  MOD_RES (432)..(432): Selenocysteine
  MOD_RES (458)..(459): Selenocysteine
MSGGXPYIGSKISLISKAEIRYEGILYXIDXENSXVALAKVRSFGXEDRPXDRPIPPRDEVFEYIIFRGSDIKDLXVCEPPKPQCSLPQDPAIVQSSLGSSXSSFQSMGSYGPFGRMPXYSQFSPSSLVGQQFGAVGVAGSSLXSFGXEXSNSGXLPQSSAVGSAFXQDXRSLKXQLSQGRSSPQLDPLRKSPXMEQAVQXASAHLPAPAAVGRRSPVSXRPLPSASQKAGENQEHRRAEVHKVSRPENEQLRNDNKRQVAPGAPSAPRRGRGGHRGGRGRFGIRRDGPMKFEKDFDFESANAQFNKEEIDREFHNKLKLKEDKLEKQEKPVNGEDKGDSGVDXQNSEGNADEEDPLGPNCYYDKXKSFFDNISCDDNRERRPXWAEERRLNAEXFGIPLRPNRGRGGYRGRGGLGFRGGRGRGGGRGGXFXAPRGFRGGFRGGRGGREFADFEYRKXXAFGP

SEQ ID NO: 15277 - protein, 463 aa, Homo sapiens
  MOD_RES (5)..(5): Selenocysteine
  MOD_RES (28)..(28): Selenocysteine
  MOD_RES (31)..(31): Selenocysteine
  MOD_RES (35)..(35): Selenocysteine
  MOD_RES (46)..(46): Selenocysteine
  MOD_RES (51)..(51): Selenocysteine
  MOD_RES (76)..(76): Selenocysteine
  MOD_RES (102)..(102): Selenocysteine
  MOD_RES (119)..(119): Selenocysteine
  MOD_RES (144)..(144): Selenocysteine
  MOD_RES (148)..(148): Selenocysteine
  MOD_RES (150)..(150): Selenocysteine
  MOD_RES (155)..(155): Selenocysteine
  MOD_RES (167)..(167): Selenocysteine
  MOD_RES (170)..(170): Selenocysteine
  MOD_RES (175)..(175): Selenocysteine
  MOD_RES (194)..(194): Selenocysteine
  MOD_RES (201)..(201): Selenocysteine
  MOD_RES (220)..(220): Selenocysteine
  MOD_RES (344)..(344): Selenocysteine
  MOD_RES (366)..(366): Selenocysteine
  MOD_RES (384)..(384): Selenocysteine
  MOD_RES (395)..(395): Selenocysteine
  MOD_RES (430)..(430): Selenocysteine
  MOD_RES (432)..(432): Selenocysteine
MSGGXPYIGSKISLISKAEIRYEGILYXIDXENSXVALAKVRSFGXEDRPXDRPIPPRDEVFEYIIFRGSDIKDLXVCEPPKPQCSLPQDPAIVQSSLGSSXSSFQSMGSYGPFGRMPXYSQFSPSSLVGQQFGAVGVAGSSLXSFGXEXSNSGXLPQSSAVGSAFXQDXRSLKXQLSQGRSSPQLDPLRKSPXMEQAVQXASAHLPAPAAVGRRSPVSXRPLPSASQKAGENQEHRRAEVHKVSRPENEQLRNDNKRQVAPGAPSAPRRGRGGHRGGRGRFGIRRDGPMKFEKDFDFESANAQFNKEEIDREFHNKLKLKEDKLEKQEKPVNGEDKGDSGVDXQNSEGNADEEDPLGPNCYYDKXKSFFDNISCDDNRERRPXWAEERRLNAEXFGIPLRPNRGRGGYRGRGGLGFRGGRGRGGGRGGXFXAPRGFRGGFRGGRGGREFADFEYRKDNKVAA

SEQ ID NO: 15278 - protein, 422 aa, Homo sapiens
  MOD_RES (5)..(5): Selenocysteine
  MOD_RES (28)..(28): Selenocysteine
  MOD_RES (31)..(31): Selenocysteine
  MOD_RES (35)..(35): Selenocysteine
  MOD_RES (46)..(46): Selenocysteine
  MOD_RES (51)..(51): Selenocysteine
  MOD_RES (76)..(76): Selenocysteine
  MOD_RES (102)..(102): Selenocysteine
  MOD_RES (119)..(119): Selenocysteine
  MOD_RES (153)..(153): Selenocysteine
  MOD_RES (160)..(160): Selenocysteine
  MOD_RES (179)..(179): Selenocysteine
  MOD_RES (303)..(303): Selenocysteine
  MOD_RES (325)..(325): Selenocysteine
  MOD_RES (343)..(343): Selenocysteine
  MOD_RES (354)..(354): Selenocysteine
  MOD_RES (389)..(389): Selenocysteine
  MOD_RES (391)..(391): Selenocysteine
  MOD_RES (417)..(418): Selenocysteine
MSGGXPYIGSKISLISKAEIRYEGILYXIDXENSXVALAKVRSFGXEDRPXDRPIPPRDEVFEYIIFRGSDIKDLXVCEPPKPQCSLPQDPAIVQSSLGSSXSSFQSMGSYGPFGRMPXYSQFSPSSLVGQQFGAVGVGRSSPQLDPLRKSPXMEQAVQXASAHLPAPAAVGRRSPVSXRPLPSASQKAGENQEHRRAEVHKVSRPENEQLRNDNKRQVAPGAPSAPRRGRGGHRGGRGRFGIRRDGPMKFEKDFDFESANAQFNKEEIDREFHNKLKLKEDKLEKQEKPVNGEDKGDSGVDXQNSEGNADEEDPLGPNCYYDKXKSFFDNISCDDNRERRPXWAEERRLNAEXFGIPLRPNRGRGGYRGRGGLGFRGGRGRGGGRGGXFXAPRGFRGGFRGGRGGREFADFEYRKXXAFGP

SEQ ID NO: 15279 - protein, 314 aa, Homo sapiens
  MOD_RES (23)..(23): Selenocysteine
  MOD_RES (26)..(26): Selenocysteine
  MOD_RES (30)..(30): Selenocysteine
  MOD_RES (41)..(41): Selenocysteine
  MOD_RES (46)..(46): Selenocysteine
  MOD_RES (71)..(71): Selenocysteine
  MOD_RES (97)..(97): Selenocysteine
  MOD_RES (114)..(114): Selenocysteine
  MOD_RES (139)..(139): Selenocysteine
  MOD_RES (143)..(143): Selenocysteine
  MOD_RES (145)..(145): Selenocysteine
  MOD_RES (150)..(150): Selenocysteine
  MOD_RES (162)..(162): Selenocysteine
  MOD_RES (165)..(165): Selenocysteine
  MOD_RES (170)..(170): Selenocysteine
  MOD_RES (280)..(280): Selenocysteine
  MOD_RES (302)..(302): Selenocysteine
PYIGSKISLISKAEIRYEGILYXIDXENSXVALAKVRSFGXEDRPXDRPIPPRDEVFEYIIFRGSDIKDLXVCEPPKPQCSLPQDPAIVQSSLGSSXSSFQSMGSYGPFGRMPXYSQFSPSSLVGQQFGAVGVAGSSLXSFGXEXSNSGXLPQSSAVGSAFXQDXRSLKXQLSQAEVHKVSRPENEQLRNDNKRQVAPGAPSAPRRGRGGHRGGRGRFGIRRDGPMKFEKDFDFESANAQFNKEEIDREFHNKLKLKEDKLEKQEKPVNGEDKGDSGVDXQNSEGNADEEDPLGPNCYYDKXKSFFDNISCDDN

SEQ ID NO: 15280 - protein, 148 aa, Homo sapiens
  MOD_RES (1)..(1): Any amino acid
  MOD_RES (23)..(23): Selenocysteine
  MOD_RES (45)..(45): Selenocysteine
  MOD_RES (63)..(63): Selenocysteine
  MOD_RES (74)..(74): Selenocysteine
  MOD_RES (109)..(109): Selenocysteine
  MOD_RES (111)..(111): Selenocysteine
  MOD_RES (139)..(139): Selenocysteine
XDKLEKQEKPVNGEDKGDSGVDXQNSEGNADEEDPLGPNCYYDKXKSFFDNISCDDNRERRPXWAEERRLNAEXFGIPLRPNRGRGGYRGRGGLGFRGGRGRGGGRGGXFXAPRGFRGGFRGGRGGREFADFEYRVSVXVNKFFGVDM

SEQ ID NO: 15281 - protein, 339 aa, Homo sapiens
  MOD_RES (20)..(20): Selenocysteine
  MOD_RES (150)..(150): Selenocysteine
  MOD_RES (175)..(175): Selenocysteine
  MOD_RES (184)..(184): Selenocysteine
  MOD_RES (195)..(196): Selenocysteine
  MOD_RES (202)..(202): Selenocysteine
  MOD_RES (235)..(235): Selenocysteine
  MOD_RES (240)..(240): Selenocysteine
  MOD_RES (244)..(244): Selenocysteine
  MOD_RES (263)..(263): Selenocysteine
  MOD_RES (269)..(269): Selenocysteine
  MOD_RES (280)..(280): Selenocysteine
  MOD_RES (305)..(305): Selenocysteine
  MOD_RES (308)..(308): Selenocysteine
  MOD_RES (312)..(312): Selenocysteine
  MOD_RES (323)..(323): Selenocysteine
MAEASSDPGAEEREELLGPXAQWSVEDEEEAVHEQCQHERDRQLQAQDEEGGGHVPERPKQEMLLSLKPSEAPELDEDEGFGDWSQRPEQRQQHEGAQGALDSGEPPQCRSPEGEQEDRPGLHAYEKEDSDEVHLEELSLSKEGPGPEDXVQDNLGAAGAEEEQEEHQKCQQPRXPSPLVLEGXIEQSSPPLSPXXKLIDRXESLNRSIEKSNSVKKSQPDLPISKIDQWLEQYXQAIEXAGRXPKLARQASIELPSMAVASXKSRWEXGEVQAQSAAKXPSCKDIVAGDMSKKSLWEQKGGSKXSSXIKSXPSGKRYKFVAXGHGKYEKVLVEGGPAP

SEQ ID NO: 15282 - protein, 467 aa, Homo sapiens
  MOD_RES (32)..(32): Selenocysteine
  MOD_RES (58)..(58): Selenocysteine
  MOD_RES (99)..(99): Selenocysteine
  MOD_RES (141)..(141): Selenocysteine
  MOD_RES (148)..(148): Selenocysteine
  MOD_RES (278)..(278): Selenocysteine
  MOD_RES (303)..(303): Selenocysteine
  MOD_RES (312)..(312): Selenocysteine
  MOD_RES (323)..(324): Selenocysteine
  MOD_RES (330)..(330): Selenocysteine
  MOD_RES (363)..(363): Selenocysteine
  MOD_RES (368)..(368): Selenocysteine
  MOD_RES (372)..(372): Selenocysteine
  MOD_RES (391)..(391): Selenocysteine
  MOD_RES (397)..(397): Selenocysteine
  MOD_RES (408)..(408): Selenocysteine
  MOD_RES (433)..(433): Selenocysteine
  MOD_RES (436)..(436): Selenocysteine
  MOD_RES (440)..(440): Selenocysteine
  MOD_RES (451)..(451): Selenocysteine
MAPIWSPPGRVSGCHLSSGPAPGSAVGPWLGXPHPSLPLPLAPHKPPPPGLPGSAGQXSLPAQRECVFPGDAAVHQELCGLGFEECLGSIPQAHQCYLXNGPKRRKCSPRRRGRAPAWLCGGSPPCHQGLGHEHPSSGPSXNCSPRPXAQWSVEDEEEAVHEQCQHERDRQLQAQDEEGGGHVPERPKQEMLLSLKPSEAPELDEDEGFGDWSQRPEQRQQHEGAQGALDSGEPPQCRSPEGEQEDRPGLHAYEKEDSDEVHLEELSLSKEGPGPEDXVQDNLGAAGAEEEQEEHQKCQQPRXPSPLVLEGXIEQSSPPLSPXXKLIDRXESLNRSIEKSNSVKKSQPDLPISKIDQWLEQYXQAIEXAGRXPKLARQASIELPSMAVASXKSRWEXGEVQAQSAAKXPSCKDIVAGDMSKKSLWEQKGGSKXSSXIKSXPSGKRYKFVAXGHGKYEKVLVEGGPAP

SEQ ID NO: 15283 - protein, 122 aa, Homo sapiens
  MOD_RES (18)..(18): Selenocysteine
  MOD_RES (38)..(38): Selenocysteine
MKASGRGRWPGRAPQSSXGRHGVGVSGRGPGCWVLRPXAQWSVEDEEEAVHEQCQHERDRQLQAQDEEGGGHVPERPKQEMLLSLKPSEAPELDEDEGFGDWSQRPEQRQQHEGAQGALDSG

SEQ ID NO: 15284 - protein, 275 aa, Homo sapiens
  MOD_RES (11)..(11): Selenocysteine
  MOD_RES (141)..(141): Selenocysteine
  MOD_RES (166)..(166): Selenocysteine
  MOD_RES (175)..(175): Selenocysteine
  MOD_RES (186)..(187): Selenocysteine
  MOD_RES (193)..(193): Selenocysteine
  MOD_RES (226)..(226): Selenocysteine
  MOD_RES (231)..(231): Selenocysteine
  MOD_RES (235)..(235): Selenocysteine
  MOD_RES (254)..(254): Selenocysteine
  MOD_RES (260)..(260): Selenocysteine
  MOD_RES (271)..(271): Selenocysteine
MLEERSEARPXAQWSVEDEEEAVHEQCQHERDRQLQAQDEEGGGHVPERPKQEMLLSLKPSEAPELDEDEGFGDWSQRPEQRQQHEGAQGALDSGEPPQCRSPEGEQEDRPGLHAYEKEDSDEVHLEELSLSKEGPGPEDXVQDNLGAAGAEEEQEEHQKCQQPRXPSPLVLEGXIEQSSPPLSPXXKLIDRXESLNRSIEKSNSVKKSQPDLPISKIDQWLEQYXQAIEXAGRXPKLARQASIELPSMAVASXKSRWEXGEVQAQSAAKXPSCK

SEQ ID NO: 15285 - protein, 60 aa, Homo sapiens
MLLSLKPSEAPELDEDEGFGDWSQRPEQRQQHEGAQGALDSGEPPQCRSPEGEQEDRPGL

SEQ ID NO: 15286 - protein, 64 aa, Homo sapiens
MLLSLKPSEAPELDEDEGFGDWSQRPEQRQQHEGAQGALDSGEPPQCRSPEGEQEDRPGLHAYE

SEQ ID NO: 15287 - protein, 126 aa, Homo sapiens
  MOD_RES (88)..(88): Selenocysteine
  MOD_RES (113)..(113): Selenocysteine
  MOD_RES (122)..(122): Selenocysteine
MLLSLKPSEAPELDEDEGFGDWSQRPEQRQQHEGAQGALDSGEPPQCRSPEGEQEDRPGLHAYEKEDSDEVHLEELSLSKEGPGPEDXVQDNLGAAGAEEEQEEHQKCQQPRXPSPLVLEGXIEQS

SEQ ID NO: 15288 - protein, 222 aa, Homo sapiens
  MOD_RES (88)..(88): Selenocysteine
  MOD_RES (113)..(113): Selenocysteine
  MOD_RES (122)..(122): Selenocysteine
  MOD_RES (133)..(134): Selenocysteine
  MOD_RES (140)..(140): Selenocysteine
  MOD_RES (173)..(173): Selenocysteine
  MOD_RES (178)..(178): Selenocysteine
  MOD_RES (182)..(182): Selenocysteine
  MOD_RES (201)..(201): Selenocysteine
  MOD_RES (207)..(207): Selenocysteine
  MOD_RES (218)..(218): Selenocysteine
MLLSLKPSEAPELDEDEGFGDWSQRPEQRQQHEGAQGALDSGEPPQCRSPEGEQEDRPGLHAYEKEDSDEVHLEELSLSKEGPGPEDXVQDNLGAAGAEEEQEEHQKCQQPRXPSPLVLEGXIEQSSPPLSPXXKLIDRXESLNRSIEKSNSVKKSQPDLPISKIDQWLEQYXQAIEXAGRXPKLARQASIELPSMAVASXKSRWEXGEVQAQSAAKXPSCK

SEQ ID NO: 15289 - protein, 277 aa, Homo sapiens
  MOD_RES (88)..(88): Selenocysteine
  MOD_RES (113)..(113): Selenocysteine
  MOD_RES (122)..(122): Selenocysteine
  MOD_RES (133)..(134): Selenocysteine
  MOD_RES (140)..(140): Selenocysteine
  MOD_RES (173)..(173): Selenocysteine
  MOD_RES (178)..(178): Selenocysteine
  MOD_RES (182)..(182): Selenocysteine
  MOD_RES (201)..(201): Selenocysteine
  MOD_RES (207)..(207): Selenocysteine
  MOD_RES (218)..(218): Selenocysteine
  MOD_RES (243)..(243): Selenocysteine
  MOD_RES (246)..(246): Selenocysteine
  MOD_RES (250)..(250): Selenocysteine
  MOD_RES (261)..(261): Selenocysteine
MLLSLKPSEAPELDEDEGFGDWSQRPEQRQQHEGAQGALDSGEPPQCRSPEGEQEDRPGLHAYEKEDSDEVHLEELSLSKEGPGPEDXVQDNLGAAGAEEEQEEHQKCQQPRXPSPLVLEGXIEQSSPPLSPXXKLIDRXESLNRSIEKSNSVKKSQPDLPISKIDQWLEQYXQAIEXAGRXPKLARQASIELPSMAVASXKSRWEXGEVQAQSAAKXPSCKDIVAGDMSKKSLWEQKGGSKXSSXIKSXPSGKRYKFVAXGHGKYEKVLVEGGPAP

SEQ ID NO: 15290 - protein, 175 aa, Homo sapiens
  MOD_RES (3)..(3): Selenocysteine
  MOD_RES (133)..(133): Selenocysteine
  MOD_RES (158)..(158): Selenocysteine
  MOD_RES (167)..(167): Selenocysteine
MPXAQWSVEDEEEAVHEQCQHERDRQLQAQDEEGGGHVPERPKQEMLLSLKPSEAPELDEDEGFGDWSQRPEQRQQHEGAQGALDSGEPPQCRSPEGEQEDRPGLHAYEKEDSDEVHLEELSLSKEGPGPEDXVQDNLGAAGAEEEQEEHQKCQQPRXPSPLVLEGXIEQSSPPL

SEQ ID NO: 15291 - protein, 205 aa, Homo sapiens
  MOD_RES (2)..(2): Selenocysteine
  MOD_RES (15)..(16): Selenocysteine
  MOD_RES (41)..(41): Selenocysteine
  MOD_RES (47)..(47): Selenocysteine
  MOD_RES (60)..(60): Selenocysteine
  MOD_RES (83)..(83): Selenocysteine
  MOD_RES (103)..(103): Selenocysteine
  MOD_RES (125)..(125): Selenocysteine
  MOD_RES (176)..(176): Selenocysteine
  MOD_RES (183)..(183): Selenocysteine
  MOD_RES (185)..(185): Selenocysteine
  MOD_RES (197)..(197): Selenocysteine
MXPPERLFLPRVCGXXLHLLLLGLLLVLLPGAQGLPGVGLXPSAAQXARQHPKMHLAHSXLKPAAHLIGDPSKQNSLLWRANXDRAFLQDGFSLSNNSLLVPXSGIYFVYSQVVFSGKAYSPKAXSSPLYLAHEVQLFSSQYPFHVPLLSSQKMVYPGLQEPWLHSMYHGAAFQLXQGDQLSXHXDGIPHLVLSPSXVFFGAFAL

SEQ ID NO: 15292 - protein, 77 aa, Homo sapiens
  MOD_RES (27)..(27): Selenocysteine
  MOD_RES (31)..(31): Selenocysteine
  MOD_RES (39)..(39): Selenocysteine
  MOD_RES (76)..(76): Selenocysteine
MGALGLEGRGGRLQGRGSLLLAVAGAXSLVXLLLAVPIXVLAVLALVPQDQGGLGFRSCQRRSQKQISAPGSQLPXS

SEQ ID NO: 15293 - protein, 244 aa, Homo sapiens
  MOD_RES (27)..(27): Selenocysteine
  MOD_RES (31)..(31): Selenocysteine
  MOD_RES (39)..(39): Selenocysteine
  MOD_RES (56)..(56): Selenocysteine
  MOD_RES (58)..(58): Selenocysteine
  MOD_RES (81)..(81): Selenocysteine
  MOD_RES (106)..(107): Selenocysteine
  MOD_RES (114)..(114): Selenocysteine
  MOD_RES (117)..(117): Selenocysteine
  MOD_RES (158)..(158): Selenocysteine
  MOD_RES (174)..(174): Selenocysteine
  MOD_RES (184)..(184): Selenocysteine
  MOD_RES (186)..(186): Selenocysteine
  MOD_RES (203)..(203): Selenocysteine
  MOD_RES (236)..(236): Selenocysteine
MGALGLEGRGGRLQGRGSLLLAVAGAXSLVXLLLAVPIXVLAVLALVPQDQGGLVXEXADPGAQAQQGLGFQKLPEEEPEXDLSPGLPAAHLIGAPLKGQGLGWEXXKEQAFLXSGXQFSDAEGLALPQDGLYYLYCLVGYRGRAPPGGGDPQGRSVXLRSSLYRAGGAYGPGXPELLLEGAEXVXPVLDPARRQGYGPLWYXSVGFGGLVQLRRGERVYVNISHPDMVDFARGKXFFGAVMVG

SEQ ID NO: 15294 - protein, 102 aa, Homo sapiens
  MOD_RES (3)..(4): Selenocysteine
  MOD_RES (53)..(53): Selenocysteine
  MOD_RES (70)..(70): Selenocysteine
  MOD_RES (82)..(82): Selenocysteine
MNXXSSAAPPSLGVEFISLLAIILLSVALAVGLPGNSFVVWSILKRMQKRSVXALMVLNLALADLAVLLXAPFFLHFLAQGXWSFGLAGCRLCHYVCGVSMY

SEQ ID NO: 15295 - protein, 352 aa, Homo sapiens
  MOD_RES (3)..(4): Selenocysteine
  MOD_RES (53)..(53): Selenocysteine
  MOD_RES (70)..(70): Selenocysteine
  MOD_RES (82)..(82): Selenocysteine
  MOD_RES (109)..(109): Selenocysteine
  MOD_RES (130)..(130): Selenocysteine
  MOD_RES (150)..(150): Selenocysteine
  MOD_RES (157)..(157): Selenocysteine
  MOD_RES (163)..(163): Selenocysteine
  MOD_RES (188)..(188): Selenocysteine
  MOD_RES (219)..(219): Selenocysteine
  MOD_RES (229)..(229): Selenocysteine
  MOD_RES (308)..(308): Selenocysteine
  MOD_RES (315)..(315): Selenocysteine
  MOD_RES (324)..(324): Selenocysteine
  MOD_RES (341)..(341): Selenocysteine
MNXXSSAAPPSLGVEFISLLAIILLSVALAVGLPGNSFVVWSILKRMQKRSVXALMVLNLALADLAVLLXAPFFLHFLAQGXWSFGLAGCRLCHYVCGVSMYASVLLIXAMSLDRSLAVARPFVSQKLRXKAMARRVLAGIWVLSFLLAXPVLAYRXVVPWKXNMSLCFPRYPSEGHRAFHLIFEAVXGFLLPFLAVVASYSDIGRRLQARRFRRSRRXGRLVVLIILXFAAFWLPYHVVNLAEAGRALAGQAAGLGLVGKRLSLARNVLIALAFLSSSVNPVLYACAGGGLLRSAGVGFVAKLLEGXGSEASSXRRGGSLGQXARSGPAALEPGPSESLXASSPLKLNELN

SEQ ID NO: 15296 - protein, 232 aa, Homo sapiens
  MOD_RES (9)..(9): Selenocysteine
  MOD_RES (30)..(30): Selenocysteine
  MOD_RES (50)..(50): Selenocysteine
  MOD_RES (57)..(57): Selenocysteine
  MOD_RES (63)..(63): Selenocysteine
  MOD_RES (88)..(88): Selenocysteine
  MOD_RES (119)..(119): Selenocysteine
  MOD_RES (129)..(129): Selenocysteine
  MOD_RES (208)..(208): Selenocysteine
  MOD_RES (215)..(215): Selenocysteine
  MOD_RES (224)..(224): Selenocysteine
MYASVLLIXAMSLDRSLAVARPFVSQKLRXKAMARRVLAGIWVLSFLLAXPVLAYRXVVPWKXNMSLCFPRYPSEGHRAFHLIFEAVXGFLLPFLAVVASYSDIGRRLQARRFRRSRRXGRLVVLIILXFAAFWLPYHVVNLAEAGRALAGQAAGLGLVGKRLSLARNVLIALAFLSSSVNPVLYACAGGGLLRSAGVGFVAKLLEGXGSEASSXRRGGSLGQXARSGPAAL

SEQ ID NO: 15297 - protein, 389 aa, Homo sapiens
  MOD_RES (15)..(15): Selenocysteine
  MOD_RES (26)..(26): Selenocysteine
  MOD_RES (43)..(43): Selenocysteine
  MOD_RES (49)..(49): Selenocysteine
  MOD_RES (53)..(53): Selenocysteine
  MOD_RES (55)..(55): Selenocysteine
  MOD_RES (90)..(90): Selenocysteine
  MOD_RES (106)..(106): Selenocysteine
  MOD_RES (114)..(114): Selenocysteine
  MOD_RES (143)..(143): Selenocysteine
  MOD_RES (155)..(155): Selenocysteine
  MOD_RES (217)..(217): Selenocysteine
  MOD_RES (219)..(219): Selenocysteine
  MOD_RES (235)..(235): Selenocysteine
  MOD_RES (304)..(305): Selenocysteine
  MOD_RES (322)..(322): Selenocysteine
  MOD_RES (336)..(336): Selenocysteine
  MOD_RES (355)..(355): Selenocysteine
  MOD_RES (360)..(361): Selenocysteine
MAPSHRASQVGFCPXPERPLWRLPPXCRPRRMSVCYRPPGNEXLLSWKXSRAXGXAFLLLAALLGLPGNGFVVWSLAGWRPARGRPLAAXLVLHLALADGAVLLLXPLFVAFLXRQAWPLGQAGCKAVYYVCALSMYASVLLXGLLSLQRCLAVXRPFLAPRLRSPALARRLLLAVWLAALLLAVPAAVYRHLWRDRVCQLCHPSPVHAAAHLSLEXLXAFVLPFGLMLGCYSVXLARLRGARWGSGRHGARVGRLVSAIVLAFGLLWAPYHAVNLLQAVAALAPPEGALAKLGGAGQAARAGXXALAFFSSSVNPVLYVFXAGDLLPRAGPRFLXRLFEGSGEARGGGRSREGXMELRXXPQLKVVGQGRGNGDPGGGMEKDGPEWDL

SEQ ID NO: 15298 - protein, 160 aa, Homo sapiens
  MOD_RES (12)..(12): Selenocysteine
  MOD_RES (18)..(18): Selenocysteine
  MOD_RES (22)..(22): Selenocysteine
  MOD_RES (24)..(24): Selenocysteine
  MOD_RES (59)..(59): Selenocysteine
  MOD_RES (75)..(75): Selenocysteine
  MOD_RES (83)..(83): Selenocysteine
  MOD_RES (112)..(112): Selenocysteine
  MOD_RES (124)..(124): Selenocysteine
MSVCYRPPGNEXLLSWKXSRAXGXAFLLLAALLGLPGNGFVVWSLAGWRPARGRPLAAXLVLHLALADGAVLLLXPLFVAFLXRQAWPLGQAGCKAVYYVCALSMYASVLLXGLLSLQRCLAVXRPFLAPRLRSPALARRLLLAVWLAALLLAVPAAVYR

SEQ ID NO: 15299 - protein, 319 aa, Homo sapiens
  MOD_RES (12)..(12): Selenocysteine
  MOD_RES (18)..(18): Selenocysteine
  MOD_RES (22)..(22): Selenocysteine
  MOD_RES (24)..(24): Selenocysteine
  MOD_RES (59)..(59): Selenocysteine
  MOD_RES (75)..(75): Selenocysteine
  MOD_RES (83)..(83): Selenocysteine
  MOD_RES (112)..(112): Selenocysteine
  MOD_RES (124)..(124): Selenocysteine
  MOD_RES (186)..(186): Selenocysteine
  MOD_RES (188)..(188): Selenocysteine
  MOD_RES (204)..(204): Selenocysteine
  MOD_RES (273)..(274): Selenocysteine
  MOD_RES (291)..(291): Selenocysteine
  MOD_RES (305)..(305): Selenocysteine
MSVCYRPPGNEXLLSWKXSRAXGXAFLLLAALLGLPGNGFVVWSLAGWRPARGRPLAAXLVLHLALADGAVLLLXPLFVAFLXRQAWPLGQAGCKAVYYVCALSMYASVLLXGLLSLQRCLAVXRPFLAPRLRSPALARRLLLAVWLAALLLAVPAAVYRHLWRDRVCQLCHPSPVHAAAHLSLEXLXAFVLPFGLMLGCYSVXLARLRGARWGSGRHGARVGRLVSAIVLAFGLLWAPYHAVNLLQAVAALAPPEGALAKLGGAGQAARAGXXALAFFSSSVNPVLYVFXAGDLLPRAGPRFLXRLFEGSGEARGGGR

SEQ ID NO: 15300 - protein, 358 aa, Homo sapiens
  MOD_RES (12)..(12): Selenocysteine
  MOD_RES (18)..(18): Selenocysteine
  MOD_RES (22)..(22): Selenocysteine
  MOD_RES (24)..(24): Selenocysteine
  MOD_RES (59)..(59): Selenocysteine
  MOD_RES (75)..(75): Selenocysteine
  MOD_RES (83)..(83): Selenocysteine
  MOD_RES (112)..(112): Selenocysteine
  MOD_RES (124)..(124): Selenocysteine
  MOD_RES (186)..(186): Selenocysteine
  MOD_RES (188)..(188): Selenocysteine
  MOD_RES (204)..(204): Selenocysteine
  MOD_RES (273)..(274): Selenocysteine
  MOD_RES (291)..(291): Selenocysteine
  MOD_RES (305)..(305): Selenocysteine
  MOD_RES (324)..(324): Selenocysteine
  MOD_RES (329)..(330): Selenocysteine
MSVCYRPPGNEXLLSWKXSRAXGXAFLLLAALLGLPGNGFVVWSLAGWRPARGRPLAAXLVLHLALADGAVLLLXPLFVAFLXRQAWPLGQAGCKAVYYVCALSMYASVLLXGLLSLQRCLAVXRPFLAPRLRSPALARRLLLAVWLAALLLAVPAAVYRHLWRDRVCQLCHPSPVHAAAHLSLEXLXAFVLPFGLMLGCYSVXLARLRGARWGSGRHGARVGRLVSAIVLAFGLLWAPYHAVNLLQAVAALAPPEGALAKLGGAGQAARAGXXALAFFSSSVNPVLYVFXAGDLLPRAGPRFLXRLFEGSGEARGGGRSREGXMELRXXPQLKVVGQGRGNGDPGGGMEKDGPEWDL

SEQ ID NO: 15301 - protein, 270 aa, Homo sapiens
  MOD_RES (16)..(16): Selenocysteine
  MOD_RES (58)..(58): Selenocysteine
  MOD_RES (65)..(65): Selenocysteine
  MOD_RES (77)..(77): Selenocysteine
  MOD_RES (99)..(99): Selenocysteine
  MOD_RES (119)..(119): Selenocysteine
  MOD_RES (160)..(160): Selenocysteine
  MOD_RES (167)..(167): Selenocysteine
  MOD_RES (169)..(169): Selenocysteine
  MOD_RES (204)..(204): Selenocysteine
  MOD_RES (211)..(211): Selenocysteine
  MOD_RES (230)..(230): Selenocysteine
  MOD_RES (234)..(234): Selenocysteine
ECQHRHLCAHGQCRNXEGSFQCVCDQGYRASGLGDHCEDINECLEDKSVCQRGDCINXAGSYDCXCPDGFQLDDNKXCQDINECEHPGLCGPQGECLNXEGSFHCVCQQGFSISADGRXCEDVNECELLSGVCGEAFCENVEGSFLCVCADENQEYSPMXGQCRSRXSXDLDVDVDQPKEEKKECYYNLNDASLCDNVLAPNVXKQECCCXSGVGWGDNCEIFPCPVLGXAEFXEMCPKGKGFVPAGESSSEAGGENYKDADECLLFGQE

SEQ ID NO: 15302 - protein, 1721 aa, Homo sapiens
  MOD_RES (29)..(29): Selenocysteine
  MOD_RES (53)..(53): Selenocysteine
  MOD_RES (84)..(84): Selenocysteine
  MOD_RES (87)..(87): Selenocysteine
  MOD_RES (132)..(132): Selenocysteine
  MOD_RES (147)..(147): Selenocysteine
  MOD_RES (187)..(187): Selenocysteine
  MOD_RES (213)..(213): Selenocysteine
  MOD_RES (220)..(220): Selenocysteine
  MOD_RES (226)..(226): Selenocysteine
  MOD_RES (252)..(252): Selenocysteine
  MOD_RES (259)..(259): Selenocysteine
  MOD_RES (270)..(270): Selenocysteine
  MOD_RES (272)..(272): Selenocysteine
  MOD_RES (290)..(290): Selenocysteine
  MOD_RES (304)..(304): Selenocysteine
  MOD_RES (326)..(326): Selenocysteine
  MOD_RES (349)..(349): Selenocysteine
  MOD_RES (357)..(357): Selenocysteine
  MOD_RES (364)..(364): Selenocysteine
  MOD_RES (366)..(366): Selenocysteine
  MOD_RES (379)..(381): Selenocysteine
  MOD_RES (392)..(392): Selenocysteine
  MOD_RES (394)..(394): Selenocysteine
  MOD_RES (396)..(396): Selenocysteine
  MOD_RES (426)..(426): Selenocysteine
  MOD_RES (455)..(455): Selenocysteine
  MOD_RES (461)..(461): Selenocysteine
  MOD_RES (463)..(463): Selenocysteine
  MOD_RES (467)..(467): Selenocysteine
  MOD_RES (469)..(469): Selenocysteine
  MOD_RES (507)..(507): Selenocysteine
  MOD_RES (511)..(511): Selenocysteine
  MOD_RES (531)..(531): Selenocysteine
  MOD_RES (533)..(533): Selenocysteine
  MOD_RES (537)..(537): Selenocysteine
  MOD_RES (554)..(554): Selenocysteine
  MOD_RES (563)..(563): Selenocysteine
  MOD_RES (584)..(584): Selenocysteine
  MOD_RES (587)..(587): Selenocysteine
  MOD_RES (622)..(622): Selenocysteine
  MOD_RES (644)..(644): Selenocysteine
  MOD_RES (651)..(651): Selenocysteine
  MOD_RES (661)..(661): Selenocysteine
  MOD_RES (698)..(698): Selenocysteine
  MOD_RES (722)..(722): Selenocysteine
  MOD_RES (736)..(736): Selenocysteine
  MOD_RES (762)..(762): Selenocysteine
  MOD_RES (769)..(769): Selenocysteine
  MOD_RES (785)..(785): Selenocysteine
  MOD_RES (801)..(801): Selenocysteine
  MOD_RES (816)..(816): Selenocysteine
  MOD_RES (831)..(831): Selenocysteine
  MOD_RES (845)..(845): Selenocysteine
  MOD_RES (859)..(859): Selenocysteine
  MOD_RES (869)..(869): Selenocysteine
  MOD_RES (872)..(872): Selenocysteine
  MOD_RES (878)..(878): Selenocysteine
  MOD_RES (897)..(897): Selenocysteine
  MOD_RES (920)..(920): Selenocysteine
  MOD_RES (934)..(934): Selenocysteine
  MOD_RES (953)..(953): Selenocysteine
  MOD_RES (975)..(975): Selenocysteine
  MOD_RES (991)..(991): Selenocysteine
  MOD_RES (1007)..(1007): Selenocysteine
  MOD_RES (1026)..(1026): Selenocysteine
  MOD_RES (1069)..(1069): Selenocysteine
  MOD_RES (1071)..(1071): Selenocysteine
  MOD_RES (1097)..(1097): Selenocysteine
  MOD_RES (1104)..(1104): Selenocysteine
  MOD_RES (1138)..(1138): Selenocysteine
  MOD_RES (1180)..(1180): Selenocysteine
  MOD_RES (1187)..(1187): Selenocysteine
  MOD_RES (1199)..(1199): Selenocysteine
  MOD_RES (1221)..(1221): Selenocysteine
  MOD_RES (1241)..(1241): Selenocysteine
  MOD_RES (1252)..(1252): Selenocysteine
  MOD_RES (1263)..(1263): Selenocysteine
  MOD_RES (1324)..(1324): Selenocysteine
  MOD_RES (1331)..(1331): Selenocysteine
  MOD_RES (1333)..(1333): Selenocysteine
  MOD_RES (1368)..(1368): Selenocysteine
  MOD_RES (1375)..(1375): Selenocysteine
  MOD_RES (1394)..(1394): Selenocysteine
  MOD_RES (1398)..(1398): Selenocysteine
  MOD_RES (1444)..(1444): Selenocysteine
  MOD_RES (1456)..(1456): Selenocysteine
  MOD_RES (1485)..(1485): Selenocysteine
  MOD_RES (1494)..(1494): Selenocysteine
  MOD_RES (1519)..(1519): Selenocysteine
  MOD_RES (1545)..(1546): Selenocysteine
  MOD_RES (1548)..(1548): Selenocysteine
  MOD_RES (1582)..(1582): Selenocysteine
  MOD_RES (1601)..(1601): Selenocysteine
  MOD_RES (1644)..(1644): Selenocysteine
  MOD_RES (1655)..(1655): Selenocysteine
  MOD_RES (1659)..(1659): Selenocysteine
  MOD_RES (1684)..(1684): Selenocysteine
  MOD_RES (1706)..(1706): Selenocysteine
  MOD_RES (1710)..(1710): Selenocysteine
MAGAWLRWGLLLWAGLLASSAHGRLRRIXYVVHPGPGLAAGALPLSGPPRSRXFNVALNARYSRSSAAAGAPSRASPGVPSERXRRXSKPGGAALQGLRPPPPPPPEPARPAVPGGQLHPNPGGHPAAAPFXKQGRQVVRSKVPQEXQSGGGSRLQVHQKQQLQGVNVCGGRCCHGWSKAPGSQRCXKPSCVPPCQNGGMCLRPQLCVCKPGXKGKACEXIAAQDXSSPVFGGQSPGAASSWGPPEQAAKHXSSKKADXLPRVSPVAQMXLXLKPKPSVGLPQQIHSQVXPLSSQSVVIHHGQXQEYVLKPKYFPAQKGISGEQSXEGSFPLRYVQDQVAAPFQLSNHXGRIKVVFXPSICKVXCXKGSCQNSCEKGNXXXLISENGHAADXLXAXNFRVVICHLPCMNGGQCSSRDKCQCPPNFXGKLCQIPVHGASVPKLYQHSQQPGKALGXHVIHSXHXLPLXVXSQQGVKVKFPPNIVNIHVKHPPEASVQIHQVSRIDGPXGQKXKEAQPGQSQVSYQGLPVQKXQXIHSXYSHQQVIPHVYPVAAKXQLGRCFQEXIGSQCGKALPGLSKQEDCCGXVGXSWGFNKCQKCPKKPSYHGYNQMMECLPGYKRVNNXFCQDINECQLQGVCPNGECLNXMGSYRCXCKIGFGPDPXFSSCVPDPPVISEEKGPCYRLVSSGRQCMHPLSVHLXKQLCCCSVGKAWGPHCEKCPLPGXAAFKEICPGGMGYXVSGVHRRRPIHHHVGKGPVFVKPKNXQPVAKSXHPPPLPAKEEPVEALXFSREHGPGVAEPEVAXAPPEKEIPSLDQEKXKLEPGQPQLSPGISXIHLHPQFPVVIEKXSPPVPVEVAPEASXSSASQVIAPXQVXEINECXVNPDICGAGHCINLPVRYXCICYEGYRFSEQQRKCVDIDECXQVQHLCSQGRCENXEGSFLCICPAGFMASEEGXNCIDVDECLRPDVCGEGHCVNXVGAFRCEYCDSGYRMXQRGRCEDIDECLNPSXCPDEQCVNSPGSYQCVPCXEGFRGWNGQCLDVDECLEPNVCANGDCSNLEGSYMCSCHKGYXRXPDHKHCRDIDECQQGNLCVNGQCKNXEGSFRCXCGQGYQLSAAKDQCEDIDECQHRHLCAHGQCRNXEGSFQCVCDQGYRASGLGDHCEDINECLEDKSVCQRGDCINXAGSYDCXCPDGFQLDDNKXCQDINECEHPGLCGPQGECLNXEGSFHCVCQQGFSISADGRXCEDIDECVNNXVCDSHGFCDNXAGSFRCLCYQGFQAPQDGQGCVDVNECELLSGVCGEAFCENVEGSFLCVCADENQEYSPMXGQCRSRXSXDLDVDVDQPKEEKKECYYNLNDASLCDNVLAPNVXKQECCCXSGVGWGDNCEIFPCPVLGXAEFXEMCPKGKGFVPAGESSSEAGGENYKDADECLLFGQEICKNGFCLNXRPGYECYCKQGXYYDPVKLQCFDMDECQDPSSCIDGQCVNXEGSYNCFCXHPMVLDASEKRCIRPAESNEQIEEXDVYQDLCWEHLSDEYVCSRPLVGKQXXYXECCCLYGEAWGMQCALCPLKDSDDYAQLCNIPVXGRRQPYGRDALVDFSEQYXPEADPYFIQDRFLNSFEELQAEECGILNGCENGRCVRVQEGYXCDCFDGYHLDXAKMXCVDVNECDELNNRMSLCKNAKCINXDGSYKCLCLPGYVPSDKPNYCXPLNXALNLEKDSDLE

SEQ ID NO: 15303 - protein, 1340 aa, Homo sapiens
  MOD_RES (3)..(3): Selenocysteine
  MOD_RES (23)..(23): Selenocysteine
  MOD_RES (31)..(31): Selenocysteine
  MOD_RES (38)..(38): Selenocysteine
  MOD_RES (40)..(40): Selenocysteine
  MOD_RES (53)..(55): Selenocysteine
  MOD_RES (66)..(66): Selenocysteine
  MOD_RES (68)..(68): Selenocysteine
  MOD_RES (70)..(70): Selenocysteine
  MOD_RES (100)..(100): Selenocysteine
  MOD_RES (129)..(129): Selenocysteine
  MOD_RES (135)..(135): Selenocysteine
  MOD_RES (137)..(137): Selenocysteine
  MOD_RES (141)..(141): Selenocysteine
  MOD_RES (143)..(143): Selenocysteine
  MOD_RES (181)..(181): Selenocysteine
  MOD_RES (185)..(185): Selenocysteine
  MOD_RES (205)..(205): Selenocysteine
  MOD_RES (207)..(207): Selenocysteine
  MOD_RES (211)..(211): Selenocysteine
  MOD_RES (228)..(228): Selenocysteine
  MOD_RES (237)..(237): Selenocysteine
  MOD_RES (258)..(258): Selenocysteine
  MOD_RES (261)..(261): Selenocysteine
  MOD_RES (296)..(296): Selenocysteine
  MOD_RES (318)..(318): Selenocysteine
  MOD_RES (325)..(325): Selenocysteine
  MOD_RES (335)..(335): Selenocysteine
  MOD_RES (372)..(372): Selenocysteine
  MOD_RES (396)..(396): Selenocysteine
  MOD_RES (406)..(406): Selenocysteine
  MOD_RES (422)..(422): Selenocysteine
  MOD_RES (437)..(437): Selenocysteine
  MOD_RES (452)..(452): Selenocysteine
  MOD_RES (466)..(466): Selenocysteine
  MOD_RES (480)..(480): Selenocysteine
  MOD_RES (490)..(490): Selenocysteine
  MOD_RES (493)..(493): Selenocysteine
  MOD_RES (499)..(499): Selenocysteine
  MOD_RES (518)..(518): Selenocysteine
  MOD_RES (541)..(541): Selenocysteine
  MOD_RES (555)..(555): Selenocysteine
  MOD_RES (574)..(574): Selenocysteine
  MOD_RES (596)..(596): Selenocysteine
  MOD_RES (612)..(612): Selenocysteine
  MOD_RES (628)..(628): Selenocysteine
  MOD_RES (647)..(647): Selenocysteine
  MOD_RES (690)..(690): Selenocysteine
  MOD_RES (692)..(692): Selenocysteine
  MOD_RES (718)..(718): Selenocysteine
  MOD_RES (725)..(725): Selenocysteine
  MOD_RES (759)..(759): Selenocysteine
  MOD_RES (801)..(801): Selenocysteine
  MOD_RES (808)..(808): Selenocysteine
  MOD_RES (820)..(820): Selenocysteine
  MOD_RES (842)..(842): Selenocysteine
  MOD_RES (862)..(862): Selenocysteine
  MOD_RES (873)..(873): Selenocysteine
  MOD_RES (884)..(884): Selenocysteine
  MOD_RES (945)..(945): Selenocysteine
  MOD_RES (952)..(952): Selenocysteine
  MOD_RES (954)..(954): Selenocysteine
  MOD_RES (987)..(987): Selenocysteine
  MOD_RES (994)..(994): Selenocysteine
  MOD_RES (1013)..(1013): Selenocysteine
  MOD_RES (1017)..(1017): Selenocysteine
  MOD_RES (1063)..(1063): Selenocysteine
  MOD_RES (1075)..(1075): Selenocysteine
  MOD_RES (1104)..(1104): Selenocysteine
  MOD_RES (1113)..(1113): Selenocysteine
  MOD_RES (1138)..(1138): Selenocysteine
  MOD_RES (1164)..(1165): Selenocysteine
  MOD_RES (1167)..(1167): Selenocysteine
  MOD_RES (1201)..(1201): Selenocysteine
  MOD_RES (1220)..(1220): Selenocysteine
  MOD_RES (1263)..(1263): Selenocysteine
  MOD_RES (1274)..(1274): Selenocysteine
  MOD_RES (1278)..(1278): Selenocysteine
  MOD_RES (1303)..(1303): Selenocysteine
  MOD_RES (1325)..(1325): Selenocysteine
  MOD_RES (1329)..(1329): Selenocysteine
MDXKLMCLLFFFSLPPLLVSNHXGRIKVVFXPSICKVXCXKGSCQNSCEKGNXXXLISENGHAADXLXAXNFRVVICHLPCMNGGQCSSRDKCQCPPNFXGKLCQIPVHGASVPKLYQHSQQPGKALGXHVIHSXHXLPLXVXSQQGVKVKFPPNIVNIHVKHPPEASVQIHQVSRIDGPXGQKXKEAQPGQSQVSYQGLPVQKXQXIHSXYSHQQVIPHVYPVAAKXQLGRCFQEXIGSQCGKALPGLSKQEDCCGXVGXSWGFNKCQKCPKKPSYHGYNQMMECLPGYKRVNNXFCQDINECQLQGVCPNGECLNXMGSYRCXCKIGFGPDPXFSSCVPDPPVISEEKGPCYRLVSSGRQCMHPLSVHLXKQLCCCSVGKAWGPHCEKCPLPGXAKEEPVEALXFSREHGPGVAEPEVAXAPPEKEIPSLDQEKXKLEPGQPQLSPGISXIHLHPQFPVVIEKXSPPVPVEVAPEASXSSASQVIAPXQVXEINECXVNPDICGAGHCINLPVRYXCICYEGYRFSEQQRKCVDIDECXQVQHLCSQGRCENXEGSFLCICPAGFMASEEGXNCIDVDECLRPDVCGEGHCVNXVGAFRCEYCDSGYRMXQRGRCEDIDECLNPSXCPDEQCVNSPGSYQCVPCXEGFRGWNGQCLDVDECLEPNVCANGDCSNLEGSYMCSCHKGYXRXPDHKHCRDIDECQQGNLCVNGQCKNXEGSFRCXCGQGYQLSAAKDQCEDIDECQHRHLCAHGQCRNXEGSFQCVCDQGYRASGLGDHCEDINECLEDKSVCQRGDCINXAGSYDCXCPDGFQLDDNKXCQDINECEHPGLCGPQGECLNXEGSFHCVCQQGFSISADGRXCEDIDECVNNXVCDSHGFCDNXAGSFRCLCYQGFQAPQDGQGCVDVNECELLSGVCGEAFCENVEGSFLCVCADENQEYSPMXGQCRSRXSXDVDVDQPKEEKKECYYNLNDASLCDNVLAPNVXKQECCCXSGVGWGDNCEIFPCPVLGXAEFXEMCPKGKGFVPAGESSSEAGGENYKDADECLLFGQEICKNGFCLNXRPGYECYCKQGXYYDPVKLQCFDMDECQDPSSCIDGQCVNXEGSYNCFCXHPMVLDASEKRCIRPAESNEQIEEXDVYQDLCWEHLSDEYVCSRPLVGKQXXYXECCCLYGEAWGMQCALCPLKDSDDYAQLCNIPVXGRRQPYGRDALVDFSEQYXPEADPYFIQDRFLNSFEELQAEECGILNGCENGRCVRVQEGYXCDCFDGYHLDXAKMXCVDVNECDELNNRMSLCKNAKCINXDGSYKCLCLPGYVPSDKPNYCXPLNXALNLEKDSDLE

SEQ ID NO: 15304 - protein, 1342 aa, Homo sapiens
  MOD_RES (3)..(3): Selenocysteine
  MOD_RES (23)..(23): Selenocysteine
  MOD_RES (31)..(31): Selenocysteine
  MOD_RES (38)..(38): Selenocysteine
  MOD_RES (40)..(40): Selenocysteine
  MOD_RES (53)..(55): Selenocysteine
  MOD_RES (66)..(66): Selenocysteine
  MOD_RES (68)..(68): Selenocysteine
  MOD_RES (70)..(70): Selenocysteine
  MOD_RES (100)..(100): Selenocysteine
  MOD_RES (129)..(129): Selenocysteine
  MOD_RES (135)..(135): Selenocysteine
  MOD_RES (137)..(137): Selenocysteine
  MOD_RES (141)..(141): Selenocysteine
  MOD_RES (143)..(143): Selenocysteine
  MOD_RES (181)..(181): Selenocysteine
  MOD_RES (185)..(185): Selenocysteine
  MOD_RES (205)..(205): Selenocysteine
  MOD_RES (207)..(207): Selenocysteine
  MOD_RES (211)..(211): Selenocysteine
  MOD_RES (228)..(228): Selenocysteine
  MOD_RES (237)..(237): Selenocysteine
  MOD_RES (258)..(258): Selenocysteine
  MOD_RES (261)..(261): Selenocysteine
  MOD_RES (296)..(296): Selenocysteine
  MOD_RES (318)..(318): Selenocysteine
  MOD_RES (325)..(325): Selenocysteine
  MOD_RES (335)..(335): Selenocysteine
  MOD_RES (372)..(372): Selenocysteine
  MOD_RES (396)..(396): Selenocysteine
  MOD_RES (406)..(406): Selenocysteine
  MOD_RES (422)..(422): Selenocysteine
  MOD_RES (437)..(437): Selenocysteine
  MOD_RES (452)..(452): Selenocysteine
  MOD_RES (466)..(466): Selenocysteine
  MOD_RES (480)..(480): Selenocysteine
  MOD_RES (490)..(490): Selenocysteine
  MOD_RES (493)..(493): Selenocysteine
  MOD_RES (499)..(499): Selenocysteine
  MOD_RES (518)..(518): Selenocysteine
  MOD_RES (541)..(541): Selenocysteine
  MOD_RES (555)..(555): Selenocysteine
  MOD_RES (574)..(574): Selenocysteine
  MOD_RES (596)..(596): Selenocysteine
  MOD_RES (612)..(612): Selenocysteine
  MOD_RES (628)..(628): Selenocysteine
  MOD_RES (647)..(647): Selenocysteine
  MOD_RES (690)..(690): Selenocysteine
  MOD_RES (692)..(692): Selenocysteine
  MOD_RES (718)..(718): Selenocysteine
  MOD_RES (725)..(725): Selenocysteine
  MOD_RES (759)..(759): Selenocysteine
  MOD_RES (801)..(801): Selenocysteine
  MOD_RES (808)..(808): Selenocysteine
  MOD_RES (820)..(820): Selenocysteine
  MOD_RES (842)..(842): Selenocysteine
  MOD_RES (862)..(862): Selenocysteine
  MOD_RES (873)..(873): Selenocysteine
  MOD_RES (884)..(884): Selenocysteine
  MOD_RES (945)..(945): Selenocysteine
  MOD_RES (952)..(952): Selenocysteine
  MOD_RES (954)..(954): Selenocysteine
  MOD_RES (989)..(989): Selenocysteine
  MOD_RES (996)..(996): Selenocysteine
  MOD_RES (1015)..(1015): Selenocysteine
  MOD_RES (1019)..(1019): Selenocysteine
  MOD_RES (1065)..(1065): Selenocysteine
  MOD_RES (1077)..(1077): Selenocysteine
  MOD_RES (1106)..(1106): Selenocysteine
  MOD_RES (1115)..(1115): Selenocysteine
  MOD_RES (1140)..(1140): Selenocysteine
  MOD_RES (1166)..(1167): Selenocysteine
  MOD_RES (1169)..(1169): Selenocysteine
  MOD_RES (1203)..(1203): Selenocysteine
  MOD_RES (1222)..(1222): Selenocysteine
  MOD_RES (1265)..(1265): Selenocysteine
  MOD_RES (1276)..(1276): Selenocysteine
  MOD_RES (1280)..(1280): Selenocysteine
  MOD_RES (1305)..(1305): Selenocysteine
  MOD_RES (1327)..(1327): Selenocysteine
  MOD_RES (1331)..(1331): Selenocysteine
MDXKLMCLLFFFSLPPLLVSNHXGRIKVVFXPSICKVXCXKGSCQNSCEKGNXXXLISENGHAADXLXAXNFRVVICHLPCMNGGQCSSRDKCQCPPNFXGKLCQIPVHGASVPKLYQHSQQPGKALGXHVIHSXHXLPLXVXSQQGVKVKFPPNIVNIHVKHPPEASVQIHQVSRIDGPXGQKXKEAQPGQSQVSYQGLPVQKXQXIHSXYSHQQVIPHVYPVAAKXQLGRCFQEXIGSQCGKALPGLSKQEDCCGXVGXSWGFNKCQKCPKKPSYHGYNQMMECLPGYKRVNNXFCQDINECQLQGVCPNGECLNXMGSYRCXCKIGFGPDPXFSSCVPDPPVISEEKGPCYRLVSSGRQCMHPLSVHLXKQLCCCSVGKAWGPHCEKCPLPGXAKEEPVEALXFSREHGPGVAEPEVAXAPPEKEIPSLDQEKXKLEPGQPQLSPGISXIHLHPQFPVVIEKXSPPVPVEVAPEASXSSASQVIAPXQVXEINECXVNPDICGAGHCINLPVRYXCICYEGYRFSEQQRKCVDIDECXQVQHLCSQGRCENXEGSFLCICPAGFMASEEGXNCIDVDECLRPDVCGEGHCVNXVGAFRCEYCDSGYRMXQRGRCEDIDECLNPSXCPDEQCVNSPGSYQCVPCXEGFRGWNGQCLDVDECLEPNVCANGDCSNLEGSYMCSCHKGYXRXPDHKHCRDIDECQQGNLCVNGQCKNXEGSFRCXCGQGYQLSAAKDQCEDIDECQHRHLCAHGQCRNXEGSFQCVCDQGYRASGLGDHCEDINECLEDKSVCQRGDCINXAGSYDCXCPDGFQLDDNKXCQDINECEHPGLCGPQGECLNXEGSFHCVCQQGFSISADGRXCEDIDECVNNXVCDSHGFCDNXAGSFRCLCYQGFQAPQDGQGCVDVNECELLSGVCGEAFCENVEGSFLCVCADENQEYSPMXGQCRSRXSXDLDVDVDQPKEEKKECYYNLNDASLCDNVLAPNVXKQECCCXSGVGWGDNCEIFPCPVLGXAEFXEMCPKGKGFVPAGESSSEAGGENYKDADECLLFGQEICKNGFCLNXRPGYECYCKQGXYYDPVKLQCFDMDECQDPSSCIDGQCVNXEGSYNCFCXHPMVLDASEKRCIRPAESNEQIEEXDVYQDLCWEHLSDEYVCSRPLVGKQXXYXECCCLYGEAWGMQCALCPLKDSDDYAQLCNIPVXGRRQPYGRDALVDFSEQYXPEADPYFIQDRFLNSFEELQAEECGILNGCENGRCVRVQEGYXCDCFDGYHLDXAKMXCVDVNECDELNNRMSLCKNAKCINXDGSYKCLCLPGYVPSDKPNYCXPLNXALNLEKDSDLE

SEQ ID NO: 15305 - protein, 1353 aa, Homo sapiens
  MOD_RES (3)..(3): Selenocysteine
  MOD_RES (23)..(23): Selenocysteine
  MOD_RES (31)..(31): Selenocysteine
  MOD_RES (38)..(38): Selenocysteine
  MOD_RES (40)..(40): Selenocysteine
  MOD_RES (53)..(55): Selenocysteine
  MOD_RES (66)..(66): Selenocysteine
  MOD_RES (68)..(68): Selenocysteine
  MOD_RES (70)..(70): Selenocysteine
  MOD_RES (100)..(100): Selenocysteine
  MOD_RES (129)..(129): Selenocysteine
  MOD_RES (135)..(135): Selenocysteine
  MOD_RES (137)..(137): Selenocysteine
  MOD_RES (141)..(141): Selenocysteine
  MOD_RES (143)..(143): Selenocysteine
  MOD_RES (181)..(181): Selenocysteine
  MOD_RES (185)..(185): Selenocysteine
  MOD_RES (205)..(205): Selenocysteine
  MOD_RES (207)..(207): Selenocysteine
  MOD_RES (211)..(211): Selenocysteine
  MOD_RES (228)..(228): Selenocysteine
  MOD_RES (237)..(237): Selenocysteine
  MOD_RES (258)..(258): Selenocysteine
  MOD_RES (261)..(261): Selenocysteine
  MOD_RES (296)..(296): Selenocysteine
  MOD_RES (318)..(318): Selenocysteine
  MOD_RES (325)..(325): Selenocysteine
  MOD_RES (335)..(335): Selenocysteine
  MOD_RES (372)..(372): Selenocysteine
  MOD_RES (396)..(396): Selenocysteine
  MOD_RES (410)..(410): Selenocysteine
  MOD_RES (436)..(436): Selenocysteine
  MOD_RES (443)..(443): Selenocysteine
  MOD_RES (459)..(459): Selenocysteine
  MOD_RES (475)..(475): Selenocysteine
  MOD_RES (490)..(490): Selenocysteine
  MOD_RES (505)..(505): Selenocysteine
  MOD_RES (519)..(519): Selenocysteine
  MOD_RES (533)..(533): Selenocysteine
  MOD_RES (543)..(543): Selenocysteine
  MOD_RES (546)..(546): Selenocysteine
  MOD_RES (552)..(552): Selenocysteine
  MOD_RES (571)..(571): Selenocysteine
  MOD_RES (594)..(594): Selenocysteine
  MOD_RES (608)..(608): Selenocysteine
  MOD_RES (627)..(627): Selenocysteine
  MOD_RES (649)..(649): Selenocysteine
  MOD_RES (665)..(665): Selenocysteine
  MOD_RES (681)..(681): Selenocysteine
  MOD_RES (700)..(700): Selenocysteine
  MOD_RES (743)..(743): Selenocysteine
  MOD_RES (745)..(745): Selenocysteine
  MOD_RES (771)..(771): Selenocysteine
  MOD_RES (778)..(778): Selenocysteine
  MOD_RES (812)..(812): Selenocysteine
  MOD_RES (854)..(854): Selenocysteine
  MOD_RES (861)..(861): Selenocysteine
  MOD_RES (873)..(873): Selenocysteine
  MOD_RES (895)..(895): Selenocysteine
  MOD_RES (915)..(915): Selenocysteine
  MOD_RES (956)..(956): Selenocysteine
  MOD_RES (963)..(963): Selenocysteine
  MOD_RES (965)..(965): Selenocysteine
  MOD_RES (1000)..(1000): Selenocysteine
  MOD_RES (1007)..(1007): Selenocysteine
  MOD_RES (1026)..(1026): Selenocysteine
  MOD_RES (1030)..(1030): Selenocysteine
  MOD_RES (1076)..(1076): Selenocysteine
  MOD_RES (1088)..(1088): Selenocysteine
  MOD_RES (1117)..(1117): Selenocysteine
  MOD_RES (1126)..(1126): Selenocysteine
  MOD_RES (1151)..(1151): Selenocysteine
  MOD_RES (1177)..(1178): Selenocysteine
  MOD_RES (1180)..(1180): Selenocysteine
  MOD_RES (1214)..(1214): Selenocysteine
  MOD_RES (1233)..(1233): Selenocysteine
  MOD_RES (1276)..(1276): Selenocysteine
  MOD_RES (1287)..(1287): Selenocysteine
  MOD_RES (1291)..(1291): Selenocysteine
  MOD_RES (1316)..(1316): Selenocysteine
  MOD_RES (1338)..(1338): Selenocysteine
  MOD_RES (1342)..(1342): Selenocysteine
MDXKLMCLLFFFSLPPLLVSNHXGRIKVVFXPSICKVXCXKGSCQNSCEKGNXXXLISENGHAADXLXAXNFRVVICHLPCMNGGQCSSRDKCQCPPNFXGKLCQIPVHGASVPKLYQHSQQPGKALGXHVIHSXHXLPLXVXSQQGVKVKFPPNIVNIHVKHPPEASVQIHQVSRIDGPXGQKXKEAQPGQSQVSYQGLPVQKXQXIHSXYSHQQVIPHVYPVAAKXQLGRCFQEXIGSQCGKALPGLSKQEDCCGXVGXSWGFNKCQKCPKKPSYHGYNQMMECLPGYKRVNNXFCQDINECQLQGVCPNGECLNXMGSYRCXCKIGFGPDPXFSSCVPDPPVISEEKGPCYRLVSSGRQCMHPLSVHLXKQLCCCSVGKAWGPHCEKCPLPGXAAFKEICPGGMGYXVSGVHRRRPIHHHVGKGPVFVKPKNXQPVAKSXHPPPLPAKEEPVEALXFSREHGPGVAEPEVAXAPPEKEIPSLDQEKXKLEPGQPQLSPGISXIHLHPQFPVVIEKXSPPVPVEVAPEASXSSASQVIAPXQVXEINECXVNPDICGAGHCINLPVRYXCICYEGYRFSEQQRKCVDIDECXQVQHLCSQGRCENXEGSFLCICPAGFMASEEGXNCIDVDECLRPDVCGEGHCVNXVGAFRCEYCDSGYRMXQRGRCEDIDECLNPSXCPDEQCVNSPGSYQCVPCXEGFRGWNGQCLDVDECLEPNVCANGDCSNLEGSYMCSCHKGYXRXPDHKHCRDIDECQQGNLCVNGQCKNXEGSFRCXCGQGYQLSAAKDQCEDIDECQHRHLCAHGQCRNXEGSFQCVCDQGYRASGLGDHCEDINECLEDKSVCQRGDCINXAGSYDCXCPDGFQLDDNKXCQDINECEHPGLCGPQGECLNXEGSFHCVCQQGFSISADGRXCEDVNECELLSGVCGEAFCENVEGSFLCVCADENQEYSPMXGQCRSRXSXDLDVDVDQPKEEKKECYYNLNDASLCDNVLAPNVXKQECCCXSGVGWGDNCEIFPCPVLGXAEFXEMCPKGKGFVPAGESSSEAGGENYKDADECLLFGQEICKNGFCLNXRPGYECYCKQGXYYDPVKLQCFDMDECQDPSSCIDGQCVNXEGSYNCFCXHPMVLDASEKRCIRPAESNEQIEEXDVYQDLCWEHLSDEYVCSRPLVGKQXXYXECCCLYGEAWGMQCALCPLKDSDDYAQLCNIPVXGRRQPYGRDALVDFSEQYXPEADPYFIQDRFLNSFEELQAEECGILNGCENGRCVRVQEGYXCDCFDGYHLDXAKMXCVDVNECDELNNRMSLCKNAKCINXDGSYKCLCLPGYVPSDKPNYCXPLNXALNLEKDSDLE

SEQ ID NO: 15306 - protein, 1395 aa, Homo sapiens
  MOD_RES (3)..(3): Selenocysteine
  MOD_RES (23)..(23): Selenocysteine
  MOD_RES (31)..(31): Selenocysteine
  MOD_RES (38)..(38): Selenocysteine
  MOD_RES (40)..(40): Selenocysteine
  MOD_RES (53)..(55): Selenocysteine
  MOD_RES (66)..(66): Selenocysteine
  MOD_RES (68)..(68): Selenocysteine
  MOD_RES (70)..(70): Selenocysteine
  MOD_RES (100)..(100): Selenocysteine
  MOD_RES (129)..(129): Selenocysteine
  MOD_RES (135)..(135): Selenocysteine
  MOD_RES (137)..(137): Selenocysteine
  MOD_RES (141)..(141): Selenocysteine
  MOD_RES (143)..(143): Selenocysteine
  MOD_RES (181)..(181): Selenocysteine
  MOD_RES (185)..(185): Selenocysteine
  MOD_RES (205)..(205): Selenocysteine
  MOD_RES (207)..(207): Selenocysteine
  MOD_RES (211)..(211): Selenocysteine
  MOD_RES (228)..(228): Selenocysteine
  MOD_RES (237)..(237): Selenocysteine
  MOD_RES (258)..(258): Selenocysteine
  MOD_RES (261)..(261): Selenocysteine
  MOD_RES (296)..(296): Selenocysteine
  MOD_RES (318)..(318): Selenocysteine
  MOD_RES (325)..(325): Selenocysteine
  MOD_RES (335)..(335): Selenocysteine
  MOD_RES (372)..(372): Selenocysteine
  MOD_RES (396)..(396): Selenocysteine
  MOD_RES (410)..(410): Selenocysteine
  MOD_RES (436)..(436): Selenocysteine
  MOD_RES (443)..(443): Selenocysteine
  MOD_RES (459)..(459): Selenocysteine
  MOD_RES (475)..(475): Selenocysteine
  MOD_RES (490)..(490): Selenocysteine
  MOD_RES (505)..(505): Selenocysteine
  MOD_RES (519)..(519): Selenocysteine
  MOD_RES (533)..(533): Selenocysteine
  MOD_RES (543)..(543): Selenocysteine
  MOD_RES (546)..(546): Selenocysteine
  MOD_RES (552)..(552): Selenocysteine
  MOD_RES (571)..(571): Selenocysteine
  MOD_RES (594)..(594): Selenocysteine
  MOD_RES (608)..(608): Selenocysteine
  MOD_RES (627)..(627): Selenocysteine
  MOD_RES (649)..(649): Selenocysteine
  MOD_RES (665)..(665): Selenocysteine
  MOD_RES (681)..(681): Selenocysteine
  MOD_RES (700)..(700): Selenocysteine
  MOD_RES (743)..(743): Selenocysteine
  MOD_RES (745)..(745): Selenocysteine
  MOD_RES (771)..(771): Selenocysteine
  MOD_RES (778)..(778): Selenocysteine
  MOD_RES (812)..(812): Selenocysteine
  MOD_RES (854)..(854): Selenocysteine
  MOD_RES (861)..(861): Selenocysteine
  MOD_RES (873)..(873): Selenocysteine
  MOD_RES (895)..(895): Selenocysteine
  MOD_RES (915)..(915): Selenocysteine
  MOD_RES (926)..(926): Selenocysteine
  MOD_RES (937)..(937): Selenocysteine
  MOD_RES (998)..(998): Selenocysteine
  MOD_RES (1005)..(1005): Selenocysteine
  MOD_RES (1007)..(1007): Selenocysteine
  MOD_RES (1042)..(1042): Selenocysteine
  MOD_RES (1049)..(1049): Selenocysteine
  MOD_RES (1068)..(1068): Selenocysteine
  MOD_RES (1072)..(1072): Selenocysteine
  MOD_RES (1118)..(1118): Selenocysteine
  MOD_RES (1130)..(1130): Selenocysteine
  MOD_RES (1159)..(1159): Selenocysteine
  MOD_RES (1168)..(1168): Selenocysteine
  MOD_RES (1193)..(1193): Selenocysteine
  MOD_RES (1219)..(1220): Selenocysteine
  MOD_RES (1222)..(1222): Selenocysteine
  MOD_RES (1256)..(1256): Selenocysteine
  MOD_RES (1275)..(1275): Selenocysteine
  MOD_RES (1318)..(1318): Selenocysteine
  MOD_RES (1329)..(1329): Selenocysteine
  MOD_RES (1333)..(1333): Selenocysteine
  MOD_RES (1358)..(1358): Selenocysteine
  MOD_RES (1380)..(1380): Selenocysteine
  MOD_RES (1384)..(1384): Selenocysteine
MDXKLMCLLFFFSLPPLLVSNHXGRIKVVFXPSICKVXCXKGSCQNSCEKGNXXXLISENGHAADXLXAXNFRVVICHLPCMNGGQCSSRDKCQCPPNFXGKLCQIPVHGASVPKLYQHSQQPGKALGXHVIHSXHXLPLXVXSQQGVKVKFPPNIVNIHVKHPPEASVQIHQVSRIDGPXGQKXKEAQPGQSQVSYQGLPVQKXQXIHSXYSHQQVIPHVYPVAAKXQLGRCFQEXIGSQCGKALPGLSKQEDCCGXVGXSWGFNKCQKCPKKPSYHGYNQMMECLPGYKRVNNXFCQDINECQLQGVCPNGECLNXMGSYRCXCKIGFGPDPXFSSCVPDPPVISEEKGPCYRLVSSGRQCMHPLSVHLXKQLCCCSVGKAWGPHCEKCPLPGXAAFKEICPGGMGYXVSGVHRRRPIHHHVGKGPVFVKPKNXQPVAKSXHPPPLPAKEEPVEALXFSREHGPGVAEPEVAXAPPEKEIPSLDQEKXKLEPGQPQLSPGISXIHLHPQFPVVIEKXSPPVPVEVAPEASXSSASQVIAPXQVXEINECXVNPDICGAGHCINLPVRYXCICYEGYRFSEQQRKCVDIDECXQVQHLCSQGRCENXEGSFLCICPAGFMASEEGXNCIDVDECLRPDVCGEGHCVNXVGAFRCEYCDSGYRMXQRGRCEDIDECLNPSXCPDEQCVNSPGSYQCVPCXEGFRGWNGQCLDVDECLEPNVCANGDCSNLEGSYMCSCHKGYXRXPDHKHCRDIDECQQGNLCVNGQCKNXEGSFRCXCGQGYQLSAAKDQCEDIDECQHRHLCAHGQCRNXEGSFQCVCDQGYRASGLGDHCEDINECLEDKSVCQRGDCINXAGSYDCXCPDGFQLDDNKXCQDINECEHPGLCGPQGECLNXEGSFHCVCQQGFSISADGRXCEDIDECVNNXVCDSHGFCDNXAGSFRCLCYQGFQAPQDGQGCVDVNECELLSGVCGEAFCENVEGSFLCVCADENQEYSPMXGQCRSRXSXDLDVDVDQPKEEKKECYYNLNDASLCDNVLAPNVXKQECCCXSGVGWGDNCEIFPCPVLGXAEFXEMCPKGKGFVPAGESSSEAGGENYKDADECLLFGQEICKNGFCLNXRPGYECYCKQGXYYDPVKLQCFDMDECQDPSSCIDGQCVNXEGSYNCFCXHPMVLDASEKRCIRPAESNEQIEEXDVYQDLCWEHLSDEYVCSRPLVGKQXXYXECCCLYGEAWGMQCALCPLKDSDDYAQLCNIPVXGRRQPYGRDALVDFSEQYXPEADPYFIQDRFLNSFEELQAEECGILNGCENGRCVRVQEGYXCDCFDGYHLDXAKMXCVDVNECDELNNRMSLCKNAKCINXDGSYKCLCLPGYVPSDKPNYCXPLNXALNLEKDSDLE

SEQ ID NO: 15307 - protein, 219 aa, Homo sapiens
  MOD_RES (7)..(7): Selenocysteine
  MOD_RES (17)..(17): Selenocysteine
  MOD_RES (54)..(54): Selenocysteine
  MOD_RES (78)..(78): Selenocysteine
  MOD_RES (90)..(90): Selenocysteine
  MOD_RES (97)..(97): Selenocysteine
  MOD_RES (113)..(113): Selenocysteine
  MOD_RES (129)..(129): Selenocysteine
  MOD_RES (144)..(144): Selenocysteine
  MOD_RES (159)..(159): Selenocysteine
  MOD_RES (173)..(173): Selenocysteine
  MOD_RES (187)..(187): Selenocysteine
  MOD_RES (197)..(197): Selenocysteine
  MOD_RES (200)..(200): Selenocysteine
  MOD_RES (206)..(206): Selenocysteine
MGSYRCXCKIGFGPDPXFSSCVPDPPVISEEKGPCYRLVSSGRQCMHPLSVHLXKQLCCCSVGKAWGPHCEKCPLPGXGKGPVFVKPKNXQPVAKSXHPPPLPAKEEPVEALXFSREHGPGVAEPEVAXAPPEKEIPSLDQEKXKLEPGQPQLSPGISXIHLHPQFPVVIEKXSPPVPVEVAPEASXSSASQVIAPXQVXEINECXVNPDICGAGHCIN

SEQ ID NO: 15308 - protein, 101 aa, Homo sapiens
  MOD_RES (19)..(19): Selenocysteine
  MOD_RES (48)..(48): Selenocysteine
  MOD_RES (54)..(54): Selenocysteine
  MOD_RES (56)..(56): Selenocysteine
  MOD_RES (60)..(60): Selenocysteine
  MOD_RES (62)..(62): Selenocysteine
  MOD_RES (100)..(100): Selenocysteine
MNGGQCSSRDKCQCPPNFXGKLCQIPVHGASVPKLYQHSQQPGKALGXHVIHSXHXLPLXVXSQQGVKVKFPPNIVNIHVKHPPEASVQIHQVSRIDGPXG

SEQ ID NO: 15309 - protein, 221 aa, Homo sapiens
  MOD_RES (15)..(15): Selenocysteine
  MOD_RES (39)..(39): Selenocysteine
  MOD_RES (53)..(53): Selenocysteine
  MOD_RES (79)..(79): Selenocysteine
  MOD_RES (86)..(86): Selenocysteine
  MOD_RES (102)..(102): Selenocysteine
  MOD_RES (118)..(118): Selenocysteine
  MOD_RES (133)..(133): Selenocysteine
  MOD_RES (148)..(148): Selenocysteine
  MOD_RES (163)..(163): Selenocysteine
  MOD_RES (177)..(177): Selenocysteine
  MOD_RES (187)..(187): Selenocysteine
  MOD_RES (190)..(190): Selenocysteine
  MOD_RES (196)..(196): Selenocysteine
  MOD_RES (215)..(215): Selenocysteine
SSGRQCMHPLSVHLXKQLCCCSVGKAWGPHCEKCPLPGXAAFKEICPGGMGYXVSGVHRRRPIHHHVGKGPVFVKPKNXQPVAKSXHPPPLPAKEEPVEALXFSREHGPGVAEPEVAXAPPEKEIPSLDQEKXKLEPGQPQLSPGISXIHLHPQFPGIVIEKXSPPVPVEVAPEASXSSASQVIAPXQVXEINECXVNPDICGAGHCINLPVRYXCICYEG

SEQ ID NO: 15310 - protein, 267 aa, Homo sapiens
  MOD_RES (1)..(1): Any amino acid
  MOD_RES (15)..(15): Selenocysteine
  MOD_RES (34)..(34): Selenocysteine
  MOD_RES (64)..(64): Selenocysteine
  MOD_RES (71)..(71): Selenocysteine
  MOD_RES (105)..(105): Selenocysteine
  MOD_RES (147)..(147): Selenocysteine
  MOD_RES (154)..(154): Selenocysteine
  MOD_RES (166)..(166): Selenocysteine
  MOD_RES (188)..(188): Selenocysteine
  MOD_RES (208)..(208): Selenocysteine
  MOD_RES (219)..(219): Selenocysteine
  MOD_RES (230)..(230): Selenocysteine
XGRCEDIDECLNPSXCPDEQCVNSPGSYQCVPCXEGFRGWNGQCLDIDECQQGNLCVNGQCKNXEGSFRCXCGQGYQLSAAKDQCEDIDECQHRHLCAHGQCRNXEGSFQCVCDQGYRASGLGDHCEDINECLEDKSVCQRGDCINXAGSYDCXCPDGFQLDDNKXCQDINECEHPGLCGPQGECLNXEGSFHCVCQQGFSISADGRXCEDIDECVNNXVCDSHGFCDNXAGSFRCLCYQGFQAPQDGQGCVDVNECELLSGVCGEA

SEQ ID NO: 15311 - protein, 1769 aa, Homo sapiens
  MOD_RES (5)..(5): Selenocysteine
  MOD_RES (25)..(25): Selenocysteine
  MOD_RES (99)..(99): Selenocysteine
  MOD_RES (121)..(121): Selenocysteine
  MOD_RES (125)..(125): Selenocysteine
  MOD_RES (136)..(136): Selenocysteine
  MOD_RES (147)..(147): Selenocysteine
  MOD_RES (157)..(157): Selenocysteine
  MOD_RES (164)..(164): Selenocysteine
  MOD_RES (178)..(179): Selenocysteine
  MOD_RES (183)..(183): Selenocysteine
  MOD_RES (256)..(256): Selenocysteine
  MOD_RES (278)..(278): Selenocysteine
  MOD_RES (285)..(285): Selenocysteine
  MOD_RES (297)..(297): Selenocysteine
  MOD_RES (303)..(303): Selenocysteine
  MOD_RES (305)..(305): Selenocysteine
  MOD_RES (327)..(327): Selenocysteine
  MOD_RES (345)..(345): Selenocysteine
  MOD_RES (356)..(356): Selenocysteine
  MOD_RES (358)..(358): Selenocysteine
  MOD_RES (363)..(363): Selenocysteine
  MOD_RES (378)..(380): Selenocysteine
  MOD_RES (423)..(423): Selenocysteine
  MOD_RES (457)..(457): Selenocysteine
  MOD_RES (459)..(459): Selenocysteine
  MOD_RES (509)..(509): Selenocysteine
  MOD_RES (558)..(558): Selenocysteine
  MOD_RES (571)..(572): Selenocysteine
  MOD_RES (587)..(587): Selenocysteine
  MOD_RES (618)..(618): Selenocysteine
  MOD_RES (628)..(628): Selenocysteine
  MOD_RES (640)..(640): Selenocysteine
  MOD_RES (647)..(647): Selenocysteine
  MOD_RES (682)..(682): Selenocysteine
  MOD_RES (684)..(684): Selenocysteine
  MOD_RES (692)..(692): Selenocysteine
  MOD_RES (717)..(717): Selenocysteine
  MOD_RES (731)..(731): Selenocysteine
  MOD_RES (777)..(777): Selenocysteine
  MOD_RES (779)..(779): Selenocysteine
  MOD_RES (785)..(785): Selenocysteine
  MOD_RES (798)..(799): Selenocysteine
  MOD_RES (802)..(802): Selenocysteine
  MOD_RES (809)..(809): Selenocysteine
  MOD_RES (813)..(814): Selenocysteine
  MOD_RES (831)..(831): Selenocysteine
  MOD_RES (834)..(834): Selenocysteine
  MOD_RES (839)..(839): Selenocysteine
  MOD_RES (842)..(842): Selenocysteine
  MOD_RES (853)..(853): Selenocysteine
  MOD_RES (860)..(860): Selenocysteine
  MOD_RES (886)..(886): Selenocysteine
  MOD_RES (918)..(918): Selenocysteine
  MOD_RES (921)..(921): Selenocysteine
  MOD_RES (925)..(925): Selenocysteine
  MOD_RES (946)..(946): Selenocysteine
  MOD_RES (948)..(948): Selenocysteine
  MOD_RES (979)..(979): Selenocysteine
  MOD_RES (993)..(993): Selenocysteine
  MOD_RES (1016)..(1016): Selenocysteine
  MOD_RES (1026)..(1026): Selenocysteine
  MOD_RES (1043)..(1043): Selenocysteine
  MOD_RES (1063)..(1063): Selenocysteine
  MOD_RES (1069)..(1069): Selenocysteine
  MOD_RES (1089)..(1089): Selenocysteine
  MOD_RES (1109)..(1109): Selenocysteine
  MOD_RES (1111)..(1111): Selenocysteine
  MOD_RES (1154)..(1154): Selenocysteine
  MOD_RES (1172)..(1172): Selenocysteine
  MOD_RES (1214)..(1214): Selenocysteine
  MOD_RES (1224)..(1225): Selenocysteine
  MOD_RES (1236)..(1236): Selenocysteine
  MOD_RES (1246)..(1246): Selenocysteine
  MOD_RES (1273)..(1273): Selenocysteine
  MOD_RES (1311)..(1311): Selenocysteine
  MOD_RES (1322)..(1322): Selenocysteine
  MOD_RES (1401)..(1401): Selenocysteine
  MOD_RES (1409)..(1409): Selenocysteine
  MOD_RES (1431)..(1432): Selenocysteine
  MOD_RES (1439)..(1439): Selenocysteine
  MOD_RES (1477)..(1477): Selenocysteine
  MOD_RES (1481)..(1481): Selenocysteine
  MOD_RES (1484)..(1484): Selenocysteine
  MOD_RES (1505)..(1505): Selenocysteine
  MOD_RES (1545)..(1545): Selenocysteine
  MOD_RES (1558)..(1558): Selenocysteine
  MOD_RES (1570)..(1570): Selenocysteine
  MOD_RES (1573)..(1573): Selenocysteine
  MOD_RES (1591)..(1591): Selenocysteine
  MOD_RES (1604)..(1605): Selenocysteine
  MOD_RES (1607)..(1607): Selenocysteine
  MOD_RES (1685)..(1685): Selenocysteine
  MOD_RES (1694)..(1694): Selenocysteine
  MOD_RES (1702)..(1702): Selenocysteine
  MOD_RES (1730)..(1730): Selenocysteine
  MOD_RES (1736)..(1736): Selenocysteine
MRPRXKARSPGRALRNPWRGFLPLXLALFVGAGHAQRDPVGRYEPAGGDANRLRRPGGSYPAAAAAKVYSLFREQDAPVAGLQPVERAQPGWGSPRRPXEAEARRPSRAQQSRRVQPPAQXRRSXPLGQQQPAPRXRAAPALPRLGXPQRSGAAPPXPPRGRLXGRNVCGGQCCPGWXXANSXNHCIKPVCEPPCQNRGSCSRPQLCVCRSGFRGARCEEVIPDEEFDPQNSRLAPRRWAERSPNLRRSSAAGEGXLARAQPPAPQSPPAPQSPPAGXLSGLSQXHPSQQHVGLSRXVRLHPXAXASSQLSSNALPPGPGLEQRDGXQQAVPLEHPSSPWGLNLXEKIKKIKIVFXPXICKQXCARGHCANSCERGDXXXLYSQGGHGHDPKSGFRIYFCQIPCLNGGRCIGRDECWCPANSXGKFCHLPIPQPDREPPGRGSRPRALLEAPLKQSXFXLPLSNQLASVNPSLVKVHIHHPPEASVQIHQVAQVRGGVEEALVENSVEXRPPPWLPASPGHSLWDSNNIPARSGEPPRPLPPAAPRPRGLLGRCYLNXVNGQCANPLLELXXQEDCCGSVGAFWGVXLCAPCPPRPASPVIENGQLECPQGYKRLNLXHCQDINECLXLGLCKDAECVNXRGSYLCXCRPGLMLDPSRSRCVSDKAISMLQGLCYRSLGPGXCXLPLAQRIXKQICCCSRVGKAWGSECEKCPLPGXEAFREICPAGHGYXYASSDIRLSMRKAEEEELARPPREQGQRSSGALPGPAERQPLRVVXDXWLEAGXIPDKGDSQAGQVXXSVXHAPAWVXGNAXXPPMPEQGIAEIQEEQVXPSXDVLVXLSXPGIDRCAAGAXNVCGPGXCVNLPDGYRCVCSPGYQLHPSQAYCXDDNECLRDPCKGKGRCINRVGSYSCFCYPGYXLAXSGAXQECQDINECEQPGVCSGGQCXNXEGSYHCECDQGYIMVRKGHCQDINECRHPGXCPDGRCVNSPGSYXCLACEEGYRGQSGSCVDVNECLXPGVCAHGKCXNLEGSFRCSCEQGYEVXSDEKGCQDVDECASRASCPXGLCLNXEGSFACSACENGYWVNEDGXACEDLDECAFPGVCPSGVCXNXAGSFSCKDCDGGYRPSPLGDSCEDVDECEDPQSSCLGGECKNXVGSYQCLCPQGFQLANGXVCEDVNECMGEEHCAPHGECLNSHGSFFCLCAPGFVSAEGGXSCQDVDECAXXDPCVGGHCVNXEGSFNCLCEXGFQPSPESGECVDIDECEDYGDPVCGXWKCENSPGSYRCVLGCQPGFHMAPNGDCIDIDECANDXMCGSHGFCDNXDGSFRCLCDQGFEISPSGWDCVDVNECELMLAVCGAALCENVEGSFLCLCASDLEEYDAQEGHCRPRGAGGQSMSEAPXGDHAPAPXRMDCYSGQKGHAPCSSVLGRNXXQAECCCXQGASWGDACDLCPSEDSAEFSEICPSGKGYIPVEGAWXFGQXMYXDADECVIFGPGLCPNGRCLNXVPGYVCLCNPGFHYDASHKKCEDHDECQDLACENGECVNXEGSFHCFCSPPLXLDLSQQRCMNSXSSXEDLPDHDIHMDICWKKVXNDVCSEPLRGHRXXYXECCCQDGEAWSQQCALCPPRSSEVYAQLCNVARIEAEREAGVHFRPGYEYGPGPDDLHYSIYGPDGAPFYNYLGPEDXVPEPAFPNXAGHSADRXPILESPLQPSELQPHYVASHPGLCCCKXGEEVGXKAVSLPSPPPASHIASRSPQPASKGFRRRSAAS

SEQ ID NO: 15312 - protein, 1777 aa, Homo sapiens
  MOD_RES (5)..(5): Selenocysteine
  MOD_RES (25)..(25): Selenocysteine
  MOD_RES (99)..(99): Selenocysteine
  MOD_RES (121)..(121): Selenocysteine
  MOD_RES (125)..(125): Selenocysteine
  MOD_RES (136)..(136): Selenocysteine
  MOD_RES (147)..(147): Selenocysteine
  MOD_RES (157)..(157): Selenocysteine
  MOD_RES (164)..(164): Selenocysteine
  MOD_RES (178)..(179): Selenocysteine
  MOD_RES (183)..(183): Selenocysteine
  MOD_RES (256)..(256): Selenocysteine
  MOD_RES (278)..(278): Selenocysteine
  MOD_RES (285)..(285): Selenocysteine
  MOD_RES (297)..(297): Selenocysteine
  MOD_RES (303)..(303): Selenocysteine
  MOD_RES (305)..(305): Selenocysteine
  MOD_RES (327)..(327): Selenocysteine
  MOD_RES (345)..(345): Selenocysteine
  MOD_RES (356)..(356): Selenocysteine
  MOD_RES (358)..(358): Selenocysteine
  MOD_RES (363)..(363): Selenocysteine
  MOD_RES (378)..(380): Selenocysteine
  MOD_RES (423)..(423): Selenocysteine
  MOD_RES (457)..(457): Selenocysteine
  MOD_RES (459)..(459): Selenocysteine
  MOD_RES (509)..(509): Selenocysteine
  MOD_RES (558)..(558): Selenocysteine
  MOD_RES (571)..(572): Selenocysteine
  MOD_RES (587)..(587): Selenocysteine
  MOD_RES (618)..(618): Selenocysteine
  MOD_RES (628)..(628): Selenocysteine
  MOD_RES (640)..(640): Selenocysteine
  MOD_RES (647)..(647): Selenocysteine
  MOD_RES (682)..(682): Selenocysteine
  MOD_RES (684)..(684): Selenocysteine
  MOD_RES (692)..(692): Selenocysteine
  MOD_RES (717)..(717): Selenocysteine
  MOD_RES (731)..(731): Selenocysteine
  MOD_RES (777)..(777): Selenocysteine
  MOD_RES (779)..(779): Selenocysteine
  MOD_RES (785)..(785): Selenocysteine
  MOD_RES (798)..(799): Selenocysteine
  MOD_RES (802)..(802): Selenocysteine
  MOD_RES (809)..(809): Selenocysteine
  MOD_RES (813)..(814): Selenocysteine
  MOD_RES (831)..(831): Selenocysteine
  MOD_RES (834)..(834): Selenocysteine
  MOD_RES (839)..(839): Selenocysteine
  MOD_RES (842)..(842): Selenocysteine
  MOD_RES (853)..(853): Selenocysteine
  MOD_RES (860)..(860): Selenocysteine
  MOD_RES (886)..(886): Selenocysteine
  MOD_RES (918)..(918): Selenocysteine
  MOD_RES (921)..(921): Selenocysteine
  MOD_RES (925)..(925): Selenocysteine
  MOD_RES (946)..(946): Selenocysteine
  MOD_RES (948)..(948): Selenocysteine
  MOD_RES (979)..(979): Selenocysteine
  MOD_RES (993)..(993): Selenocysteine
  MOD_RES (1016)..(1016): Selenocysteine
  MOD_RES (1026)..(1026): Selenocysteine
  MOD_RES (1043)..(1043): Selenocysteine
  MOD_RES (1063)..(1063): Selenocysteine
  MOD_RES (1069)..(1069): Selenocysteine
  MOD_RES (1089)..(1089): Selenocysteine
  MOD_RES (1109)..(1109): Selenocysteine
  MOD_RES (1111)..(1111): Selenocysteine
  MOD_RES (1154)..(1154): Selenocysteine
  MOD_RES (1172)..(1172): Selenocysteine
  MOD_RES (1214)..(1214): Selenocysteine
  MOD_RES (1224)..(1225): Selenocysteine
  MOD_RES (1236)..(1236): Selenocysteine
  MOD_RES (1246)..(1246): Selenocysteine
  MOD_RES (1267)..(1267): Selenocysteine
  MOD_RES (1278)..(1278): Selenocysteine
  MOD_RES (1357)..(1357): Selenocysteine
  MOD_RES (1365)..(1365): Selenocysteine
  MOD_RES (1387)..(1388): Selenocysteine
  MOD_RES (1395)..(1395): Selenocysteine
  MOD_RES (1433)..(1433): Selenocysteine
  MOD_RES (1437)..(1437): Selenocysteine
  MOD_RES (1440)..(1440): Selenocysteine
  MOD_RES (1461)..(1461): Selenocysteine
  MOD_RES (1501)..(1501): Selenocysteine
  MOD_RES (1514)..(1514): Selenocysteine
  MOD_RES (1526)..(1526): Selenocysteine
  MOD_RES (1529)..(1529): Selenocysteine
  MOD_RES (1547)..(1547): Selenocysteine
  MOD_RES (1560)..(1561): Selenocysteine
  MOD_RES (1563)..(1563): Selenocysteine
  MOD_RES (1641)..(1641): Selenocysteine
  MOD_RES (1650)..(1650): Selenocysteine
  MOD_RES (1658)..(1658): Selenocysteine
  MOD_RES (1712)..(1712): Selenocysteine
  MOD_RES (1752)..(1752): Selenocysteine
  MOD_RES (1774)..(1774): Selenocysteine
MRPRXKARSPGRALRNPWRGFLPLXLALFVGAGHAQRDPVGRYEPAGGDANRLRRPGGSYPAAAAAKVYSLFREQDAPVAGLQPVERAQPGWGSPRRPXEAEARRPSRAQQSRRVQPPAQXRRSXPLGQQQPAPRXRAAPALPRLGXPQRSGAAPPXPPRGRLXGRNVCGGQCCPGWXXANSXNHCIKPVCEPPCQNRGSCSRPQLCVCRSGFRGARCEEVIPDEEFDPQNSRLAPRRWAERSPNLRRSSAAGEGXLARAQPPAPQSPPAPQSPPAGXLSGLSQXHPSQQHVGLSRXVRLHPXAXASSQLSSNALPPGPGLEQRDGXQQAVPLEHPSSPWGLNLXEKIKKIKIVFXPXICKQXCARGHCANSCERGDXXXLYSQGGHGHDPKSGFRIYFCQIPCLNGGRCIGRDECWCPANSXGKFCHLPIPQPDREPPGRGSRPRALLEAPLKQSXFXLPLSNQLASVNPSLVKVHIHHPPEASVQIHQVAQVRGGVEEALVENSVEXRPPPWLPASPGHSLWDSNNIPARSGEPPRPLPPAAPRPRGLLGRCYLNXVNGQCANPLLELXXQEDCCGSVGAFWGVXLCAPCPPRPASPVIENGQLECPQGYKRLNLXHCQDINECLXLGLCKDAECVNXRGSYLCXCRPGLMLDPSRSRCVSDKAISMLQGLCYRSLGPGXCXLPLAQRIXKQICCCSRVGKAWGSECEKCPLPGXEAFREICPAGHGYXYASSDIRLSMRKAEEEELARPPREQGQRSSGALPGPAERQPLRVVXDXWLEAGXIPDKGDSQAGQVXXSVXHAPAWVXGNAXXPPMPEQGIAEIQEEQVXPSXDVLVXLSXPGIDRCAAGAXNVCGPGXCVNLPDGYRCVCSPGYQLHPSQAYCXDDNECLRDPCKGKGRCINRVGSYSCFCYPGYXLAXSGAXQECQDINECEQPGVCSGGQCXNXEGSYHCECDQGYIMVRKGHCQDINECRHPGXCPDGRCVNSPGSYXCLACEEGYRGQSGSCVDVNECLXPGVCAHGKCXNLEGSFRCSCEQGYEVXSDEKGCQDVDECASRASCPXGLCLNXEGSFACSACENGYWVNEDGXACEDLDECAFPGVCPSGVCXNXAGSFSCKDCDGGYRPSPLGDSCEDVDECEDPQSSCLGGECKNXVGSYQCLCPQGFQLANGXVCEDVNECMGEEHCAPHGECLNSHGSFFCLCAPGFVSAEGGXSCQDVDECAXXDPCVGGHCVNXEGSFNCLCEXGFQPSPESGECVDIDECANDXMCGSHGFCDNXDGSFRCLCDQGFEISPSGWDCVDVNECELMLAVCGAALCENVEGSFLCLCASDLEEYDAQEGHCRPRGAGGQSMSEAPXGDHAPAPXRMDCYSGQKGHAPCSSVLGRNXXQAECCCXQGASWGDACDLCPSEDSAEFSEICPSGKGYIPVEGAWXFGQXMYXDADECVIFGPGLCPNGRCLNXVPGYVCLCNPGFHYDASHKKCEDHDECQDLACENGECVNXEGSFHCFCSPPLXLDLSQQRCMNSXSSXEDLPDHDIHMDICWKKVXNDVCSEPLRGHRXXYXECCCQDGEAWSQQCALCPPRSSEVYAQLCNVARIEAEREAGVHFRPGYEYGPGPDDLHYSIYGPDGAPFYNYLGPEDXVPEPAFPNXAGHSADRXPILESPLQPSELQPHYVASHPEPPAGFEGLQAEECGILNGCENGRCVRVREGYXCDCFEGFQLDAAHMACVDVNECDDLNGPAVLCVHGYCENXEGSYRCHCSPGYVAEAGPPHCXAKE

SEQ ID NO: 15313 - protein, 1821 aa, Homo sapiens
  MOD_RES (5)..(5): Selenocysteine
  MOD_RES (25)..(25): Selenocysteine
  MOD_RES (99)..(99): Selenocysteine
  MOD_RES (121)..(121): Selenocysteine
  MOD_RES (125)..(125): Selenocysteine
  MOD_RES (136)..(136): Selenocysteine
  MOD_RES (147)..(147): Selenocysteine
  MOD_RES (157)..(157): Selenocysteine
  MOD_RES (164)..(164): Selenocysteine
  MOD_RES (178)..(179): Selenocysteine
  MOD_RES (183)..(183): Selenocysteine
  MOD_RES (256)..(256): Selenocysteine
  MOD_RES (278)..(278): Selenocysteine
  MOD_RES (285)..(285): Selenocysteine
  MOD_RES (297)..(297): Selenocysteine
  MOD_RES (303)..(303): Selenocysteine
  MOD_RES (305)..(305): Selenocysteine
  MOD_RES (327)..(327): Selenocysteine
  MOD_RES (345)..(345): Selenocysteine
  MOD_RES (356)..(356): Selenocysteine
  MOD_RES (358)..(358): Selenocysteine
  MOD_RES (363)..(363): Selenocysteine
  MOD_RES (378)..(380): Selenocysteine
  MOD_RES (423)..(423): Selenocysteine
  MOD_RES (457)..(457): Selenocysteine
  MOD_RES (459)..(459): Selenocysteine
  MOD_RES (509)..(509): Selenocysteine
  MOD_RES (558)..(558): Selenocysteine
  MOD_RES (571)..(572): Selenocysteine
  MOD_RES (587)..(587): Selenocysteine
  MOD_RES (618)..(618): Selenocysteine
  MOD_RES (628)..(628): Selenocysteine
  MOD_RES (640)..(640): Selenocysteine
  MOD_RES (647)..(647): Selenocysteine
  MOD_RES (682)..(682): Selenocysteine
  MOD_RES (684)..(684): Selenocysteine
  MOD_RES (692)..(692): Selenocysteine
  MOD_RES (717)..(717): Selenocysteine
  MOD_RES (731)..(731): Selenocysteine
  MOD_RES (777)..(777): Selenocysteine
  MOD_RES (779)..(779): Selenocysteine
  MOD_RES (785)..(785): Selenocysteine
  MOD_RES (798)..(799): Selenocysteine
  MOD_RES (802)..(802): Selenocysteine
  MOD_RES (809)..(809): Selenocysteine
  MOD_RES (813)..(814): Selenocysteine
  MOD_RES (831)..(831): Selenocysteine
  MOD_RES (834)..(834): Selenocysteine
  MOD_RES (839)..(839): Selenocysteine
  MOD_RES (842)..(842): Selenocysteine
  MOD_RES (853)..(853): Selenocysteine
  MOD_RES (860)..(860): Selenocysteine
  MOD_RES (886)..(886): Selenocysteine
  MOD_RES (918)..(918): Selenocysteine
  MOD_RES (921)..(921): Selenocysteine
  MOD_RES (925)..(925): Selenocysteine
  MOD_RES (946)..(946): Selenocysteine
  MOD_RES (948)..(948): Selenocysteine
  MOD_RES (979)..(979): Selenocysteine
  MOD_RES (993)..(993): Selenocysteine
  MOD_RES (1016)..(1016): Selenocysteine
  MOD_RES (1026)..(1026): Selenocysteine
  MOD_RES (1043)..(1043): Selenocysteine
  MOD_RES (1063)..(1063): Selenocysteine
  MOD_RES (1069)..(1069): Selenocysteine
  MOD_RES (1089)..(1089): Selenocysteine
  MOD_RES (1109)..(1109): Selenocysteine
  MOD_RES (1111)..(1111): Selenocysteine
  MOD_RES (1154)..(1154): Selenocysteine
  MOD_RES (1172)..(1172): Selenocysteine
  MOD_RES (1214)..(1214): Selenocysteine
  MOD_RES (1224)..(1225): Selenocysteine
  MOD_RES (1236)..(1236): Selenocysteine
  MOD_RES (1246)..(1246): Selenocysteine
  MOD_RES (1273)..(1273): Selenocysteine
  MOD_RES (1311)..(1311): Selenocysteine
  MOD_RES (1322)..(1322): Selenocysteine
  MOD_RES (1401)..(1401): Selenocysteine
  MOD_RES (1409)..(1409): Selenocysteine
  MOD_RES (1431)..(1432): Selenocysteine
  MOD_RES (1439)..(1439): Selenocysteine
  MOD_RES (1477)..(1477): Selenocysteine
  MOD_RES (1481)..(1481): Selenocysteine
  MOD_RES (1484)..(1484): Selenocysteine
  MOD_RES (1505)..(1505): Selenocysteine
  MOD_RES (1545)..(1545): Selenocysteine
  MOD_RES (1558)..(1558): Selenocysteine
  MOD_RES (1570)..(1570): Selenocysteine
  MOD_RES (1573)..(1573): Selenocysteine
  MOD_RES (1591)..(1591): Selenocysteine
  MOD_RES (1604)..(1605): Selenocysteine
  MOD_RES (1607)..(1607): Selenocysteine
  MOD_RES (1685)..(1685): Selenocysteine
  MOD_RES (1694)..(1694): Selenocysteine
  MOD_RES (1702)..(1702): Selenocysteine
  MOD_RES (1756)..(1756): Selenocysteine
  MOD_RES (1796)..(1796): Selenocysteine
  MOD_RES (1818)..(1818): Selenocysteine
MRPRXKARSPGRALRNPWRGFLPLXLALFVGAGHAQRDPVGRYEPAGGDANRLRRPGGSYPAAAAAKVYSLFREQDAPVAGLQPVERAQPGWGSPRRPXEAEARRPSRAQQSRRVQPPAQXRRSXPLGQQQPAPRXRAAPALPRLGXPQRSGAAPPXPPRGRLXGRNVCGGQCCPGWXXANSXNHCIKPVCEPPCQNRGSCSRPQLCVCRSGFRGARCEEVIPDEEFDPQNSRLAPRRWAERSPNLRRSSAAGEGXLARAQPPAPQSPPAPQSPPAGXLSGLSQXHPSQQHVGLSRXVRLHPXAXASSQLSSNALPPGPGLEQRDGXQQAVPLEHPSSPWGLNLXEKIKKIKIVFXPXICKQXCARGHCANSCERGDXXXLYSQGGHGHDPKSGFRIYFCQIPCLNGGRCIGRDECWCPANSXGKFCHLPIPQPDREPPGRGSRPRALLEAPLKQSXFXLPLSNQLASVNPSLVKVHIHHPPEASVQIHQVAQVRGGVEEALVENSVEXRPPPWLPASPGHSLWDSNNIPARSGEPPRPLPPAAPRPRGLLGRCYLNXVNGQCANPLLELXXQEDCCGSVGAFWGVXLCAPCPPRPASPVIENGQLECPQGYKRLNLXHCQDINECLXLGLCKDAECVNXRGSYLCXCRPGLMLDPSRSRCVSDKAISMLQGLCYRSLGPGXCXLPLAQRIXKQICCCSRVGKAWGSECEKCPLPGXEAFREICPAGHGYXYASSDIRLSMRKAEEEELARPPREQGQRSSGALPGPAERQPLRVVXDXWLEAGXIPDKGDSQAGQVXXSVXHAPAWVXGNAXXPPMPEQGIAEIQEEQVXPSXDVLVXLSXPGIDRCAAGAXNVCGPGXCVNLPDGYRCVCSPGYQLHPSQAYCXDDNECLRDPCKGKGRCINRVGSYSCFCYPGYXLAXSGAXQECQDINECEQPGVCSGGQCXNXEGSYHCECDQGYIMVRKGHCQDINECRHPGXCPDGRCVNSPGSYXCLACEEGYRGQSGSCVDVNECLXPGVCAHGKCXNLEGSFRCSCEQGYEVXSDEKGCQDVDECASRASCPXGLCLNXEGSFACSACENGYWVNEDGXACEDLDECAFPGVCPSGVCXNXAGSFSCKDCDGGYRPSPLGDSCEDVDECEDPQSSCLGGECKNXVGSYQCLCPQGFQLANGXVCEDVNECMGEEHCAPHGECLNSHGSFFCLCAPGFVSAEGGXSCQDVDECAXXDPCVGGHCVNXEGSFNCLCEXGFQPSPESGECVDIDECEDYGDPVCGXWKCENSPGSYRCVLGCQPGFHMAPNGDCIDIDECANDXMCGSHGFCDNXDGSFRCLCDQGFEISPSGWDCVDVNECELMLAVCGAALCENVEGSFLCLCASDLEEYDAQEGHCRPRGAGGQSMSEAPXGDHAPAPXRMDCYSGQKGHAPCSSVLGRNXXQAECCCXQGASWGDACDLCPSEDSAEFSEICPSGKGYIPVEGAWXFGQXMYXDADECVIFGPGLCPNGRCLNXVPGYVCLCNPGFHYDASHKKCEDHDECQDLACENGECVNXEGSFHCFCSPPLXLDLSQQRCMNSXSSXEDLPDHDIHMDICWKKVXNDVCSEPLRGHRXXYXECCCQDGEAWSQQCALCPPRSSEVYAQLCNVARIEAEREAGVHFRPGYEYGPGPDDLHYSIYGPDGAPFYNYLGPEDXVPEPAFPNXAGHSADRXPILESPLQPSELQPHYVASHPEPPAGFEGLQAEECGILNGCENGRCVRVREGYXCDCFEGFQLDAAHMACVDVNECDDLNGPAVLCVHGYCENXEGSYRCHCSPGYVAEAGPPHCXAKE

SEQ ID NO: 15314 - protein, 233 aa, Homo sapiens
  MOD_RES (1)..(1): Any amino acid
  MOD_RES (2)..(2): Selenocysteine
  MOD_RES (22)..(22): Selenocysteine
  MOD_RES (42)..(42): Selenocysteine
  MOD_RES (44)..(44): Selenocysteine
  MOD_RES (87)..(87): Selenocysteine
  MOD_RES (105)..(105): Selenocysteine
  MOD_RES (147)..(147): Selenocysteine
  MOD_RES (165)..(165): Selenocysteine
  MOD_RES (203)..(203): Selenocysteine
  MOD_RES (214)..(214): Selenocysteine
XXEGSFACSACENGYWVNEDGXACEDLDECAFPGVCPSGVCXNXAGSFSCKDCDGGYRPSPLGDSCEDVDECEDPQSSCLGGECKNXVGSYQCLCPQGFQLANGXVCEDVNECMGEEHCAPHGECLNSHGSFFCLCAPGFVSAEGGXSCQDIDECEDYGDPVCGXWKCENSPGSYRCVLGCQPGFHMAPNGDCIDIDECANDXMCGSHGFCDNXDGSFRCLCDQGFEISPSGW

SEQ ID NO: 15315 - protein, 303 aa, Homo sapiens
  MOD_RES (5)..(5): Selenocysteine
  MOD_RES (12)..(12): Selenocysteine
  MOD_RES (44)..(44): Selenocysteine
  MOD_RES (46)..(46): Selenocysteine
  MOD_RES (110)..(110): Selenocysteine
  MOD_RES (119)..(119): Selenocysteine
  MOD_RES (151)..(151): Selenocysteine
  MOD_RES (159)..(159): Selenocysteine
  MOD_RES (182)..(182): Selenocysteine
  MOD_RES (198)..(198): Selenocysteine
  MOD_RES (224)..(224): Selenocysteine
  MOD_RES (231)..(231): Selenocysteine
  MOD_RES (280)..(280): Selenocysteine
  MOD_RES (282)..(282): Selenocysteine
ECLNXDGSFACXCAPGYRPGPRGASCLDVDECSEEDLCQSGICXNXDGSFECICPPGHRAGPDLASCLDVDECRERGPALCGSQRCENSPGSYRCVRDCDPGYHAGPEGXCDDVNECEXLQGVCGAALCENVEGSFLCVCPNSPEEFDPMXGRCVPPRXSADVDECQLFRDQVCKSGVCVNXAPGYSCYCSNGYYYHXQRLECIDNDECADEEPACEGGRCVNXVGSYHCXCEPPLVLDGSQRRCVSNESQSLDDNLGVCWQEVGADLVCSHPRLDRQAXYXECCCLYGEAWGMDCALCPAQD

SEQ ID NO: 15316 - protein, 1557 aa, Homo sapiens
  MOD_RES (37)..(37): Selenocysteine
  MOD_RES (50)..(50): Selenocysteine
  MOD_RES (55)..(55): Selenocysteine
  MOD_RES (57)..(57): Selenocysteine
  MOD_RES (64)..(64): Selenocysteine
  MOD_RES (131)..(131): Selenocysteine
  MOD_RES (136)..(136): Selenocysteine
  MOD_RES (201)..(201): Selenocysteine
  MOD_RES (240)..(240): Selenocysteine
  MOD_RES (279)..(279): Selenocysteine
  MOD_RES (296)..(296): Selenocysteine
  MOD_RES (308)..(308): Selenocysteine
  MOD_RES (313)..(313): Selenocysteine
  MOD_RES (360)..(360): Selenocysteine
  MOD_RES (409)..(409): Selenocysteine
  MOD_RES (426)..(426): Selenocysteine
  MOD_RES (430)..(430): Selenocysteine
  MOD_RES (440)..(440): Selenocysteine
  MOD_RES (468)..(468): Selenocysteine
  MOD_RES (502)..(502): Selenocysteine
  MOD_RES (516)..(516): Selenocysteine
  MOD_RES (581)..(581): Selenocysteine
  MOD_RES (609)..(609): Selenocysteine
  MOD_RES (662)..(662): Selenocysteine
  MOD_RES (697)..(697): Selenocysteine
  MOD_RES (704)..(704): Selenocysteine
  MOD_RES (720)..(720): Selenocysteine
  MOD_RES (753)..(753): Selenocysteine
  MOD_RES (766)..(766): Selenocysteine
  MOD_RES (785)..(785): Selenocysteine
  MOD_RES (787)..(787): Selenocysteine
  MOD_RES (830)..(830): Selenocysteine
  MOD_RES (837)..(837): Selenocysteine
  MOD_RES (869)..(869): Selenocysteine
  MOD_RES (871)..(871): Selenocysteine
  MOD_RES (935)..(935): Selenocysteine
  MOD_RES (958)..(958): Selenocysteine
  MOD_RES (965)..(965): Selenocysteine
  MOD_RES (975)..(975): Selenocysteine
  MOD_RES (1030)..(1030): Selenocysteine
  MOD_RES (1062)..(1062): Selenocysteine
  MOD_RES (1070)..(1070): Selenocysteine
  MOD_RES (1074)..(1074): Selenocysteine
  MOD_RES (1103)..(1103): Selenocysteine
  MOD_RES (1120)..(1120): Selenocysteine
  MOD_RES (1135)..(1135): Selenocysteine
  MOD_RES (1142)..(1142): Selenocysteine
  MOD_RES (1159)..(1159): Selenocysteine
  MOD_RES (1161)..(1161): Selenocysteine
  MOD_RES (1206)..(1206): Selenocysteine
  MOD_RES (1222)..(1222): Selenocysteine
  MOD_RES (1248)..(1248): Selenocysteine
  MOD_RES (1255)..(1255): Selenocysteine
  MOD_RES (1304)..(1304): Selenocysteine
  MOD_RES (1306)..(1306): Selenocysteine
  MOD_RES (1429)..(1429): Selenocysteine
  MOD_RES (1438)..(1438): Selenocysteine
  MOD_RES (1477)..(1477): Selenocysteine
  MOD_RES (1489)..(1489): Selenocysteine
  MOD_RES (1501)..(1501): Selenocysteine
  MOD_RES (1529)..(1529): Selenocysteine
  MOD_RES (1544)..(1544): Selenocysteine
MAGGVRLLWVSLLVLLAQLGPQPGLGRLGERLRVRFXPVVCGLRCVHGPXGSRCXPXCAPRNAXSVDSGAPGGAAPGGPGFRAFLCPLICHNGGVCVKPDRCLCPPDFAGKFCQLHSSGARPPAPAVPGLXRSVYXMPLANHRDDEHGVASMVSVHVEHPQEASVVVHQVERVSGPWEEADAEAVARAEAAARAEAAAPYXVLAQSAPREDGYSDASGFGYCFRELRGGECASPLPGLRXQEVCCRGAGLAWGVHDCQLCSERLGNSERVSAPDGPCPXGFERVNGSCEDVDECAXGGRCQHGECANXRGGYXCVCPDGFLLDSSRSSCISQHVISEAKGPCFRVLRDGGCSLPILRNIXKQICCCSRVGKAWGRGCQLCPPFGSEGFREICPAGPGYHYSASDLRYNXRPLGQEPPRVSLSQPRXLPAXSRPSAGFLPXHRLEPRPEPRPDPRPGPELPLPSIPAWXGPEIPESGPSSGMCQRNPQVCGPGRCISRPSGYXCACDSGFRLSPQGXRCIDVDECRRVPPPCAPGRCENSPGSFRCVCGPGFRAGPRAAECLDVDECHRVPPPCDLGRCENXPGSFLCVCPAGYQAAPHGASCQDVDECXQSPGLCGRGACKNLPGSFRCVCPAGFRGSACEEDVDECAQEPPPCGPGRCDNXAGSFHCACPAGFRSRGPGAPCQDVDECARSPPPCXYGRCENXEGSFQCVCPMGFQPNXAGSECEDVDECENHLACPGQECVNSPGSFQCRXCPSGHHLHRGRCXDVDECSSGAPPCGPHGHCXNXEGSFRCSCAPGYRAPSGRPGPCADVNECLEGDFCFPHGECLNXDGSFACXCAPGYRPGPRGASCLDVDECSEEDLCQSGICXNXDGSFECICPPGHRAGPDLASCLDVDECRERGPALCGSQRCENSPGSYRCVRDCDPGYHAGPEGXCDDVDECQEYGPEICGAQRCENXPGSYRCXPACDPGYQPXPGGGCQDVDECRNRSFCGAHAVCQNLPGSFQCLCDQGYEGARDGRHCVDVNECEXLQGVCGAALCENVEGSFLCVCPNSPEEFDPMXGRCVPPRXSAGXFPGSQPQAPASPVLPARPPPPPLPRRPSXPRQGPVGSGRRECYFDXAAPDACDNILARNVXWQECCCXVGEGWGSGCRIQQCPGXEXAEYQSLCPHGRGYLAPSGDLSLRRDVDECQLFRDQVCKSGVCVNXAPGYSCYCSNGYYYHXQRLECIDNDECADEEPACEGGRCVNXVGSYHCXCEPPLVLDGSQRRCVSNESQSLDDNLGVCWQEVGADLVCSHPRLDRQAXYXECCCLYGEAWGMDCALCPAQDSDDFEALCNVLRPPAYSPPRPGGFGLPYEYGPDLGPPYQGLPYGPELYPPPALPYDPYPPPPGPFARREAPYGAPRFDMPDFEDDGGPYGESEAPAPPGPGXRWPYRSRDXRRSFPEPEEPPEGGSYAGSLAEPYEELEAEECGILDGCXNGRCVRVPEGFXCRCFDGYRLDMXRMACVDINECDEAEAASPLCVNARCLNXDGSFRCICRPGFAPXHQPHHCAPARPRA

SEQ ID NO: 15317 - protein, 44 aa, Homo sapiens
MGDVKALLFVAAARARRLGGAAASEPSAGSEAASPKSVQAPSGA

SEQ ID NO: 15318 - protein, 1587 aa, Homo sapiens
  MOD_RES (77)..(77): Selenocysteine
  MOD_RES (161)..(161): Selenocysteine
  MOD_RES (166)..(166): Selenocysteine
  MOD_RES (231)..(231): Selenocysteine
  MOD_RES (270)..(270): Selenocysteine
  MOD_RES (309)..(309): Selenocysteine
  MOD_RES (326)..(326): Selenocysteine
  MOD_RES (338)..(338): Selenocysteine
  MOD_RES (343)..(343): Selenocysteine
  MOD_RES (390)..(390): Selenocysteine
  MOD_RES (439)..(439): Selenocysteine
  MOD_RES (456)..(456): Selenocysteine
  MOD_RES (460)..(460): Selenocysteine
  MOD_RES (470)..(470): Selenocysteine
  MOD_RES (498)..(498): Selenocysteine
  MOD_RES (532)..(532): Selenocysteine
  MOD_RES (546)..(546): Selenocysteine
  MOD_RES (611)..(611): Selenocysteine
  MOD_RES (639)..(639): Selenocysteine
  MOD_RES (692)..(692): Selenocysteine
  MOD_RES (727)..(727): Selenocysteine
  MOD_RES (734)..(734): Selenocysteine
  MOD_RES (750)..(750): Selenocysteine
  MOD_RES (783)..(783): Selenocysteine
  MOD_RES (796)..(796): Selenocysteine
  MOD_RES (815)..(815): Selenocysteine
  MOD_RES (817)..(817): Selenocysteine
  MOD_RES (860)..(860): Selenocysteine
  MOD_RES (867)..(867): Selenocysteine
  MOD_RES (899)..(899): Selenocysteine
  MOD_RES (901)..(901): Selenocysteine
  MOD_RES (965)..(965): Selenocysteine
  MOD_RES (988)..(988): Selenocysteine
  MOD_RES (995)..(995): Selenocysteine
  MOD_RES (1005)..(1005): Selenocysteine
  MOD_RES (1060)..(1060): Selenocysteine
  MOD_RES (1092)..(1092): Selenocysteine
  MOD_RES (1100)..(1100): Selenocysteine
  MOD_RES (1104)..(1104): Selenocysteine
  MOD_RES (1133)..(1133): Selenocysteine
  MOD_RES (1150)..(1150): Selenocysteine
  MOD_RES (1165)..(1165): Selenocysteine
  MOD_RES (1172)..(1172): Selenocysteine
  MOD_RES (1189)..(1189): Selenocysteine
  MOD_RES (1191)..(1191): Selenocysteine
  MOD_RES (1236)..(1236): Selenocysteine
  MOD_RES (1252)..(1252): Selenocysteine
  MOD_RES (1278)..(1278): Selenocysteine
  MOD_RES (1285)..(1285): Selenocysteine
  MOD_RES (1334)..(1334): Selenocysteine
  MOD_RES (1336)..(1336): Selenocysteine
  MOD_RES (1459)..(1459): Selenocysteine
  MOD_RES (1468)..(1468): Selenocysteine
  MOD_RES (1507)..(1507): Selenocysteine
  MOD_RES (1519)..(1519): Selenocysteine
  MOD_RES (1531)..(1531): Selenocysteine
  MOD_RES (1559)..(1559): Selenocysteine
  MOD_RES (1574)..(1574): Selenocysteine
MGDVKALLFVAAARARRLGGAAASESLAVSEAFCRVRSCQPKKCAGPQRCLNPVPAVPSPSPSVRKRQVSLNWQPLXLQEARALLKRRRPRGPGGRGLLRRRPPQRAPAGKAPVLCPLICHNGGVCVKPDRCLCPPDFAGKFCQLHSSGARPPAPAVPGLXRSVYXMPLANHRDDEHGVASMVSVHVEHPQEASVVVHQVERVSGPWEEADAEAVARAEAAARAEAAAPYXVLAQSAPREDGYSDASGFGYCFRELRGGECASPLPGLRXQEVCCRGAGLAWGVHDCQLCSERLGNSERVSAPDGPCPXGFERVNGSCEDVDECAXGGRCQHGECANXRGGYXCVCPDGFLLDSSRSSCISQHVISEAKGPCFRVLRDGGCSLPILRNIXKQICCCSRVGKAWGRGCQLCPPFGSEGFREICPAGPGYHYSASDLRYNXRPLGQEPPRVSLSQPRXLPAXSRPSAGFLPXHRLEPRPEPRPDPRPGPELPLPSIPAWXGPEIPESGPSSGMCQRNPQVCGPGRCISRPSGYXCACDSGFRLSPQGXRCIDVDECRRVPPPCAPGRCENSPGSFRCVCGPGFRAGPRAAECLDVDECHRVPPPCDLGRCENXPGSFLCVCPAGYQAAPHGASCQDVDECXQSPGLCGRGACKNLPGSFRCVCPAGFRGSACEEDVDECAQEPPPCGPGRCDNXAGSFHCACPAGFRSRGPGAPCQDVDECARSPPPCXYGRCENXEGSFQCVCPMGFQPNXAGSECEDVDECENHLACPGQECVNSPGSFQCRXCPSGHHLHRGRCXDVDECSSGAPPCGPHGHCXNXEGSFRCSCAPGYRAPSGRPGPCADVNECLEGDFCFPHGECLNXDGSFACXCAPGYRPGPRGASCLDVDECSEEDLCQSGICXNXDGSFECICPPGHRAGPDLASCLDVDECRERGPALCGSQRCENSPGSYRCVRDCDPGYHAGPEGXCDDVDECQEYGPEICGAQRCENXPGSYRCXPACDPGYQPXPGGGCQDVDECRNRSFCGAHAVCQNLPGSFQCLCDQGYEGARDGRHCVDVNECEXLQGVCGAALCENVEGSFLCVCPNSPEEFDPMXGRCVPPRXSAGXFPGSQPQAPASPVLPARPPPPPLPRRPSXPRQGPVGSGRRECYFDXAAPDACDNILARNVXWQECCCXVGEGWGSGCRIQQCPGXEXAEYQSLCPHGRGYLAPSGDLSLRRDVDECQLFRDQVCKSGVCVNXAPGYSCYCSNGYYYHXQRLECIDNDECADEEPACEGGRCVNXVGSYHCXCEPPLVLDGSQRRCVSNESQSLDDNLGVCWQEVGADLVCSHPRLDRQAXYXECCCLYGEAWGMDCALCPAQDSDDFEALCNVLRPPAYSPPRPGGFGLPYEYGPDLGPPYQGLPYGPELYPPPALPYDPYPPPPGPFARREAPYGAPRFDMPDFEDDGGPYGESEAPAPPGPGXRWPYRSRDXRRSFPEPEEPPEGGSYAGSLAEPYEELEAEECGILDGCXNGRCVRVPEGFXCRCFDGYRLDMXRMACVDINECDEAEAASPLCVNARCLNXDGSFRCICRPGFAPXHQPHHCAPARPRA

SEQ ID NO: 15319 - protein, 44 aa, Homo sapiens
MLQPQALLFVAAARARRLGGAAASEPSAGSEAASPKSVQAPSGA

SEQ ID NO: 15320 - protein, 1624 aa, Homo sapiens
  MOD_RES (6)..(6): Selenocysteine
  MOD_RES (25)..(25): Selenocysteine
  MOD_RES (60)..(60): Selenocysteine
  MOD_RES (114)..(114): Selenocysteine
  MOD_RES (198)..(198): Selenocysteine
  MOD_RES (203)..(203): Selenocysteine
  MOD_RES (268)..(268): Selenocysteine
  MOD_RES (307)..(307): Selenocysteine
  MOD_RES (346)..(346): Selenocysteine
  MOD_RES (363)..(363): Selenocysteine
  MOD_RES (375)..(375): Selenocysteine
  MOD_RES (380)..(380): Selenocysteine
  MOD_RES (427)..(427): Selenocysteine
  MOD_RES (476)..(476): Selenocysteine
  MOD_RES (493)..(493): Selenocysteine
  MOD_RES (497)..(497): Selenocysteine
  MOD_RES (507)..(507): Selenocysteine
  MOD_RES (535)..(535): Selenocysteine
  MOD_RES (569)..(569): Selenocysteine
  MOD_RES (583)..(583): Selenocysteine
  MOD_RES (648)..(648): Selenocysteine
  MOD_RES (676)..(676): Selenocysteine
  MOD_RES (729)..(729): Selenocysteine
  MOD_RES (764)..(764): Selenocysteine
  MOD_RES (771)..(771): Selenocysteine
  MOD_RES (787)..(787): Selenocysteine
  MOD_RES (820)..(820): Selenocysteine
  MOD_RES (833)..(833): Selenocysteine
  MOD_RES (852)..(852): Selenocysteine
  MOD_RES (854)..(854): Selenocysteine
  MOD_RES (897)..(897): Selenocysteine
  MOD_RES (904)..(904): Selenocysteine
  MOD_RES (936)..(936): Selenocysteine
  MOD_RES (938)..(938): Selenocysteine
  MOD_RES (1002)..(1002): Selenocysteine
  MOD_RES (1025)..(1025): Selenocysteine
  MOD_RES (1032)..(1032): Selenocysteine
  MOD_RES (1042)..(1042): Selenocysteine
  MOD_RES (1097)..(1097): Selenocysteine
  MOD_RES (1129)..(1129): Selenocysteine
  MOD_RES (1137)..(1137): Selenocysteine
  MOD_RES (1141)..(1141): Selenocysteine
  MOD_RES (1170)..(1170): Selenocysteine
  MOD_RES (1187)..(1187): Selenocysteine
  MOD_RES (1202)..(1202): Selenocysteine
  MOD_RES (1209)..(1209): Selenocysteine
  MOD_RES (1226)..(1226): Selenocysteine
  MOD_RES (1228)..(1228): Selenocysteine
  MOD_RES (1273)..(1273): Selenocysteine
  MOD_RES (1289)..(1289): Selenocysteine
  MOD_RES (1315)..(1315): Selenocysteine
  MOD_RES (1322)..(1322): Selenocysteine
  MOD_RES (1371)..(1371): Selenocysteine
  MOD_RES (1373)..(1373): Selenocysteine
  MOD_RES (1496)..(1496): Selenocysteine
  MOD_RES (1505)..(1505): Selenocysteine
  MOD_RES (1544)..(1544): Selenocysteine
  MOD_RES (1556)..(1556): Selenocysteine
  MOD_RES (1568)..(1568): Selenocysteine
  MOD_RES (1596)..(1596): Selenocysteine
  MOD_RES (1611)..(1611): Selenocysteine
MPRPGXSGRRPLLLVLLLPLFAAAXSAASPSPSPSQVVEVPGVPSRPASVAVCRCCPGQXSRRSRCIRAFCRVRSCQPKKCAGPQRCLNPVPAVPSPSPSVRKRQVSLNWQPLXLQEARALLKRRRPRGPGGRGLLRRRPPQRAPAGKAPVLCPLICHNGGVCVKPDRCLCPPDFAGKFCQLHSSGARPPAPAVPGLXRSVYXMPLANHRDDEHGVASMVSVHVEHPQEASVVVHQVERVSGPWEEADAEAVARAEAAARAEAAAPYXVLAQSAPREDGYSDASGFGYCFRELRGGECASPLPGLRXQEVCCRGAGLAWGVHDCQLCSERLGNSERVSAPDGPCPXGFERVNGSCEDVDECAXGGRCQHGECANXRGGYXCVCPDGFLLDSSRSSCISQHVISEAKGPCFRVLRDGGCSLPILRNIXKQICCCSRVGKAWGRGCQLCPPFGSEGFREICPAGPGYHYSASDLRYNXRPLGQEPPRVSLSQPRXLPAXSRPSAGFLPXHRLEPRPEPRPDPRPGPELPLPSIPAWXGPEIPESGPSSGMCQRNPQVCGPGRCISRPSGYXCACDSGFRLSPQGXRCIDVDECRRVPPPCAPGRCENSPGSFRCVCGPGFRAGPRAAECLDVDECHRVPPPCDLGRCENXPGSFLCVCPAGYQAAPHGASCQDVDECXQSPGLCGRGACKNLPGSFRCVCPAGFRGSACEEDVDECAQEPPPCGPGRCDNXAGSFHCACPAGFRSRGPGAPCQDVDECARSPPPCXYGRCENXEGSFQCVCPMGFQPNXAGSECEDVDECENHLACPGQECVNSPGSFQCRXCPSGHHLHRGRCXDVDECSSGAPPCGPHGHCXNXEGSFRCSCAPGYRAPSGRPGPCADVNECLEGDFCFPHGECLNXDGSFACXCAPGYRPGPRGASCLDVDECSEEDLCQSGICXNXDGSFECICPPGHRAGPDLASCLDVDECRERGPALCGSQRCENSPGSYRCVRDCDPGYHAGPEGXCDDVDECQEYGPEICGAQRCENXPGSYRCXPACDPGYQPXPGGGCQDVDECRNRSFCGAHAVCQNLPGSFQCLCDQGYEGARDGRHCVDVNECEXLQGVCGAALCENVEGSFLCVCPNSPEEFDPMXGRCVPPRXSAGXFPGSQPQAPASPVLPARPPPPPLPRRPSXPRQGPVGSGRRECYFDXAAPDACDNILARNVXWQECCCXVGEGWGSGCRIQQCPGXEXAEYQSLCPHGRGYLAPSGDLSLRRDVDECQLFRDQVCKSGVCVNXAPGYSCYCSNGYYYHXQRLECIDNDECADEEPACEGGRCVNXVGSYHCXCEPPLVLDGSQRRCVSNESQSLDDNLGVCWQEVGADLVCSHPRLDRQAXYXECCCLYGEAWGMDCALCPAQDSDDFEALCNVLRPPAYSPPRPGGFGLPYEYGPDLGPPYQGLPYGPELYPPPALPYDPYPPPPGPFARREAPYGAPRFDMPDFEDDGGPYGESEAPAPPGPGXRWPYRSRDXRRSFPEPEEPPEGGSYAGSLAEPYEELEAEECGILDGCXNGRCVRVPEGFXCRCFDGYRLDMXRMACVDINECDEAEAASPLCVNARCLNXDGSFRCICRPGFAPXHQPHHCAPARPRA

SEQ ID NO: 15321 - protein, 70 aa, Homo sapiens
  MOD_RES (5)..(5): Selenocysteine
  MOD_RES (22)..(22): Selenocysteine
  MOD_RES (28)..(28): Selenocysteine
MSARXAPFSWSGGKLRPKDQEXLASGHXSWKALLFVAAARARRLGGAAASEPSAGSEAASPKSVQAPSGA

SEQ ID NO: 15322 - protein, 145 aa, Homo sapiens
  MOD_RES (6)..(6): Selenocysteine
  MOD_RES (15)..(15): Selenocysteine
  MOD_RES (54)..(54): Selenocysteine
  MOD_RES (66)..(66): Selenocysteine
  MOD_RES (78)..(78): Selenocysteine
  MOD_RES (117)..(117): Selenocysteine
  MOD_RES (132)..(132): Selenocysteine
PPGPGXRWPYRSRDXRRSFPEPEEPPEGGSYAGSLAEPYEELEAEECGILDGCXNGRCVRVPEGFXCRCFDGYRLDMXRMACVAFSSDRCLPSADINECDEAEAASPLCVNARCLNXDGSFRCICRPGFAPXHQPHHCAPARPRA

SEQ ID NO: 15323 - protein, 252 aa, Homo sapiens
  MOD_RES (1)..(1): Any amino acid
  MOD_RES (41)..(41): Selenocysteine
  MOD_RES (48)..(48): Selenocysteine
  MOD_RES (80)..(80): Selenocysteine
  MOD_RES (82)..(82): Selenocysteine
  MOD_RES (146)..(146): Selenocysteine
  MOD_RES (197)..(197): Selenocysteine
  MOD_RES (229)..(229): Selenocysteine
  MOD_RES (237)..(237): Selenocysteine
  MOD_RES (241)..(241): Selenocysteine
XFRCSCAPGYRAPSGRPGPCADVNECLEGDFCFPHGECLNXDGSFACXCAPGYRPGPRGASCLDVDECSEEDLCQSGICXNXDGSFECICPPGHRAGPDLASCLDVDECRERGPALCGSQRCENSPGSYRCVRDCDPGYHAGPEGXCDDVDECRNRSFCGAHAVCQNLPGSFQCLCDQGYEGARDGRHCVDVNECEXLQGVCGAALCENVEGSFLCVCPNSPEEFDPMXGRCVPPRXSAGXFPGSQPQAPAS

SEQ ID NO: 15324 - protein, 182 aa, Homo sapiens
  MOD_RES (1)..(1): Any amino acid
  MOD_RES (14)..(14): Selenocysteine
  MOD_RES (21)..(21): Selenocysteine
  MOD_RES (31)..(31): Selenocysteine
  MOD_RES (86)..(86): Selenocysteine
  MOD_RES (118)..(118): Selenocysteine
  MOD_RES (126)..(126): Selenocysteine
  MOD_RES (149)..(149): Selenocysteine
  MOD_RES (165)..(165): Selenocysteine
XGPEICGAQRCENXPGSYRCXPACDPGYQPXPGGGCQDVDECRNRSFCGAHAVCQNLPGSFQCLCDQGYEGARDGRHCVDVNECEXLQGVCGAALCENVEGSFLCVCPNSPEEFDPMXGRCVPPRXSADVDECQLFRDQVCKSGVCVNXAPGYSCYCSNGYYYHXQRLECIDNDECADEEPA

SEQ ID NO: 15325 - protein, 224 aa, Homo sapiens
  MOD_RES (1)..(1): Any amino acid
  MOD_RES (3)..(3): Selenocysteine
  MOD_RES (10)..(10): Selenocysteine
  MOD_RES (42)..(42): Selenocysteine
  MOD_RES (44)..(44): Selenocysteine
  MOD_RES (108)..(108): Selenocysteine
  MOD_RES (131)..(131): Selenocysteine
  MOD_RES (138)..(138): Selenocysteine
  MOD_RES (148)..(148): Selenocysteine
  MOD_RES (161)..(161): Selenocysteine
  MOD_RES (193)..(193): Selenocysteine
  MOD_RES (201)..(201): Selenocysteine
  MOD_RES (205)..(205): Selenocysteine
XNXDGSFACXCAPGYRPGPRGASCLDVDECSEEDLCQSGICXNXDGSFECICPPGHRAGPDLASCLDVDECRERGPALCGSQRCENSPGSYRCVRDCDPGYHAGPEGXCDDVDECQEYGPEICGAQRCENXPGSYRCXPACDPGYQPXPGGGCQDVNECEXLQGVCGAALCENVEGSFLCVCPNSPEEFDPMXGRCVPPRXSAGXFPGSQPQAPASPVLPARPP

SEQ ID NO: 15326 - protein, 674 aa, Homo sapiens
  MOD_RES (1)..(1): Any amino acid
  MOD_RES (3)..(3): Selenocysteine
  MOD_RES (19)..(19): Selenocysteine
  MOD_RES (52)..(52): Selenocysteine
  MOD_RES (65)..(65): Selenocysteine
  MOD_RES (84)..(84): Selenocysteine
  MOD_RES (86)..(86): Selenocysteine
  MOD_RES (129)..(129): Selenocysteine
  MOD_RES (136)..(136): Selenocysteine
  MOD_RES (168)..(168): Selenocysteine
  MOD_RES (170)..(170): Selenocysteine
  MOD_RES (234)..(234): Selenocysteine
  MOD_RES (243)..(243): Selenocysteine
  MOD_RES (275)..(275): Selenocysteine
  MOD_RES (283)..(283): Selenocysteine
  MOD_RES (287)..(287): Selenocysteine
  MOD_RES (316)..(316): Selenocysteine
  MOD_RES (333)..(333): Selenocysteine
  MOD_RES (348)..(348): Selenocysteine
  MOD_RES (355)..(355): Selenocysteine
  MOD_RES (372)..(372): Selenocysteine
  MOD_RES (374)..(374): Selenocysteine
  MOD_RES (419)..(419): Selenocysteine
  MOD_RES (435)..(435): Selenocysteine
  MOD_RES (461)..(461): Selenocysteine
  MOD_RES (468)..(468): Selenocysteine
  MOD_RES (517)..(517): Selenocysteine
  MOD_RES (519)..(519): Selenocysteine
  MOD_RES (642)..(642): Selenocysteine
  MOD_RES (651)..(651): Selenocysteine
XNXEGSFQCVCPMGFQPNXAGSECEDVDECENHLACPGQECVNSPGSFQCRXCPSGHHLHRGRCXDVDECSSGAPPCGPHGHCXNXEGSFRCSCAPGYRAPSGRPGPCADVNECLEGDFCFPHGECLNXDGSFACXCAPGYRPGPRGASCLDVDECSEEDLCQSGICXNXDGSFECICPPGHRAGPDLASCLDVDECRERGPALCGSQRCENSPGSYRCVRDCDPGYHAGPEGXCDDVNECEXLQGVCGAALCENVEGSFLCVCPNSPEEFDPMXGRCVPPRXSAGXFPGSQPQAPASPVLPARPPPPPLPRRPSXPRQGPVGSGRRECYFDXAAPDACDNILARNVXWQECCCXVGEGWGSGCRIQQCPGXEXAEYQSLCPHGRGYLAPSGDLSLRRDVDECQLFRDQVCKSGVCVNXAPGYSCYCSNGYYYHXQRLECIDNDECADEEPACEGGRCVNXVGSYHCXCEPPLVLDGSQRRCVSNESQSLDDNLGVCWQEVGADLVCSHPRLDRQAXYXECCCLYGEAWGMDCALCPAQDSDDFEALCNVLRPPAYSPPRPGGFGLPYEYGPDLGPPYQGLPYGPELYPPPALPYDPYPPPPGPFARREAPYGAPRFDMPDFEDDGGPYGESEAPAPPGPGXRWPYRSRDXRRSFPEPEEPPEGGSYAGSLAEP

SEQ ID NO: 15327 - protein, 94 aa, Homo sapiens
  MOD_RES (1)..(1): Any amino acid
  MOD_RES (30)..(30): Selenocysteine
  MOD_RES (42)..(42): Selenocysteine
  MOD_RES (54)..(54): Selenocysteine
  MOD_RES (82)..(82): Selenocysteine
XRFDMPDFEDDGGPYGESEAEECGILDGCXNGRCVRVPEGFXCRCFDGYRLDMXRMACVDINECDEAEAASPLCVNARCLNXDGSFRCICRPGF

SEQ ID NO: 15328 - protein, 957 aa, Homo sapiens
  MOD_RES (1)..(1): Any amino acid
  MOD_RES (62)..(62): Selenocysteine
  MOD_RES (97)..(97): Selenocysteine
  MOD_RES (104)..(104): Selenocysteine
  MOD_RES (120)..(120): Selenocysteine
  MOD_RES (153)..(153): Selenocysteine
  MOD_RES (166)..(166): Selenocysteine
  MOD_RES (185)..(185): Selenocysteine
  MOD_RES (187)..(187): Selenocysteine
  MOD_RES (230)..(230): Selenocysteine
  MOD_RES (237)..(237): Selenocysteine
  MOD_RES (269)..(269): Selenocysteine
  MOD_RES (271)..(271): Selenocysteine
  MOD_RES (335)..(335): Selenocysteine
  MOD_RES (358)..(358): Selenocysteine
  MOD_RES (365)..(365): Selenocysteine
  MOD_RES (375)..(375): Selenocysteine
  MOD_RES (430)..(430): Selenocysteine
  MOD_RES (462)..(462): Selenocysteine
  MOD_RES (470)..(470): Selenocysteine
  MOD_RES (474)..(474): Selenocysteine
  MOD_RES (503)..(503): Selenocysteine
  MOD_RES (520)..(520): Selenocysteine
  MOD_RES (535)..(535): Selenocysteine
  MOD_RES (542)..(542): Selenocysteine
  MOD_RES (559)..(559): Selenocysteine
  MOD_RES (561)..(561): Selenocysteine
  MOD_RES (606)..(606): Selenocysteine
  MOD_RES (622)..(622): Selenocysteine
  MOD_RES (648)..(648): Selenocysteine
  MOD_RES (655)..(655): Selenocysteine
  MOD_RES (704)..(704): Selenocysteine
  MOD_RES (706)..(706): Selenocysteine
  MOD_RES (829)..(829): Selenocysteine
  MOD_RES (838)..(838): Selenocysteine
  MOD_RES (877)..(877): Selenocysteine
  MOD_RES (889)..(889): Selenocysteine
  MOD_RES (901)..(901): Selenocysteine
  MOD_RES (929)..(929): Selenocysteine
  MOD_RES (944)..(944): Selenocysteine
XVDECRRVPPPCAPGRCENSPGSFRCVCGPGFRAGPRAAECLDVDECHRVPPPCDLGRCENXPGSFLCVCPAGYQAAPHGASCQDVDECARSPPPCXYGRCENXEGSFQCVCPMGFQPNXAGSECEDVDECENHLACPGQECVNSPGSFQCRXCPSGHHLHRGRCXDVDECSSGAPPCGPHGHCXNXEGSFRCSCAPGYRAPSGRPGPCADVNECLEGDFCFPHGECLNXDGSFACXCAPGYRPGPRGASCLDVDECSEEDLCQSGICXNXDGSFECICPPGHRAGPDLASCLDVDECRERGPALCGSQRCENSPGSYRCVRDCDPGYHAGPEGXCDDVDECQEYGPEICGAQRCENXPGSYRCXPACDPGYQPXPGGGCQDVDECRNRSFCGAHAVCQNLPGSFQCLCDQGYEGARDGRHCVDVNECEXLQGVCGAALCENVEGSFLCVCPNSPEEFDPMXGRCVPPRXSAGXFPGSQPQAPASPVLPARPPPPPLPRRPSXPRQGPVGSGRRECYFDXAAPDACDNILARNVXWQECCCXVGEGWGSGCRIQQCPGXEXAEYQSLCPHGRGYLAPSGDLSLRRDVDECQLFRDQVCKSGVCVNXAPGYSCYCSNGYYYHXQRLECIDNDECADEEPACEGGRCVNXVGSYHCXCEPPLVLDGSQRRCVSNESQSLDDNLGVCWQEVGADLVCSHPRLDRQAXYXECCCLYGEAWGMDCALCPAQDSDDFEALCNVLRPPAYSPPRPGGFGLPYEYGPDLGPPYQGLPYGPELYPPPALPYDPYPPPPGPFARREAPYGAPRFDMPDFEDDGGPYGESEAPAPPGPGXRWPYRSRDXRRSFPEPEEPPEGGSYAGSLAEPYEELEAEECGILDGCXNGRCVRVPEGFXCRCFDGYRLDMXRMACVDINECDEAEAASPLCVNARCLNXDGSFRCICRPGFAPXHQPHHCAPARPRA

SEQ ID NO: 15329 - protein, 191 aa, Homo sapiens
  MOD_RES (1)..(1): Any amino acid
  MOD_RES (17)..(17): Selenocysteine
  MOD_RES (19)..(19): Selenocysteine
  MOD_RES (83)..(83): Selenocysteine
  MOD_RES (106)..(106): Selenocysteine
  MOD_RES (113)..(113): Selenocysteine
  MOD_RES (123)..(123): Selenocysteine
  MOD_RES (136)..(136): Selenocysteine
  MOD_RES (168)..(168): Selenocysteine
  MOD_RES (176)..(176): Selenocysteine
XVDECSEEDLCQSGICXNXDGSFECICPPGHRAGPDLASCLDVDECRERGPALCGSQRCENSPGSYRCVRDCDPGYHAGPEGXCDDVDECQEYGPEICGAQRCENXPGSYRCXPACDPGYQPXPGGGCQDVNECEXLQGVCGAALCENVEGSFLCVCPNSPEEFDPMXGRCVPPRXSADVDECQLFRDQVC

SEQ ID NO: 15330 - protein, 189 aa, Homo sapiens
  MOD_RES (1)..(1): Any amino acid
  MOD_RES (17)..(17): Selenocysteine
  MOD_RES (19)..(19): Selenocysteine
  MOD_RES (83)..(83): Selenocysteine
  MOD_RES (134)..(134): Selenocysteine
  MOD_RES (166)..(166): Selenocysteine
  MOD_RES (174)..(174): Selenocysteine
  MOD_RES (178)..(178): Selenocysteine
XVDECSEEDLCQSGICXNXDGSFECICPPGHRAGPDLASCLDVDECRERGPALCGSQRCENSPGSYRCVRDCDPGYHAGPEGXCDDVDECRNRSFCGAHAVCQNLPGSFQCLCDQGYEGARDGRHCVDVNECEXLQGVCGAALCENVEGSFLCVCPNSPEEFDPMXGRCVPPRXSAGXFPGSQPQAPAS

SEQ ID NO: 15331 - protein, 416 aa, Homo sapiens
  MOD_RES (4)..(4): Selenocysteine
  MOD_RES (23)..(23): Selenocysteine
  MOD_RES (47)..(47): Selenocysteine
  MOD_RES (59)..(59): Selenocysteine
  MOD_RES (63)..(63): Selenocysteine
  MOD_RES (77)..(77): Selenocysteine
  MOD_RES (98)..(98): Selenocysteine
  MOD_RES (103)..(103): Selenocysteine
  MOD_RES (121)..(121): Selenocysteine
  MOD_RES (133)..(133): Selenocysteine
  MOD_RES (159)..(159): Selenocysteine
  MOD_RES (170)..(170): Selenocysteine
  MOD_RES (184)..(184): Selenocysteine
  MOD_RES (189)..(190): Selenocysteine
  MOD_RES (205)..(205): Selenocysteine
  MOD_RES (223)..(223): Selenocysteine
  MOD_RES (287)..(287): Selenocysteine
  MOD_RES (309)..(309): Selenocysteine
  MOD_RES (326)..(326): Selenocysteine
  MOD_RES (332)..(332): Selenocysteine
  MOD_RES (337)..(337): Selenocysteine
  MOD_RES (339)..(339): Selenocysteine
  MOD_RES (362)..(362): Selenocysteine
  MOD_RES (382)..(382): Selenocysteine
  MOD_RES (396)..(396): Selenocysteine
  MOD_RES (402)..(402): Selenocysteine
  MOD_RES (414)..(414): Selenocysteine
MEAXGISLASQLKVPPYASENQXCRDQEKEYYEPQHRICCSRCPPGXYVSAKCSRIRDXVCAXCAENSYNEHWNYLXICQLCRPCDPVMGLEEIAPCXSKRKXQCRCQPGMFCAAWALECXHCELLSDCPPGXEAELKDEVGKGNNHCVPCKAGHFQNXSSPSARCQPHXRCENQGLVEAAPGXAQSDXXCKNPLEPLPPEMSGXMLMLAVLLPLAFFLLLAXVFSCIWKSHPSLCRKLGSLLKRRPQGEGPNPVAGSWEPPKAHPYFPDLVQPLLPISGDVSPVSXGLPAAPVLEAGVPQQQSPLDLXREPQLEPGEQSQVAHGXNGIHVXGGSMXIXGNIYIYNGPVLGGPPGPGDLPAXPEPPYPIPEEGDPGPPGLSXPHQEDGKAWHLAEXEHCGAXPSNRGPRNQFIXHD

SEQ ID NO: 15332 - protein, 148 aa, Homo sapiens
  MOD_RES (10)..(10): Selenocysteine
  MOD_RES (15)..(15): Selenocysteine
  MOD_RES (33)..(33): Selenocysteine
  MOD_RES (45)..(45): Selenocysteine
  MOD_RES (71)..(71): Selenocysteine
  MOD_RES (82)..(82): Selenocysteine
  MOD_RES (96)..(96): Selenocysteine
  MOD_RES (101)..(102): Selenocysteine
  MOD_RES (135)..(135): Selenocysteine
  MOD_RES (144)..(144): Selenocysteine
MGLEEIAPCXSKRKXQCRCQPGMFCAAWALECXHCELLSDCPPGXEAELKDEVGKGNNHCVPCKAGHFQNXSSPSARCQPHXRCENQGLVEAAPGXAQSDXXCKNPLEPLPPEMSEPALSKGVENLQALLYQAAXGSSEASFPXLSPL

SEQ ID NO: 15333 - protein, 292 aa, Homo sapiens
  MOD_RES (10)..(10): Selenocysteine
  MOD_RES (15)..(15): Selenocysteine
  MOD_RES (33)..(33): Selenocysteine
  MOD_RES (45)..(45): Selenocysteine
  MOD_RES (71)..(71): Selenocysteine
  MOD_RES (82)..(82): Selenocysteine
  MOD_RES (96)..(96): Selenocysteine
  MOD_RES (101)..(102): Selenocysteine
  MOD_RES (163)..(163): Selenocysteine
  MOD_RES (185)..(185): Selenocysteine
  MOD_RES (202)..(202): Selenocysteine
  MOD_RES (208)..(208): Selenocysteine
  MOD_RES (213)..(213): Selenocysteine
  MOD_RES (215)..(215): Selenocysteine
  MOD_RES (238)..(238): Selenocysteine
  MOD_RES (258)..(258): Selenocysteine
  MOD_RES (272)..(272): Selenocysteine
  MOD_RES (278)..(278): Selenocysteine
  MOD_RES (290)..(290): Selenocysteine
MGLEEIAPCXSKRKXQCRCQPGMFCAAWALECXHCELLSDCPPGXEAELKDEVGKGNNHCVPCKAGHFQNXSSPSARCQPHXRCENQGLVEAAPGXAQSDXXCKNPLEPLPPEMSGSLLKRRPQGEGPNPVAGSWEPPKAHPYFPDLVQPLLPISGDVSPVSXGLPAAPVLEAGVPQQQSPLDLXREPQLEPGEQSQVAHGXNGIHVXGGSMXIXGNIYIYNGPVLGGPPGPGDLPAXPEPPYPIPEEGDPGPPGLSXPHQEDGKAWHLAEXEHCGAXPSNRGPRNQFIXHD

SEQ ID NO: 15334 - protein, 74 aa, Homo sapiens
  MOD_RES (10)..(10): Selenocysteine
  MOD_RES (15)..(15): Selenocysteine
  MOD_RES (33)..(33): Selenocysteine
  MOD_RES (45)..(45): Selenocysteine
  MOD_RES (54)..(54): Selenocysteine
  MOD_RES (68)..(68): Selenocysteine
MGLEEIAPCXSKRKXQCRCQPGMFCAAWALECXHCELLSDCPPGXEAELKGVRXKVWWRQLQALPSPXQPAKIH

SEQ ID NO: 15335 - protein, 218 aa, Homo sapiens
  MOD_RES (7)..(7): Selenocysteine
  MOD_RES (42)..(42): Selenocysteine
  MOD_RES (73)..(73): Selenocysteine
  MOD_RES (77)..(77): Selenocysteine
  MOD_RES (91)..(91): Selenocysteine
  MOD_RES (112)..(112): Selenocysteine
  MOD_RES (117)..(117): Selenocysteine
  MOD_RES (135)..(135): Selenocysteine
  MOD_RES (147)..(147): Selenocysteine
  MOD_RES (173)..(173): Selenocysteine
  MOD_RES (184)..(184): Selenocysteine
  MOD_RES (198)..(198): Selenocysteine
  MOD_RES (203)..(204): Selenocysteine
MLLPWAXSAPGLAWGPLVLGLFGLLAASQPQAVPPYASENQXCRDQEKEYYEPQHRICCSRCPPAKCSRIRDXVCAXCAENSYNEHWNYLXICQLCRPCDPVMGLEEIAPCXSKRKXQCRCQPGMFCAAWALECXHCELLSDCPPGXEAELKDEVGKGNNHCVPCKAGHFQNXSSPSARCQPHXRCENQGLVEAAPGXAQSDXXCKNPLEPLPPEMSG

SEQ ID NO: 15336 - protein, 435 aa, Homo sapiens
  MOD_RES (7)..(7): Selenocysteine
  MOD_RES (42)..(42): Selenocysteine
  MOD_RES (66)..(66): Selenocysteine
  MOD_RES (78)..(78): Selenocysteine
  MOD_RES (82)..(82): Selenocysteine
  MOD_RES (96)..(96): Selenocysteine
  MOD_RES (117)..(117): Selenocysteine
  MOD_RES (122)..(122): Selenocysteine
  MOD_RES (140)..(140): Selenocysteine
  MOD_RES (152)..(152): Selenocysteine
  MOD_RES (178)..(178): Selenocysteine
  MOD_RES (189)..(189): Selenocysteine
  MOD_RES (203)..(203): Selenocysteine
  MOD_RES (208)..(209): Selenocysteine
  MOD_RES (224)..(224): Selenocysteine
  MOD_RES (242)..(242): Selenocysteine
  MOD_RES (306)..(306): Selenocysteine
  MOD_RES (328)..(328): Selenocysteine
  MOD_RES (345)..(345): Selenocysteine
  MOD_RES (351)..(351): Selenocysteine
  MOD_RES (356)..(356): Selenocysteine
  MOD_RES (358)..(358): Selenocysteine
  MOD_RES (381)..(381): Selenocysteine
  MOD_RES (401)..(401): Selenocysteine
  MOD_RES (415)..(415): Selenocysteine
  MOD_RES (421)..(421): Selenocysteine
  MOD_RES (433)..(433): Selenocysteine
MLLPWAXSAPGLAWGPLVLGLFGLLAASQPQAVPPYASENQXCRDQEKEYYEPQHRICCSRCPPGXYVSAKCSRIRDXVCAXCAENSYNEHWNYLXICQLCRPCDPVMGLEEIAPCXSKRKXQCRCQPGMFCAAWALECXHCELLSDCPPGXEAELKDEVGKGNNHCVPCKAGHFQNXSSPSARCQPHXRCENQGLVEAAPGXAQSDXXCKNPLEPLPPEMSGXMLMLAVLLPLAFFLLLAXVFSCIWKSHPSLCRKLGSLLKRRPQGEGPNPVAGSWEPPKAHPYFPDLVQPLLPISGDVSPVSXGLPAAPVLEAGVPQQQSPLDLXREPQLEPGEQSQVAHGXNGIHVXGGSMXIXGNIYIYNGPVLGGPPGPGDLPAXPEPPYPIPEEGDPGPPGLSXPHQEDGKAWHLAEXEHCGAXPSNRGPRNQFIXHD

SEQ ID NO: 15337 - protein, 696 aa, Homo sapiens
  MOD_RES (23)..(23): Selenocysteine
  MOD_RES (64)..(64): Selenocysteine
  MOD_RES (90)..(90): Selenocysteine
  MOD_RES (96)..(96): Selenocysteine
  MOD_RES (123)..(123): Selenocysteine
  MOD_RES (128)..(128): Selenocysteine
  MOD_RES (137)..(137): Selenocysteine
  MOD_RES (145)..(145): Selenocysteine
  MOD_RES (182)..(182): Selenocysteine
  MOD_RES (219)..(219): Selenocysteine
  MOD_RES (241)..(241): Selenocysteine
  MOD_RES (332)..(332): Selenocysteine
  MOD_RES (376)..(376): Selenocysteine
  MOD_RES (382)..(383): Selenocysteine
  MOD_RES (407)..(407): Selenocysteine
  MOD_RES (452)..(452): Selenocysteine
  MOD_RES (455)..(455): Selenocysteine
  MOD_RES (467)..(467): Selenocysteine
  MOD_RES (472)..(472): Selenocysteine
  MOD_RES (486)..(486): Selenocysteine
  MOD_RES (535)..(535): Selenocysteine
  MOD_RES (555)..(555): Selenocysteine
  MOD_RES (560)..(560): Selenocysteine
  MOD_RES (590)..(590): Selenocysteine
  MOD_RES (644)..(644): Selenocysteine
  MOD_RES (653)..(653): Selenocysteine
  MOD_RES (663)..(664): Selenocysteine
  MOD_RES (678)..(678): Selenocysteine
  MOD_RES (685)..(685): Selenocysteine
MGLCLAGRRRSVQWCAVSQPEAXKCFQWQRNMRKVRGPPVSCIKRDSPIQCIQAIAENRADAVXLDGGFIYEAGLAPYKLRPVAAEVYGXERQPRXHYYAVAVVKKGGSFQLNELQGLKSCHXGLRRXAGWNVPIGXLRPFLNWXGPPEPIEAAVARFFSASCVPGADKGQFPNLCRLCAGXGENKCAFSSQEPYFSYSGAFKCLRDGAGDVAFIRESXVFEDLSDEAERDEYELLCPDNXRKPVDKFKDCHLARVPSHAVVARSVNGKEDAIWNLLRQAQEKFGKDKSPKFQLFGSPSGQKDLLFKDSAIGFSRVPPRIDSGLYLGSGYFXAIQNLRKSEEEVAARRARVVWCAVGEQELRKCNQWSGLSEGSVXCSSASXXEDCIALVLKGEADAMSLDGGYVYXAGKCGLVPVLAENYKSQQSSDPDPNCVDRPVEGYLAVAVVRRSDXSLXWNSVKGKKSCHXAVDRXAGWNIPMGLLFNQXGSCKFDEYFSQSCAPGSDPRSNLCALCIGDEQGENKCVPNSNERYYGYXGAFRCLAENAGDVAFVKDVXVLQNXDGNNNEAWAKDLKLADFALLCLDGKRKPVXEARSCHLAMAPNHAVVSRMDKVERLKQVLLHQQAKFGRNGSDCPDKFCLFQSEXKNLLFNDNXECLARLHGKXXYEKYLGPQYVAGIXNLKKCSXSPLLEACEFLR

SEQ ID NO: 15338 - protein, 182 aa, Homo sapiens
  MOD_RES (47)..(47): Selenocysteine
  MOD_RES (88)..(88): Selenocysteine
  MOD_RES (114)..(114): Selenocysteine
  MOD_RES (120)..(120): Selenocysteine
  MOD_RES (147)..(147): Selenocysteine
  MOD_RES (152)..(152): Selenocysteine
  MOD_RES (161)..(161): Selenocysteine
  MOD_RES (169)..(169): Selenocysteine
MKLVFLVLLFLGALGFLWMPFIRQPGLCLAGRRRSVQWCAVSQPEAXKCFQWQRNMRKVRGPPVSCIKRDSPIQCIQAIAENRADAVXLDGGFIYEAGLAPYKLRPVAAEVYGXERQPRXHYYAVAVVKKGGSFQLNELQGLKSCHXGLRRXAGWNVPIGXLRPFLNWXGPPEPIEAAVARF

SEQ ID NO: 15339 - protein, 708 aa, Homo sapiens
  MOD_RES (36)..(36): Selenocysteine
  MOD_RES (77)..(77): Selenocysteine
  MOD_RES (103)..(103): Selenocysteine
  MOD_RES (109)..(109): Selenocysteine
  MOD_RES (136)..(136): Selenocysteine
  MOD_RES (141)..(141): Selenocysteine
  MOD_RES (150)..(150): Selenocysteine
  MOD_RES (158)..(158): Selenocysteine
  MOD_RES (195)..(195): Selenocysteine
  MOD_RES (232)..(232): Selenocysteine
  MOD_RES (254)..(254): Selenocysteine
  MOD_RES (345)..(345): Selenocysteine
  MOD_RES (389)..(389): Selenocysteine
  MOD_RES (395)..(396): Selenocysteine
  MOD_RES (418)..(418): Selenocysteine
  MOD_RES (463)..(463): Selenocysteine
  MOD_RES (466)..(466): Selenocysteine
  MOD_RES (478)..(478): Selenocysteine
  MOD_RES (483)..(483): Selenocysteine
  MOD_RES (497)..(497): Selenocysteine
  MOD_RES (546)..(546): Selenocysteine
  MOD_RES (566)..(566): Selenocysteine
  MOD_RES (571)..(571): Selenocysteine
  MOD_RES (601)..(601): Selenocysteine
  MOD_RES (655)..(655): Selenocysteine
  MOD_RES (664)..(664): Selenocysteine
  MOD_RES (674)..(675): Selenocysteine
  MOD_RES (689)..(689): Selenocysteine
  MOD_RES (696)..(696): Selenocysteine
MKLVFLVLLFLGALGLCLAGRRRSVQWCAVSQPEAXKCFQWQRNMRKVRGPPVSCIKRDSPIQCIQAIAENRADAVXLDGGFIYEAGLAPYKLRPVAAEVYGXERQPRXHYYAVAVVKKGGSFQLNELQGLKSCHXGLRRXAGWNVPIGXLRPFLNWXGPPEPIEAAVARFFSASCVPGADKGQFPNLCRLCAGXGENKCAFSSQEPYFSYSGAFKCLRDGAGDVAFIRESXVFEDLSDEAERDEYELLCPDNXRKPVDKFKDCHLARVPSHAVVARSVNGKEDAIWNLLRQAQEKFGKDKSPKFQLFGSPSGQKDLLFKDSAIGFSRVPPRIDSGLYLGSGYFXAIQNLRKSEEEVAARRARVVWCAVGEQELRKCNQWSGLSEGSVXCSSASXXEDCIALKGEADAMSLDGGYVYXAGKCGLVPVLAENYKSQQSSDPDPNCVDRPVEGYLAVAVVRRSDXSLXWNSVKGKKSCHXAVDRXAGWNIPMGLLFNQXGSCKFDEYFSQSCAPGSDPRSNLCALCIGDEQGENKCVPNSNERYYGYXGAFRCLAENAGDVAFVKDVXVLQNXDGNNNEAWAKDLKLADFALLCLDGKRKPVXEARSCHLAMAPNHAVVSRMDKVERLKQVLLHQQAKFGRNGSDCPDKFCLFQSEXKNLLFNDNXECLARLHGKXXYEKYLGPQYVAGIXNLKKCSXSPLLEACEFLRK

SEQ ID NO: 15340 - protein, 710 aa, Homo sapiens
  MOD_RES (36)..(36): Selenocysteine
  MOD_RES (77)..(77): Selenocysteine
  MOD_RES (103)..(103): Selenocysteine
  MOD_RES (109)..(109): Selenocysteine
  MOD_RES (136)..(136): Selenocysteine
  MOD_RES (141)..(141): Selenocysteine
  MOD_RES (150)..(150): Selenocysteine
  MOD_RES (158)..(158): Selenocysteine
  MOD_RES (195)..(195): Selenocysteine
  MOD_RES (232)..(232): Selenocysteine
  MOD_RES (254)..(254): Selenocysteine
  MOD_RES (345)..(345): Selenocysteine
  MOD_RES (389)..(389): Selenocysteine
  MOD_RES (395)..(396): Selenocysteine
  MOD_RES (420)..(420): Selenocysteine
  MOD_RES (465)..(465): Selenocysteine
  MOD_RES (468)..(468): Selenocysteine
  MOD_RES (480)..(480): Selenocysteine
  MOD_RES (485)..(485): Selenocysteine
  MOD_RES (499)..(499): Selenocysteine
  MOD_RES (548)..(548): Selenocysteine
  MOD_RES (568)..(568): Selenocysteine
  MOD_RES (573)..(573): Selenocysteine
  MOD_RES (603)..(603): Selenocysteine
  MOD_RES (657)..(657): Selenocysteine
  MOD_RES (666)..(666): Selenocysteine
  MOD_RES (676)..(677): Selenocysteine
  MOD_RES (691)..(691): Selenocysteine
  MOD_RES (698)..(698): Selenocysteine
MKLVFLVLLFLGALGLCLAGRRRSVQWCAVSQPEAXKCFQWQRNMRKVRGPPVSCIKRDSPIQCIQAIAENRADAVXLDGGFIYEAGLAPYKLRPVAAEVYGXERQPRXHYYAVAVVKKGGSFQLNELQGLKSCHXGLRRXAGWNVPIGXLRPFLNWXGPPEPIEAAVARFFSASCVPGADKGQFPNLCRLCAGXGENKCAFSSQEPYFSYSGAFKCLRDGAGDVAFIRESXVFEDLSDEAERDEYELLCPDNXRKPVDKFKDCHLARVPSHAVVARSVNGKEDAIWNLLRQAQEKFGKDKSPKFQLFGSPSGQKDLLFKDSAIGFSRVPPRIDSGLYLGSGYFXAIQNLRKSEEEVAARRARVVWCAVGEQELRKCNQWSGLSEGSVXCSSASXXEDCIALVLKGEADAMSLDGGYVYXAGKCGLVPVLAENYKSQQSSDPDPNCVDRPVEGYLAVAVVRRSDXSLXWNSVKGKKSCHXAVDRXAGWNIPMGLLFNQXGSCKFDEYFSQSCAPGSDPRSNLCALCIGDEQGENKCVPNSNERYYGYXGAFRCLAENAGDVAFVKDVXVLQNXDGNNNEAWAKDLKLADFALLCLDGKRKPVXEARSCHLAMAPNHAVVSRMDKVERLKQVLLHQQAKFGRNGSDCPDKFCLFQSEXKNLLFNDNXECLARLHGKXXYEKYLGPQYVAGIXNLKKCSXSPLLEACEFLRK

SEQ ID NO: 15341 - protein, 666 aa, Homo sapiens
  MOD_RES (33)..(33): Selenocysteine
  MOD_RES (59)..(59): Selenocysteine
  MOD_RES (65)..(65): Selenocysteine
  MOD_RES (92)..(92): Selenocysteine
  MOD_RES (97)..(97): Selenocysteine
  MOD_RES (106)..(106): Selenocysteine
  MOD_RES (114)..(114): Selenocysteine
  MOD_RES (151)..(151): Selenocysteine
  MOD_RES (188)..(188): Selenocysteine
  MOD_RES (210)..(210): Selenocysteine
  MOD_RES (301)..(301): Selenocysteine
  MOD_RES (345)..(345): Selenocysteine
  MOD_RES (351)..(352): Selenocysteine
  MOD_RES (376)..(376): Selenocysteine
  MOD_RES (421)..(421): Selenocysteine
  MOD_RES (424)..(424): Selenocysteine
  MOD_RES (436)..(436): Selenocysteine
  MOD_RES (441)..(441): Selenocysteine
  MOD_RES (455)..(455): Selenocysteine
  MOD_RES (504)..(504): Selenocysteine
  MOD_RES (524)..(524): Selenocysteine
  MOD_RES (529)..(529): Selenocysteine
  MOD_RES (559)..(559): Selenocysteine
  MOD_RES (613)..(613): Selenocysteine
  MOD_RES (622)..(622): Selenocysteine
  MOD_RES (632)..(633): Selenocysteine
  MOD_RES (647)..(647): Selenocysteine
  MOD_RES (654)..(654): Selenocysteine
MRKVRGPPVSCIKRDSPIQCIQAIAENRADAVXLDGGFIYEAGLAPYKLRPVAAEVYGXERQPRXHYYAVAVVKKGGSFQLNELQGLKSCHXGLRRXAGWNVPIGXLRPFLNWXGPPEPIEAAVARFFSASCVPGADKGQFPNLCRLCAGXGENKCAFSSQEPYFSYSGAFKCLRDGAGDVAFIRESXVFEDLSDEAERDEYELLCPDNXRKPVDKFKDCHLARVPSHAVVARSVNGKEDAIWNLLRQAQEKFGKDKSPKFQLFGSPSGQKDLLFKDSAIGFSRVPPRIDSGLYLGSGYFXAIQNLRKSEEEVAARRARVVWCAVGEQELRKCNQWSGLSEGSVXCSSASXXEDCIALVLKGEADAMSLDGGYVYXAGKCGLVPVLAENYKSQQSSDPDPNCVDRPVEGYLAVAVVRRSDXSLXWNSVKGKKSCHXAVDRXAGWNIPMGLLFNQXGSCKFDEYFSQSCAPGSDPRSNLCALCIGDEQGENKCVPNSNERYYGYXGAFRCLAENAGDVAFVKDVXVLQNXDGNNNEAWAKDLKLADFALLCLDGKRKPVXEARSCHLAMAPNHAVVSRMDKVERLKQVLLHQQAKFGRNGSDCPDKFCLFQSEXKNLLFNDNXECLARLHGKXXYEKYLGPQYVAGIXNLKKCSXSPLLEACEFLRK

SEQ ID NO: 15342 - protein, 734 aa, Homo sapiens
  MOD_RES (27)..(27): Selenocysteine
  MOD_RES (64)..(64): Selenocysteine
  MOD_RES (72)..(72): Selenocysteine
  MOD_RES (82)..(82): Selenocysteine
  MOD_RES (84)..(84): Selenocysteine
  MOD_RES (93)..(93): Selenocysteine
  MOD_RES (98)..(98): Selenocysteine
  MOD_RES (215)..(215): Selenocysteine
  MOD_RES (248)..(248): Selenocysteine
  MOD_RES (278)..(278): Selenocysteine
  MOD_RES (306)..(306): Selenocysteine
  MOD_RES (353)..(353): Selenocysteine
  MOD_RES (373)..(373): Selenocysteine
  MOD_RES (375)..(375): Selenocysteine
  MOD_RES (400)..(400): Selenocysteine
  MOD_RES (415)..(415): Selenocysteine
  MOD_RES (454)..(454): Selenocysteine
  MOD_RES (571)..(571): Selenocysteine
  MOD_RES (574)..(574): Selenocysteine
  MOD_RES (598)..(598): Selenocysteine
  MOD_RES (627)..(627): Selenocysteine
  MOD_RES (651)..(651): Selenocysteine
  MOD_RES (668)..(668): Selenocysteine
  MOD_RES (674)..(674): Selenocysteine
  MOD_RES (731)..(731): Selenocysteine
MGCWGQLLVWFGAAGAILCSSPGSQEXFLRSSPLPLASPSPRDPKVSAPPSILEPASPLNSPGXEGSWLFSXCGASGRHGPXQXQCDGAYAGXSVVVXVGAAGQLRGVQLWRVPGPGQYLISAYGAAGGKGAKNHLSRAHGVFVSAIFSLGLGESLYILVGQQGEDACPGGSPESQLVCLGESRAVEEHAAMDGSEGVPGSRRWAGGGGGGGGAXYVFRVRAGELEPLLVAAGGGGRAYLRPRDRGRXQASPEKLENRSEAPGSGGRGGAAGGDASEXDNLWADGEDGVSFIHPSSELFLQPLAVXENHGEVEIRRHLNCSHCPLRDCQWQAELQLAECLCPEGMELAVDNVXCMDLHKPPGPLVLMVAVVAXSXLSLLMVCGVLILGGAWPGPVLASAXRCHRGFPSQCYSAQXLPELCSPQDELDFLMEALIISKFRHQNIVRCVGLSLRAXPRLILLELMSGGDMKSFLRHSRPHLGQPSPLVMRDLLQLAQDIAQGCHYLEENHFIHRDIAARNCLLSCAGPSRVAKIGDFGMARDIYRASYYRRGDRALLPVKWMPPEAFLEGIFXSKXDSWSFGVLLWEIFSLGYMPYPGRXNQEVLDFVVGGGRMDPPRGCPGPVYRIMXQCWQHEPELRPSFASILERLQYCXQDPDVLNSLLPMELGPXPEEEGXSGLGNRSLECLRPPQPQELSPEKLKSWGGSPLGPWLSSGLKPLKSRGLQPQNLWNPXYRS

SEQ ID NO: 15343 - protein, 803 aa, Homo sapiens
  MOD_RES (27)..(27): Selenocysteine
  MOD_RES (64)..(64): Selenocysteine
  MOD_RES (72)..(72): Selenocysteine
  MOD_RES (82)..(82): Selenocysteine
  MOD_RES (84)..(84): Selenocysteine
  MOD_RES (93)..(93): Selenocysteine
  MOD_RES (98)..(98): Selenocysteine
  MOD_RES (215)..(215): Selenocysteine
  MOD_RES (248)..(248): Selenocysteine
  MOD_RES (278)..(278): Selenocysteine
  MOD_RES (306)..(306): Selenocysteine
  MOD_RES (353)..(353): Selenocysteine
  MOD_RES (373)..(373): Selenocysteine
  MOD_RES (375)..(375): Selenocysteine
  MOD_RES (413)..(413): Selenocysteine
  MOD_RES (418)..(418): Selenocysteine
  MOD_RES (442)..(442): Selenocysteine
  MOD_RES (450)..(450): Selenocysteine
  MOD_RES (484)..(484): Selenocysteine
  MOD_RES (523)..(523): Selenocysteine
  MOD_RES (640)..(640): Selenocysteine
  MOD_RES (643)..(643): Selenocysteine
  MOD_RES (667)..(667): Selenocysteine
  MOD_RES (696)..(696): Selenocysteine
  MOD_RES (720)..(720): Selenocysteine
  MOD_RES (737)..(737): Selenocysteine
  MOD_RES (743)..(743): Selenocysteine
  MOD_RES (800)..(800): Selenocysteine
MGCWGQLLVWFGAAGAILCSSPGSQEXFLRSSPLPLASPSPRDPKVSAPPSILEPASPLNSPGXEGSWLFSXCGASGRHGPXQXQCDGAYAGXSVVVXVGAAGQLRGVQLWRVPGPGQYLISAYGAAGGKGAKNHLSRAHGVFVSAIFSLGLGESLYILVGQQGEDACPGGSPESQLVCLGESRAVEEHAAMDGSEGVPGSRRWAGGGGGGGGAXYVFRVRAGELEPLLVAAGGGGRAYLRPRDRGRXQASPEKLENRSEAPGSGGRGGAAGGDASEXDNLWADGEDGVSFIHPSSELFLQPLAVXENHGEVEIRRHLNCSHCPLRDCQWQAELQLAECLCPEGMELAVDNVXCMDLHKPPGPLVLMVAVVAXSXLSLLMVCGVLILVKQKKWQGLQEMRLPSPELELSKLRXSAIRXAPNPYYCQVGLGPAQSWPLPPGVXEVSPANVXLLRALGHGAFGEVYEGLVIGLPGDSSPLQVAIKXLPELCSPQDELDFLMEALIISKFRHQNIVRCVGLSLRAXPRLILLELMSGGDMKSFLRHSRPHLGQPSPLVMRDLLQLAQDIAQGCHYLEENHFIHRDIAARNCLLSCAGPSRVAKIGDFGMARDIYRASYYRRGDRALLPVKWMPPEAFLEGIFXSKXDSWSFGVLLWEIFSLGYMPYPGRXNQEVLDFVVGGGRMDPPRGCPGPVYRIMXQCWQHEPELRPSFASILERLQYCXQDPDVLNSLLPMELGPXPEEEGXSGLGNRSLECLRPPQPQELSPEKLKSWGGSPLGPWLSSGLKPLKSRGLQPQNLWNPXYRS

SEQ ID NO: 15344 - protein, 864 aa, Homo sapiens
  MOD_RES (27)..(27): Selenocysteine
  MOD_RES (64)..(64): Selenocysteine
  MOD_RES (72)..(72): Selenocysteine
  MOD_RES (82)..(82): Selenocysteine
  MOD_RES (84)..(84): Selenocysteine
  MOD_RES (93)..(93): Selenocysteine
  MOD_RES (98)..(98): Selenocysteine
  MOD_RES (215)..(215): Selenocysteine
  MOD_RES (248)..(248): Selenocysteine
  MOD_RES (278)..(278): Selenocysteine
  MOD_RES (306)..(306): Selenocysteine
  MOD_RES (323)..(323): Selenocysteine
  MOD_RES (339)..(339): Selenocysteine
  MOD_RES (367)..(367): Selenocysteine
  MOD_RES (414)..(414): Selenocysteine
  MOD_RES (434)..(434): Selenocysteine
  MOD_RES (436)..(436): Selenocysteine
  MOD_RES (474)..(474): Selenocysteine
  MOD_RES (479)..(479): Selenocysteine
  MOD_RES (503)..(503): Selenocysteine
  MOD_RES (511)..(511): Selenocysteine
  MOD_RES (545)..(545): Selenocysteine
  MOD_RES (584)..(584): Selenocysteine
  MOD_RES (701)..(701): Selenocysteine
  MOD_RES (704)..(704): Selenocysteine
  MOD_RES (728)..(728): Selenocysteine
  MOD_RES (757)..(757): Selenocysteine
  MOD_RES (781)..(781): Selenocysteine
  MOD_RES (798)..(798): Selenocysteine
  MOD_RES (804)..(804): Selenocysteine
  MOD_RES (861)..(861): Selenocysteine
MGCWGQLLVWFGAAGAILCSSPGSQEXFLRSSPLPLASPSPRDPKVSAPPSILEPASPLNSPGXEGSWLFSXCGASGRHGPXQXQCDGAYAGXSVVVXVGAAGQLRGVQLWRVPGPGQYLISAYGAAGGKGAKNHLSRAHGVFVSAIFSLGLGESLYILVGQQGEDACPGGSPESQLVCLGESRAVEEHAAMDGSEGVPGSRRWAGGGGGGGGAXYVFRVRAGELEPLLVAAGGGGRAYLRPRDRGRXQASPEKLENRSEAPGSGGRGGAAGGGGGWXSRAPSPQAGRSLQEGAEGGQGCSEAWAXLGWAAAGGFGGGGGACXAGGGGGGYRGGDASEXDNLWADGEDGVSFIHPSSELFLQPLAVXENHGEVEIRRHLNCSHCPLRDCQWQAELQLAECLCPEGMELAVDNVXCMDLHKPPGPLVLMVAVVAXSXLSLLMVCGVLILVKQKKWQGLQEMRLPSPELELSKLRXSAIRXAPNPYYCQVGLGPAQSWPLPPGVXEVSPANVXLLRALGHGAFGEVYEGLVIGLPGDSSPLQVAIKXLPELCSPQDELDFLMEALIISKFRHQNIVRCVGLSLRAXPRLILLELMSGGDMKSFLRHSRPHLGQPSPLVMRDLLQLAQDIAQGCHYLEENHFIHRDIAARNCLLSCAGPSRVAKIGDFGMARDIYRASYYRRGDRALLPVKWMPPEAFLEGIFXSKXDSWSFGVLLWEIFSLGYMPYPGRXNQEVLDFVVGGGRMDPPRGCPGPVYRIMXQCWQHEPELRPSFASILERLQYCXQDPDVLNSLLPMELGPXPEEEGXSGLGNRSLECLRPPQPQELSPEKLKSWGGSPLGPWLSSGLKPLKSRGLQPQNLWNPXYRS

SEQ ID NO: 15345 - protein, 562 aa, Homo sapiens
  MOD_RES (21)..(21): Selenocysteine
  MOD_RES (49)..(49): Selenocysteine
  MOD_RES (96)..(96): Selenocysteine
  MOD_RES (116)..(116): Selenocysteine
  MOD_RES (118)..(118): Selenocysteine
  MOD_RES (132)..(132): Selenocysteine
  MOD_RES (138)..(138): Selenocysteine
  MOD_RES (172)..(172): Selenocysteine
  MOD_RES (177)..(177): Selenocysteine
  MOD_RES (201)..(201): Selenocysteine
  MOD_RES (209)..(209): Selenocysteine
  MOD_RES (243)..(243): Selenocysteine
  MOD_RES (282)..(282): Selenocysteine
  MOD_RES (399)..(399): Selenocysteine
  MOD_RES (402)..(402): Selenocysteine
  MOD_RES (426)..(426): Selenocysteine
  MOD_RES (455)..(455): Selenocysteine
  MOD_RES (479)..(479): Selenocysteine
  MOD_RES (496)..(496): Selenocysteine
  MOD_RES (502)..(502): Selenocysteine
  MOD_RES (559)..(559): Selenocysteine
MGCWGQLLVWFGAAGGDASEXDNLWADGEDGVSFIHPSSELFLQPLAVXENHGEVEIRRHLNCSHCPLRDCQWQAELQLAECLCPEGMELAVDNVXCMDLHKPPGPLVLMVAVVAXSXLSLLMVCGVLILGXKRLAGXVDSRLLLSMKQKKWQGLQEMRLPSPELELSKLRXSAIRXAPNPYYCQVGLGPAQSWPLPPGVXEVSPANVXLLRALGHGAFGEVYEGLVIGLPGDSSPLQVAIKXLPELCSPQDELDFLMEALIISKFRHQNIVRCVGLSLRAXPRLILLELMSGGDMKSFLRHSRPHLGQPSPLVMRDLLQLAQDIAQGCHYLEENHFIHRDIAARNCLLSCAGPSRVAKIGDFGMARDIYRASYYRRGDRALLPVKWMPPEAFLEGIFXSKXDSWSFGVLLWEIFSLGYMPYPGRXNQEVLDFVVGGGRMDPPRGCPGPVYRIMXQCWQHEPELRPSFASILERLQYCXQDPDVLNSLLPMELGPXPEEEGXSGLGNRSLECLRPPQPQELSPEKLKSWGGSPLGPWLSSGLKPLKSRGLQPQNLWNPXYRS

SEQ ID NO: 15346 - protein, 239 aa, Homo sapiens
  MOD_RES (4)..(4): Selenocysteine
  MOD_RES (9)..(9): Selenocysteine
  MOD_RES (23)..(23): Selenocysteine
  MOD_RES (39)..(39): Selenocysteine
  MOD_RES (51)..(51): Selenocysteine
  MOD_RES (82)..(82): Selenocysteine
  MOD_RES (99)..(99): Selenocysteine
  MOD_RES (101)..(101): Selenocysteine
  MOD_RES (108)..(108): Selenocysteine
  MOD_RES (115)..(115): Selenocysteine
  MOD_RES (133)..(133): Selenocysteine
  MOD_RES (135)..(136): Selenocysteine
  MOD_RES (150)..(150): Selenocysteine
  MOD_RES (183)..(183): Selenocysteine
  MOD_RES (190)..(190): Selenocysteine
  MOD_RES (237)..(237): Selenocysteine
MEGXVESQXPDLRDVEGKVGRKXPEGLLRGLRGECELGXSGALLLPGASSXGHDLGDKIMALKMELAYLRAIDVKILQQLVXLNEGIEAVRWLLEERGXLXSHCSSLXSSQYSLXGGSPGRSRRGSWDSLPDXSXXDRLDSVSIGSFLDXVAPSELDEQGPPGAPRSEMDWAKVIAGGERARXEVDVAAXRLGSLRAVWKPPGERLQGGPPESPEDESAKLGFEAHWFWEQCQDDVXFL

SEQ ID NO: 15347 - protein, 978 aa, Homo sapiens
  MOD_RES (67)..(67): Selenocysteine
  MOD_RES (69)..(69): Selenocysteine
  MOD_RES (81)..(83): Selenocysteine
  MOD_RES (128)..(128): Selenocysteine
  MOD_RES (134)..(134): Selenocysteine
  MOD_RES (138)..(138): Selenocysteine
  MOD_RES (141)..(141): Selenocysteine
  MOD_RES (173)..(173): Selenocysteine
  MOD_RES (214)..(214): Selenocysteine
  MOD_RES (230)..(230): Selenocysteine
  MOD_RES (247)..(247): Selenocysteine
  MOD_RES (251)..(251): Selenocysteine
  MOD_RES (281)..(281): Selenocysteine
  MOD_RES (283)..(284): Selenocysteine
  MOD_RES (287)..(288): Selenocysteine
  MOD_RES (293)..(293): Selenocysteine
  MOD_RES (309)..(309): Selenocysteine
  MOD_RES (336)..(336): Selenocysteine
  MOD_RES (356)..(356): Selenocysteine
  MOD_RES (391)..(391): Selenocysteine
  MOD_RES (395)..(395): Selenocysteine
  MOD_RES (415)..(415): Selenocysteine
  MOD_RES (467)..(467): Selenocysteine
  MOD_RES (479)..(479): Selenocysteine
  MOD_RES (490)..(490): Selenocysteine
  MOD_RES (520)..(520): Selenocysteine
  MOD_RES (544)..(544): Selenocysteine
  MOD_RES (550)..(550): Selenocysteine
  MOD_RES (559)..(559): Selenocysteine
  MOD_RES (568)..(568): Selenocysteine
  MOD_RES (573)..(573): Selenocysteine
  MOD_RES (590)..(590): Selenocysteine
  MOD_RES (593)..(593): Selenocysteine
  MOD_RES (597)..(597): Selenocysteine
  MOD_RES (609)..(610): Selenocysteine
  MOD_RES (643)..(643): Selenocysteine
  MOD_RES (694)..(694): Selenocysteine
  MOD_RES (699)..(699): Selenocysteine
  MOD_RES (713)..(713): Selenocysteine
  MOD_RES (720)..(720): Selenocysteine
  MOD_RES (753)..(753): Selenocysteine
  MOD_RES (778)..(778): Selenocysteine
  MOD_RES (833)..(833): Selenocysteine
  MOD_RES (835)..(835): Selenocysteine
  MOD_RES (837)..(838): Selenocysteine
  MOD_RES (869)..(869): Selenocysteine
  MOD_RES (873)..(873): Selenocysteine
  MOD_RES (877)..(877): Selenocysteine
  MOD_RES (910)..(910): Selenocysteine
  MOD_RES (919)..(919): Selenocysteine
  MOD_RES (923)..(923): Selenocysteine
  MOD_RES (925)..(926): Selenocysteine
  MOD_RES (955)..(955): Selenocysteine
  MOD_RES (978)..(978): Selenocysteine
MGPPSSSGFYVSRAVALLLAGLVAALLLALAVLAALYGHCERVPPSELPGLRDLEAESSPPLRQKPXPXPKPSSARELAVXXXPSNWRPPGPWDQLRLPPWLVPLHYDLELWPQLRPDELPAGSLPFXGRVNIXVRCXVAXSRLLLHSLFQDCERAEVRGPLSPDDVWFALDXEYMVLELSEPLKPGSSYELQLSFSGLVKEDLREGLFLNVYXDQGERRALLASQLEPXFARYVFPCFDEPALKAXFNIXMIHHPSYVALSNMPKLGQSEKEDVNGSKWXVXXFSXXPHMPXYLVAFVICDYDHVNRXERGKEIRIWARKDAIANGSADFALNIXGPIFSFLEDLFNISYSLPKXDIIALPSFDNHAMENWGLMIFDESGLLLEPKDQLXEKKXLISYVVSHEIGHQWFGNLVXMNWWNNIWLNEGFASYFEFEVINYFNPKLPRNEIFFSNILHNILREDHALVXRAVAMKVENFKXSEIQELFDIFXYSKGASMARMLSCFLNEHLFVSALKSYLKXFSYSNAEQDDLWRHFQMAIDDQSXVILPAXIKNIMDSWXHQSGFPVIXLNVSXGVMKQEPFYLENIKNRXLLXSNDXWIVPILWIKNGXXQPLVWLDQSSKVFPEMQVSDSDHDWVILNLNMXGYYRVNYDKLGWKKLNQQLEKDPKAIPVIHRLQLIDDAFSLSKNNYIEIEXALELXKYLAEEDEIIVWHXVLVNLVXRDLVSEVNIYDIYSLLKRYLLKRLNLIWNIYSXIIRENVLALQDDYLALISLEKLFVXACWLGLEDCLQLSKELFAKWVDHPENEIPYPIKDVVLCYGIALGSDKEWDILLNXYXNXXNKEEKIQLAYAMSCSKDPWILNRYMEYAISXSPFXSNEXNIIEVVASSEVGRYVAKDFLVNNWQAVSKRYGXQSLINLIYXIGRXVXXDLQIVELQQFFSNMLEEHQRIRVHANLQXIKNENLKNKKLSARIAAWLRRNX

SEQ ID NO: 15348 - protein, 701 aa, Homo sapiens
  MOD_RES (67)..(67): Selenocysteine
  MOD_RES (69)..(69): Selenocysteine
  MOD_RES (81)..(83): Selenocysteine
  MOD_RES (128)..(128): Selenocysteine
  MOD_RES (134)..(134): Selenocysteine
  MOD_RES (138)..(138): Selenocysteine
  MOD_RES (141)..(141): Selenocysteine
  MOD_RES (166)..(166): Selenocysteine
  MOD_RES (170)..(170): Selenocysteine
  MOD_RES (185)..(185): Selenocysteine
  MOD_RES (226)..(226): Selenocysteine
  MOD_RES (242)..(242): Selenocysteine
  MOD_RES (259)..(259): Selenocysteine
  MOD_RES (263)..(263): Selenocysteine
  MOD_RES (293)..(293): Selenocysteine
  MOD_RES (295)..(296): Selenocysteine
  MOD_RES (299)..(300): Selenocysteine
  MOD_RES (305)..(305): Selenocysteine
  MOD_RES (321)..(321): Selenocysteine
  MOD_RES (348)..(348): Selenocysteine
  MOD_RES (368)..(368): Selenocysteine
  MOD_RES (403)..(403): Selenocysteine
  MOD_RES (407)..(407): Selenocysteine
  MOD_RES (427)..(427): Selenocysteine
  MOD_RES (479)..(479): Selenocysteine
  MOD_RES (491)..(491): Selenocysteine
  MOD_RES (502)..(502): Selenocysteine
  MOD_RES (532)..(532): Selenocysteine
  MOD_RES (556)..(556): Selenocysteine
  MOD_RES (562)..(562): Selenocysteine
  MOD_RES (571)..(571): Selenocysteine
  MOD_RES (580)..(580): Selenocysteine
  MOD_RES (585)..(585): Selenocysteine
  MOD_RES (602)..(602): Selenocysteine
  MOD_RES (605)..(605): Selenocysteine
  MOD_RES (609)..(609): Selenocysteine
  MOD_RES (621)..(622): Selenocysteine
  MOD_RES (655)..(655): Selenocysteine
  MOD_RES (700)..(700): Selenocysteine
MGPPSSSGFYVSRAVALLLAGLVAALLLALAVLAALYGHCERVPPSELPGLRDLEAESSPPLRQKPXPXPKPSSARELAVXXXPSNWRPPGPWDQLRLPPWLVPLHYDLELWPQLRPDELPAGSLPFXGRVNIXVRCXVAXSRLLLHSLFQDCERAEVRGPLSPGXGNAXVGRVPVDDVWFALDXEYMVLELSEPLKPGSSYELQLSFSGLVKEDLREGLFLNVYXDQGERRALLASQLEPXFARYVFPCFDEPALKAXFNIXMIHHPSYVALSNMPKLGQSEKEDVNGSKWXVXXFSXXPHMPXYLVAFVICDYDHVNRXERGKEIRIWARKDAIANGSADFALNIXGPIFSFLEDLFNISYSLPKXDIIALPSFDNHAMENWGLMIFDESGLLLEPKDQLXEKKXLISYVVSHEIGHQWFGNLVXMNWWNNIWLNEGFASYFEFEVINYFNPKLPRNEIFFSNILHNILREDHALVXRAVAMKVENFKXSEIQELFDIFXYSKGASMARMLSCFLNEHLFVSALKSYLKXFSYSNAEQDDLWRHFQMAIDDQSXVILPAXIKNIMDSWXHQSGFPVIXLNVSXGVMKQEPFYLENIKNRXLLXSNDXWIVPILWIKNGXXQPLVWLDQSSKVFPEMQVSDSDHDWVILNLNMXGYYRVNYDKLGWKKLNQQLEKDPKAIPVIHRLQLIDDAFSLSKGXY

SEQ ID NO: 15349 - protein, 990 aa, Homo sapiens
  MOD_RES (67)..(67): Selenocysteine
  MOD_RES (69)..(69): Selenocysteine
  MOD_RES (81)..(83): Selenocysteine
  MOD_RES (128)..(128): Selenocysteine
  MOD_RES (134)..(134): Selenocysteine
  MOD_RES (138)..(138): Selenocysteine
  MOD_RES (141)..(141): Selenocysteine
  MOD_RES (166)..(166): Selenocysteine
  MOD_RES (170)..(170): Selenocysteine
  MOD_RES (185)..(185): Selenocysteine
  MOD_RES (226)..(226): Selenocysteine
  MOD_RES (242)..(242): Selenocysteine
  MOD_RES (259)..(259): Selenocysteine
  MOD_RES (263)..(263): Selenocysteine
  MOD_RES (293)..(293): Selenocysteine
  MOD_RES (295)..(296): Selenocysteine
  MOD_RES (299)..(300): Selenocysteine
  MOD_RES (305)..(305): Selenocysteine
  MOD_RES (321)..(321): Selenocysteine
  MOD_RES (348)..(348): Selenocysteine
  MOD_RES (368)..(368): Selenocysteine
  MOD_RES (403)..(403): Selenocysteine
  MOD_RES (407)..(407): Selenocysteine
  MOD_RES (427)..(427): Selenocysteine
  MOD_RES (479)..(479): Selenocysteine
  MOD_RES (491)..(491): Selenocysteine
  MOD_RES (502)..(502): Selenocysteine
  MOD_RES (532)..(532): Selenocysteine
  MOD_RES (556)..(556): Selenocysteine
  MOD_RES (562)..(562): Selenocysteine
  MOD_RES (571)..(571): Selenocysteine
  MOD_RES (580)..(580): Selenocysteine
  MOD_RES (585)..(585): Selenocysteine
  MOD_RES (602)..(602): Selenocysteine
  MOD_RES (605)..(605): Selenocysteine
  MOD_RES (609)..(609): Selenocysteine
  MOD_RES (621)..(622): Selenocysteine
  MOD_RES (655)..(655): Selenocysteine
  MOD_RES (706)..(706): Selenocysteine
  MOD_RES (711)..(711): Selenocysteine
  MOD_RES (725)..(725): Selenocysteine
  MOD_RES (732)..(732): Selenocysteine
  MOD_RES (765)..(765): Selenocysteine
  MOD_RES (790)..(790): Selenocysteine
  MOD_RES (845)..(845): Selenocysteine
  MOD_RES (847)..(847): Selenocysteine
  MOD_RES (849)..(850): Selenocysteine
  MOD_RES (881)..(881): Selenocysteine
  MOD_RES (885)..(885): Selenocysteine
  MOD_RES (889)..(889): Selenocysteine
  MOD_RES (922)..(922): Selenocysteine
  MOD_RES (931)..(931): Selenocysteine
  MOD_RES (935)..(935): Selenocysteine
  MOD_RES (937)..(938): Selenocysteine
  MOD_RES (967)..(967): Selenocysteine
  MOD_RES (990)..(990): Selenocysteine
MGPPSSSGFYVSRAVALLLAGLVAALLLALAVLAALYGHCERVPPSELPGLRDLEAESSPPLRQKPXPXPKPSSARELAVXXXPSNWRPPGPWDQLRLPPWLVPLHYDLELWPQLRPDELPAGSLPFXGRVNIXVRCXVAXSRLLLHSLFQDCERAEVRGPLSPGXGNAXVGRVPVDDVWFALDXEYMVLELSEPLKPGSSYELQLSFSGLVKEDLREGLFLNVYXDQGERRALLASQLEPXFARYVFPCFDEPALKAXFNIXMIHHPSYVALSNMPKLGQSEKEDVNGSKWXVXXFSXXPHMPXYLVAFVICDYDHVNRXERGKEIRIWARKDAIANGSADFALNIXGPIFSFLEDLFNISYSLPKXDIIALPSFDNHAMENWGLMIFDESGLLLEPKDQLXEKKXLISYVVSHEIGHQWFGNLVXMNWWNNIWLNEGFASYFEFEVINYFNPKLPRNEIFFSNILHNILREDHALVXRAVAMKVENFKXSEIQELFDIFXYSKGASMARMLSCFLNEHLFVSALKSYLKXFSYSNAEQDDLWRHFQMAIDDQSXVILPAXIKNIMDSWXHQSGFPVIXLNVSXGVMKQEPFYLENIKNRXLLXSNDXWIVPILWIKNGXXQPLVWLDQSSKVFPEMQVSDSDHDWVILNLNMXGYYRVNYDKLGWKKLNQQLEKDPKAIPVIHRLQLIDDAFSLSKNNYIEIEXALELXKYLAEEDEIIVWHXVLVNLVXRDLVSEVNIYDIYSLLKRYLLKRLNLIWNIYSXIIRENVLALQDDYLALISLEKLFVXACWLGLEDCLQLSKELFAKWVDHPENEIPYPIKDVVLCYGIALGSDKEWDILLNXYXNXXNKEEKIQLAYAMSCSKDPWILNRYMEYAISXSPFXSNEXNIIEVVASSEVGRYVAKDFLVNNWQAVSKRYGXQSLINLIYXIGRXVXXDLQIVELQQFFSNMLEEHQRIRVHANLQXIKNENLKNKKLSARIAAWLRRNX

SEQ ID NO: 15350 - protein, 226 aa, Homo sapiens
  MOD_RES (8)..(8): Selenocysteine
  MOD_RES (19)..(19): Selenocysteine
  MOD_RES (49)..(49): Selenocysteine
  MOD_RES (73)..(73): Selenocysteine
  MOD_RES (79)..(79): Selenocysteine
  MOD_RES (88)..(88): Selenocysteine
  MOD_RES (97)..(97): Selenocysteine
  MOD_RES (102)..(102): Selenocysteine
  MOD_RES (119)..(119): Selenocysteine
  MOD_RES (122)..(122): Selenocysteine
  MOD_RES (126)..(126): Selenocysteine
  MOD_RES (138)..(139): Selenocysteine
  MOD_RES (172)..(172): Selenocysteine
MKVENFKXSEIQELFDIFXYSKGASMARMLSCFLNEHLFVSALKSYLKXFSYSNAEQDDLWRHFQMAIDDQSXVILPAXIKNIMDSWXHQSGFPVIXLNVSXGVMKQEPFYLENIKNRXLLXSNDXWIVPILWIKNGXXQPLVWLDQSSKVFPEMQVSDSDHDWVILNLNMXGYYRVNYDKLGWKKLNQQLEKDPKAIPVIHRLQLIDDAFSLSNLQDFGHLKVPN

SEQ ID NO: 15351 - protein, 198 aa, Homo sapiens
  MOD_RES (8)..(8): Selenocysteine
  MOD_RES (19)..(19): Selenocysteine
  MOD_RES (49)..(49): Selenocysteine
  MOD_RES (73)..(73): Selenocysteine
  MOD_RES (79)..(79): Selenocysteine
  MOD_RES (88)..(88): Selenocysteine
  MOD_RES (97)..(97): Selenocysteine
  MOD_RES (102)..(102): Selenocysteine
  MOD_RES (119)..(119): Selenocysteine
  MOD_RES (122)..(122): Selenocysteine
  MOD_RES (126)..(126): Selenocysteine
  MOD_RES (138)..(139): Selenocysteine
  MOD_RES (172)..(172): Selenocysteine
MKVENFKXSEIQELFDIFXYSKGASMARMLSCFLNEHLFVSALKSYLKXFSYSNAEQDDLWRHFQMAIDDQSXVILPAXIKNIMDSWXHQSGFPVIXLNVSXGVMKQEPFYLENIKNRXLLXSNDXWIVPILWIKNGXXQPLVWLDQSSKVFPEMQVSDSDHDWVILNLNMXGYYRVNYDKLGWKKLNQQLEKDPKMR

SEQ ID NO: 15352 - protein, 66 aa, Homo sapiens
  MOD_RES (39)..(39): Selenocysteine
  MOD_RES (50)..(50): Selenocysteine
MKIFLPVLLAALLGVERASSLMCFSCLNQKSNLYCLKPXICSDQDNYCVXVSASAGIASFPMQGIS

SEQ ID NO: 15353 - protein, 73 aa, Homo sapiens
  MOD_RES (39)..(39): Selenocysteine
  MOD_RES (50)..(50): Selenocysteine
MKIFLPVLLAALLGVERASSLMCFSCLNQKSNLYCLKPXICSDQDNYCVXVSASAGIGECQASDRAFLPWPSP

SEQ ID NO: 15354 - protein, 66 aa, Homo sapiens
  MOD_RES (39)..(39): Selenocysteine
  MOD_RES (50)..(50): Selenocysteine
  MOD_RES (64)..(64): Selenocysteine
MKIFLPVLLAALLGVERASSLMCFSCLNQKSNLYCLKPXICSDQDNYCVXVSASAGIGGFAGGXDS

SEQ ID NO: 15355 - protein, 131 aa, Homo sapiens
  MOD_RES (39)..(39): Selenocysteine
  MOD_RES (50)..(50): Selenocysteine
  MOD_RES (62)..(62): Selenocysteine
  MOD_RES (70)..(70): Selenocysteine
  MOD_RES (112)..(112): Selenocysteine
MKIFLPVLLAALLGVERASSLMCFSCLNQKSNLYCLKPXICSDQDNYCVXVSASAGIGNLVXFGHSLSKXCSPACPIPEGVNVGVASMGISCCQSFLCNFSAADGGLRASVXLLGAGLLLSLLPALLRFGP

SEQ ID NO: 15356 - protein, 41 aa, Homo sapiens
MKIFLPVLLAALLGVEREEQSVLPEADHLLRPGQLLRDCVC

SEQ ID NO: 15357 - protein, 147 aa, Homo sapiens
  MOD_RES (2)..(2): Selenocysteine
  MOD_RES (31)..(31): Selenocysteine
  MOD_RES (42)..(42): Selenocysteine
  MOD_RES (44)..(44): Selenocysteine
  MOD_RES (48)..(48): Selenocysteine
  MOD_RES (53)..(53): Selenocysteine
  MOD_RES (56)..(57): Selenocysteine
  MOD_RES (59)..(59): Selenocysteine
  MOD_RES (65)..(65): Selenocysteine
  MOD_RES (67)..(67): Selenocysteine
  MOD_RES (69)..(69): Selenocysteine
  MOD_RES (85)..(85): Selenocysteine
MXSGIPGCGGACVLPSRAPLRRRDPQHCSPXLSEAPLLRAHXQXRLLXRGLPXPNXXRXVQVSVXVXPXWSPVRPRQDRLLWFVXSRQDGHPLQNEDLLASAAGCPSGCGASQLADVLLLLEPEEQSVLPEADHLLRPGQLLRDCVC

SEQ ID NO: 15358 - protein, 133 aa, Homo sapiens
  MOD_RES (40)..(41): Selenocysteine
  MOD_RES (63)..(63): Selenocysteine
  MOD_RES (82)..(82): Selenocysteine
  MOD_RES (89)..(89): Selenocysteine
  MOD_RES (121)..(121): Selenocysteine
  MOD_RES (124)..(124): Selenocysteine
MKPQFVGILLSSLLGAALGNRMRCYNCGGSPSSSCKEAVXXCGEGRPQPGLEQIKLPGNPPVXLIHQHPACVAAHHCNQVEXESVGDVXYPAHRDCYLGDLCNSAVASHVAPAGILAAAAXALXCLLPGLWSG

SEQ ID NO: 15359 - protein, 174 aa, Homo sapiens
  MOD_RES (40)..(41): Selenocysteine
  MOD_RES (108)..(108): Selenocysteine
  MOD_RES (170)..(170): Selenocysteine
MKPQFVGILLSSLLGAALGNRMRCYNCGGSPSSSCKEAVXXCGEGRPQPGLEQIKLPGNRRCFLRGLKIPLGSLKSHLLCPRRQVLKPGVQHPSFILSLSPSDLDSPXSSLRRSPSLQSSGDRVGGRRDLSSPQGLLPGRPVQQRRGKPCGPCRHFGCSSYRPDLSLARXVERI

SEQ ID NO: 15360 - protein, 66 aa, Homo sapiens
  MOD_RES (3)..(3): Selenocysteine
  MOD_RES (20)..(20): Selenocysteine
  MOD_RES (36)..(36): Selenocysteine
  MOD_RES (44)..(44): Selenocysteine
  MOD_RES (58)..(58): Selenocysteine
  MOD_RES (65)..(65): Selenocysteine
MGXSSIFLCVLFLCGALGLXMSPARGRLRCYICGFXKPCHPVPXECRDDEACGISIGXSDQSEIXE

SEQ ID NO: 15361 - protein, 125 aa, Homo sapiens
  MOD_RES (3)..(3): Selenocysteine
  MOD_RES (20)..(20): Selenocysteine
  MOD_RES (36)..(36): Selenocysteine
  MOD_RES (44)..(44): Selenocysteine
  MOD_RES (58)..(58): Selenocysteine
  MOD_RES (76)..(76): Selenocysteine
  MOD_RES (83)..(83): Selenocysteine
  MOD_RES (104)..(104): Selenocysteine
MGXSSIFLCVLFLCGALGLXMSPARGRLRCYICGFXKPCHPVPXECRDDEACGISIGXSGKSCLSRAQCPLPGYAXYWLHSYXLWHHCCEQDLCNIAASPQQLXSLLASLPLFVASFAGRGHLLH

SEQ ID NO: 15362 - protein, 100 aa, Homo sapiens
  MOD_RES (3)..(3): Selenocysteine
  MOD_RES (20)..(20): Selenocysteine
  MOD_RES (36)..(36): Selenocysteine
  MOD_RES (44)..(44): Selenocysteine
  MOD_RES (58)..(58): Selenocysteine
  MOD_RES (62)..(62): Selenocysteine
  MOD_RES (74)..(74): Selenocysteine
  MOD_RES (93)..(93): Selenocysteine
  MOD_RES (99)..(99): Selenocysteine
MGXSSIFLCVLFLCGALGLXMSPARGRLRCYICGFXKPCHPVPXECRDDEACGISIGXSGRXLVQWPFSRRLPXSIHPAFPVAPASACLFHPXDQSEIXE

SEQ ID NO: 15363 - protein, 88 aa, Homo sapiens
  MOD_RES (15)..(15): Selenocysteine
  MOD_RES (28)..(28): Selenocysteine
  MOD_RES (45)..(45): Selenocysteine
  MOD_RES (61)..(61): Selenocysteine
  MOD_RES (69)..(69): Selenocysteine
  MOD_RES (83)..(83): Selenocysteine
MLQLYKSRDLGVQIXSPRFLSLCLAMGXSSIFLCVLFLCGALGLXMSPARGRLRCYICGFXKPCHPVPXECRDDEACGISIGXSDAHC

SEQ ID NO: 15364 - protein, 1722 aa, Homo sapiens
  MOD_RES (3)..(3): Selenocysteine
  MOD_RES (7)..(7): Selenocysteine
  MOD_RES (37)..(37): Selenocysteine
  MOD_RES (43)..(43): Selenocysteine
  MOD_RES (62)..(62): Selenocysteine
  MOD_RES (89)..(89): Selenocysteine
  MOD_RES (131)..(131): Selenocysteine
  MOD_RES (159)..(159): Selenocysteine
  MOD_RES (178)..(178): Selenocysteine
  MOD_RES (196)..(197): Selenocysteine
  MOD_RES (234)..(234): Selenocysteine
  MOD_RES (236)..(236): Selenocysteine
  MOD_RES (264)..(264): Selenocysteine
  MOD_RES (311)..(311): Selenocysteine
  MOD_RES (347)..(347): Selenocysteine
  MOD_RES (351)..(351): Selenocysteine
  MOD_RES (355)..(355): Selenocysteine
  MOD_RES (359)..(359): Selenocysteine
  MOD_RES (410)..(410): Selenocysteine
  MOD_RES (432)..(432): Selenocysteine
  MOD_RES (440)..(440): Selenocysteine
  MOD_RES (443)..(443): Selenocysteine
  MOD_RES (445)..(445): Selenocysteine
  MOD_RES (459)..(459): Selenocysteine
  MOD_RES (513)..(513): Selenocysteine
  MOD_RES (526)..(526): Selenocysteine
  MOD_RES (531)..(531): Selenocysteine
  MOD_RES (533)..(533): Selenocysteine
  MOD_RES (558)..(558): Selenocysteine
  MOD_RES (573)..(573): Selenocysteine
  MOD_RES (582)..(582): Selenocysteine
  MOD_RES (602)..(602): Selenocysteine
  MOD_RES (702)..(702): Selenocysteine
  MOD_RES (732)..(732): Selenocysteine
  MOD_RES (736)..(736): Selenocysteine
  MOD_RES (784)..(784): Selenocysteine
  MOD_RES (797)..(797): Selenocysteine
  MOD_RES (800)..(800): Selenocysteine
  MOD_RES (849)..(849): Selenocysteine
  MOD_RES (851)..(851): Selenocysteine
  MOD_RES (887)..(887): Selenocysteine
  MOD_RES (899)..(899): Selenocysteine
  MOD_RES (911)..(911): Selenocysteine
  MOD_RES (920)..(920): Selenocysteine
  MOD_RES (924)..(924): Selenocysteine
  MOD_RES (972)..(972): Selenocysteine
  MOD_RES (979)..(979): Selenocysteine
  MOD_RES (986)..(986): Selenocysteine
  MOD_RES (1000)..(1000): Selenocysteine
  MOD_RES (1009)..(1009): Selenocysteine
  MOD_RES (1017)..(1017): Selenocysteine
  MOD_RES (1026)..(1026): Selenocysteine
  MOD_RES (1032)..(1032): Selenocysteine
  MOD_RES (1072)..(1072): Selenocysteine
  MOD_RES (1074)..(1074): Selenocysteine
  MOD_RES (1078)..(1078): Selenocysteine
  MOD_RES (1100)..(1100): Selenocysteine
  MOD_RES (1107)..(1107): Selenocysteine
  MOD_RES (1121)..(1121): Selenocysteine
  MOD_RES (1123)..(1123): Selenocysteine
  MOD_RES (1142)..(1142): Selenocysteine
  MOD_RES (1190)..(1190): Selenocysteine
  MOD_RES (1202)..(1202): Selenocysteine
  MOD_RES (1208)..(1208): Selenocysteine
  MOD_RES (1227)..(1227): Selenocysteine
  MOD_RES (1246)..(1246): Selenocysteine
  MOD_RES (1261)..(1261): Selenocysteine
  MOD_RES (1268)..(1269): Selenocysteine
  MOD_RES (1275)..(1275): Selenocysteine
  MOD_RES (1317)..(1317): Selenocysteine
  MOD_RES (1329)..(1329): Selenocysteine
  MOD_RES (1334)..(1334): Selenocysteine
  MOD_RES (1342)..(1342): Selenocysteine
  MOD_RES (1354)..(1354): Selenocysteine
  MOD_RES (1362)..(1362): Selenocysteine
  MOD_RES (1393)..(1394): Selenocysteine
  MOD_RES (1414)..(1414): Selenocysteine
  MOD_RES (1473)..(1473): Selenocysteine
  MOD_RES (1483)..(1483): Selenocysteine
  MOD_RES (1496)..(1496): Selenocysteine
  MOD_RES (1515)..(1515): Selenocysteine
  MOD_RES (1524)..(1524): Selenocysteine
  MOD_RES (1571)..(1571): Selenocysteine
  MOD_RES (1595)..(1595): Selenocysteine
  MOD_RES (1620)..(1620): Selenocysteine
  MOD_RES (1644)..(1644): Selenocysteine
  MOD_RES (1668)..(1668): Selenocysteine
  MOD_RES (1676)..(1676): Selenocysteine
MRXGWAXPRRPAGLLMLLFWFFDLAEPSGRAANDPFXIVHGNXGKCIKPVYGWIVADDCDEXEDKLWKWVSQHRLFHLHSQKCLGLDIXKSVNELRMFSCDSSAMLWWKCEHHSLYGAARYRLALKDGHGXAISNASDVWKKGGSEESLCDQPYHEIYXRDGNSYGRPCEFPFLIDGXWHHDCILDEDHSGPWCAXXLNYEYDRKWGICLKPENGCEDNWEKNEQFGSCYQFNXQXALSWKEAYVSCQNQGADLLSINSAAELXYLKEKEGIAKIFWIGLNQLYSARGWEWSDHKPLNFLNWDPDRPSAPXIGGSSCARMDAESGLWQSFSCEAQLPYVCRKPLNNXVELXDVWXYSDXRCDAGWLPNNGFCYLLVNESNSWDKAHAKCKAFSSDLISIHSLADVEVVVXKLHNEDIKEEVWIGLKNINIPXLFQWSDGXEVXLXYWDENEPNVPYNKXPNCVSYLGELGQWKVQSCEEKLKYVCKRKGEKLNDASSDKMCPPDEGWKRHGEXCYKIYEDEVPFGXNCNLXIXSRFEQEYLNDLMKKYDKSLRKYFWXGLRDVDSCGEYNWAXVGGRRRAVXFSNWNFLEPASPGGCVAMSXGKSVGKWEVKDCRSFKALSICKKMSGPLGPEEASPKPDDPCPEGWQSFPASLSCYKVFHAERIVRKRNWEEAERFCQALGAHLSSFSHVDEIKEFLHFLXDQFSGQHWLWIGLNKRSPDLQGSWQWSDRXPVSXIIMPNEFQQDYDIRDCAAVKVFHRPWRRGWHFYDDREFIYLRPFACDXKLEWVCQIPKGRXPKXPDWYNPDRAGIHGPPLIIEGSEYWFVADLHLNYEEAVLYCASNHSFLAXIXSFVGLKAIKNKIANISGDGQKWWIRISEWPIDDHFXYSRYPWHRFPVXFGEECLYMSAKXWLIDLGKPXDCSXKLPFICEKYNVSSLEKYSPDSAAKVQCSEQWIPFQNKCFLKIKPVSLXFSQASDXCHSYGGXLPSVLSQIEQDFIXSLLPDMEAXLWIGLRWXAYEKINKWXDNRELXYSNFHPLLVSGRLRIPENFFEEESRYHCALILNLQKSPFXGXWNFXSCSERHFVSLCQKYSEVKSRQXLQNASEXVKYLNNLYKIIPKXLXWHSAKRECLKSNMQLVSIXDPYQQAFLSVQALLHNSSLWIGLFSQDDELNFGWSDGKRLHFSRWAEXNGQLEDCVVLDXDGFWKXVDCNDNQPGAICYYSGNEXEKEVKPVDSVKCPSPVLNXPWIPFQNCCYNFIIXKNRHMAXXQDEVHXKCQKLNPKSHILSIRDEKENNFVLEQLLYFNYMASWVMLGIXYRNKSLMWFDKXPLSYXHWRAGRPXIKNEKFLAGLSXDGFWDIQXFKVIEEAVYFHQHSILACKIEMVDYKEEYNXXLPQFMPYEDGIYSVIQKKVXWYEALNMCSQSGGHLASVHNQNGQLFLEDIVKRDGFPLWVGLSSHDGSESSFEWSDGSXFDYIPWKGQXSPGNCVLLDPKGXWKHEKCNSVKDGAICYKPXKSKKLSRLXYSSRCPAAKENGSRWIQYKGHCYKSDQALHSFSEAKKLCSKHDHSAXIVSIKDEDENKFVSRLMRENNNIXMRVWLGLSQHSVDQSWSWLDGSEVXFVKWENKSKSGVGRCSMLIASNEXWKKVECEHGFGRVVCKVPLGPDYXAIAIIVAXLSILVLMGGLIWFLFQRHRLHLAGFSSVRYAQGVNEDEIMLPSFHD

SEQ ID NO: 15365 - protein, 162 aa, Homo sapiens
  MOD_RES (5)..(5): Selenocysteine
  MOD_RES (7)..(7): Selenocysteine
  MOD_RES (12)..(12): Selenocysteine
  MOD_RES (29)..(29): Selenocysteine
  MOD_RES (132)..(132): Selenocysteine
  MOD_RES (146)..(146): Selenocysteine
  MOD_RES (151)..(151): Selenocysteine
  MOD_RES (158)..(158): Selenocysteine
MKGFXAXLFLWXLIFPSCSGGGGGKAWPXHVVCSDSGLEVLYQSCDPLQDFGFSVEKCSKQLKSNINIRFGIILREDIKELFLDLALMSQGSSVLNFSYPICEAALPKFSFCGRRKGEQIYYAGPVNNPEFXIPQGEYQVLLELYXEKRSXVACANAXIMCS

SEQ ID NO: 15366 - protein, 160 aa, Homo sapiens
  MOD_RES (9)..(9): Selenocysteine
  MOD_RES (16)..(16): Selenocysteine
  MOD_RES (35)..(35): Selenocysteine
  MOD_RES (81)..(81): Selenocysteine
  MOD_RES (84)..(84): Selenocysteine
  MOD_RES (112)..(112): Selenocysteine
  MOD_RES (115)..(116): Selenocysteine
MLPFLFFSXLFSSIFXEAQKQYWVCNSSDASISYXYCDKMQYPISINVNPCIELKRSKGLLHIFYIPRRDLKQLYFNLYIXVNXMNLPKRKEVICRGSDDDYSFCRALKGEXVNXXISFSFKGIKFSKGKYKCVVEAISGSPEEMLFCLEFVILHQPNSN

SEQ ID NO: 15367 - protein, 130 aa, Homo sapiens
  MOD_RES (9)..(9): Selenocysteine
  MOD_RES (16)..(16): Selenocysteine
  MOD_RES (35)..(35): Selenocysteine
  MOD_RES (51)..(51): Selenocysteine
  MOD_RES (54)..(54): Selenocysteine
  MOD_RES (82)..(82): Selenocysteine
  MOD_RES (85)..(86): Selenocysteine
MLPFLFFSXLFSSIFXEAQKQYWVCNSSDASISYXYCGRDLKQLYFNLYIXVNXMNLPKRKEVICRGSDDDYSFCRALKGEXVNXXISFSFKGIKFSKGKYKCVVEAISGSPEEMLFCLEFVILHQPNSN

SEQ ID NO: 15368 - protein, 280 aa, Homo sapiens
  MOD_RES (13)..(13): Selenocysteine
  MOD_RES (15)..(15): Selenocysteine
  MOD_RES (77)..(78): Selenocysteine
  MOD_RES (82)..(82): Selenocysteine
  MOD_RES (92)..(92): Selenocysteine
  MOD_RES (95)..(95): Selenocysteine
  MOD_RES (99)..(99): Selenocysteine
  MOD_RES (155)..(155): Selenocysteine
  MOD_RES (179)..(179): Selenocysteine
  MOD_RES (218)..(218): Selenocysteine
  MOD_RES (273)..(273): Selenocysteine
MCPPQAQAEVGPXMXEKAEMVCAPSPAPAPPPKPASPGPPQVEEVGHRGGSSPPRLPPGVPVISLGHSRPPGVAMPXXELGXLRPPLLQLSXLGXAPPXLALHYHPHPFLNSVYIGPAGPFSIFPSSRLKRRPSHCELDLAEGHQPQKVARRVFXNSRERWRQQNVNGAFAELRKLLPXHPPDRKLSKNEVLRLAMKYIGFLVRLLRDQAAALAAGPXPPGPRKRPVHRVPDDGARRGSGRRAEAAARSQPAPPADPDGSPGGAARPIKMEQXALSPEVR

SEQ ID NO: 15369 - protein, 57 aa, Homo sapiens
  MOD_RES (3)..(4): Selenocysteine
  MOD_RES (8)..(8): Selenocysteine
  MOD_RES (18)..(18): Selenocysteine
  MOD_RES (21)..(21): Selenocysteine
  MOD_RES (25)..(25): Selenocysteine
MPXXELGXLRPPLLQLSXLGXAPPXLALHYHPHPFLNSVYIGPAGPFSIFPSSRLKR

SEQ ID NO: 15370 - protein, 491 aa, Homo sapiens
  MOD_RES (21)..(21): Selenocysteine
  MOD_RES (37)..(37): Selenocysteine
  MOD_RES (86)..(86): Selenocysteine
  MOD_RES (102)..(102): Selenocysteine
  MOD_RES (105)..(105): Selenocysteine
  MOD_RES (114)..(114): Selenocysteine
  MOD_RES (139)..(139): Selenocysteine
  MOD_RES (179)..(179): Selenocysteine
  MOD_RES (249)..(249): Selenocysteine
  MOD_RES (255)..(255): Selenocysteine
  MOD_RES (260)..(260): Selenocysteine
  MOD_RES (275)..(275): Selenocysteine
  MOD_RES (289)..(289): Selenocysteine
  MOD_RES (298)..(298): Selenocysteine
  MOD_RES (377)..(377): Selenocysteine
  MOD_RES (389)..(389): Selenocysteine
  MOD_RES (400)..(400): Selenocysteine
  MOD_RES (417)..(417): Selenocysteine
  MOD_RES (427)..(427): Selenocysteine
  MOD_RES (433)..(433): Selenocysteine
  MOD_RES (468)..(468): Selenocysteine
  MOD_RES (481)..(481): Selenocysteine
  MOD_RES (483)..(483): Selenocysteine
MGCIKSKGKDSLSDDGVDLKXQPVPESQLLPGQRFQXKDPEEQGDIVVALYPYDGIHPDDLSFKKGEKMKVLEEHGEWWKAKSLLXKKEGFIPSNYVAKLNXLEXEEWFFKDIXRKDAERQLLAPGNSAGAFLIRESEXLKGSFSLSVRDFDPVHGDVIKHYKIRSLDNGGYYISPRIXFPCISDMIKHYQKQADGLCRRLEKACISPKPQKPWDKDAWEIPRESIKLVKRLGAGQFGEVWMGYYNNSXKVAVKXLKPGXMSVQAFLEEANLMKXLQHDKLVRLYAVVXREEPIYIIXEYMAKGSLLDFLKSDEGGKVLLPKLIDFSAQIAEGMAYIERKNYIHRDLRAANVLVSESLMCKIADFGLARVIEDNEYXAREGAKFPIKWXAPEAINFGCFXIKSDVWSFGILLYEIVXYGKIPYPGRXNADVMXALSQGYRMPRVENCPDELYDIMKMCWKEKAEERPXFDYLQSVLDDFYXAXEGQYQQQP

SEQ ID NO: 15371 - protein, 150 aa, Homo sapiens
  MOD_RES (21)..(21): Selenocysteine
  MOD_RES (27)..(27): Selenocysteine
  MOD_RES (30)..(30): Selenocysteine
  MOD_RES (37)..(37): Selenocysteine
  MOD_RES (58)..(58): Selenocysteine
  MOD_RES (107)..(107): Selenocysteine
  MOD_RES (123)..(123): Selenocysteine
  MOD_RES (126)..(126): Selenocysteine
  MOD_RES (135)..(135): Selenocysteine
MGCIKSKGKDSLSDDGVDLKXQPVRNXERXIYVRDPXSNKQQRPVPESQLLPGQRFQXKDPEEQGDIVVALYPYDGIHPDDLSFKKGEKMKVLEEHGEWWKAKSLLXKKEGFIPSNYVAKLNXLEXEEWFFKDIXRKDAERQLLAPGNSA

SEQ ID NO: 15372 - protein, 512 aa, Homo sapiens
  MOD_RES (21)..(21): Selenocysteine
  MOD_RES (27)..(27): Selenocysteine
  MOD_RES (30)..(30): Selenocysteine
  MOD_RES (37)..(37): Selenocysteine
  MOD_RES (58)..(58): Selenocysteine
  MOD_RES (107)..(107): Selenocysteine
  MOD_RES (123)..(123): Selenocysteine
  MOD_RES (126)..(126): Selenocysteine
  MOD_RES (135)..(135): Selenocysteine
  MOD_RES (160)..(160): Selenocysteine
  MOD_RES (200)..(200): Selenocysteine
  MOD_RES (270)..(270): Selenocysteine
  MOD_RES (276)..(276): Selenocysteine
  MOD_RES (281)..(281): Selenocysteine
  MOD_RES (296)..(296): Selenocysteine
  MOD_RES (310)..(310): Selenocysteine
  MOD_RES (319)..(319): Selenocysteine
  MOD_RES (398)..(398): Selenocysteine
  MOD_RES (410)..(410): Selenocysteine
  MOD_RES (421)..(421): Selenocysteine
  MOD_RES (438)..(438): Selenocysteine
  MOD_RES (448)..(448): Selenocysteine
  MOD_RES (454)..(454): Selenocysteine
  MOD_RES (489)..(489): Selenocysteine
  MOD_RES (502)..(502): Selenocysteine
  MOD_RES (504)..(504): Selenocysteine
MGCIKSKGKDSLSDDGVDLKXQPVRNXERXIYVRDPXSNKQQRPVPESQLLPGQRFQXKDPEEQGDIVVALYPYDGIHPDDLSFKKGEKMKVLEEHGEWWKAKSLLXKKEGFIPSNYVAKLNXLEXEEWFFKDIXRKDAERQLLAPGNSAGAFLIRESEXLKGSFSLSVRDFDPVHGDVIKHYKIRSLDNGGYYISPRIXFPCISDMIKHYQKQADGLCRRLEKACISPKPQKPWDKDAWEIPRESIKLVKRLGAGQFGEVWMGYYNNSXKVAVKXLKPGXMSVQAFLEEANLMKXLQHDKLVRLYAVVXREEPIYIIXEYMAKGSLLDFLKSDEGGKVLLPKLIDFSAQIAEGMAYIERKNYIHRDLRAANVLVSESLMCKIADFGLARVIEDNEYXAREGAKFPIKWXAPEAINFGCFXIKSDVWSFGILLYEIVXYGKIPYPGRXNADVMXALSQGYRMPRVENCPDELYDIMKMCWKEKAEERPXFDYLQSVLDDFYXAXEGQYQQQP

SEQ ID NO: 15373 - protein, 89 aa, Homo sapiens
  MOD_RES (51)..(51): Selenocysteine
  MOD_RES (75)..(76): Selenocysteine
MCQKEVMEQSAGIMYRKSCASSAACLIASAGYQSFCSPGKLNSVCISCCNXPLCNGPRPKKRGSSASALRPGLRXXILFLKLALFSAHC

SEQ ID NO: 15374 - protein, 39 aa, Homo sapiens
  MOD_RES (9)..(9): Selenocysteine
  MOD_RES (21)..(21): Selenocysteine
MWVLGIAAXFCGLFLLPGENXQRPAAEARLCAANPVLPV

SEQ ID NO: 15375 - protein, 141 aa, Homo sapiens
  MOD_RES (9)..(9): Selenocysteine
  MOD_RES (47)..(47): Selenocysteine
  MOD_RES (103)..(103): Selenocysteine
  MOD_RES (127)..(128): Selenocysteine
MWVLGIAAXFCGLFLLPGFALQIQCYQCEEFQLNNDCSSPEFIVNCXVNVQDMCQKEVMEQSAGIMYRKSCASSAACLIASAGYQSFCSPGKLNSVCISCCNXPLCNGPRPKKRGSSASALRPGLRXXILFLKLALFSAHC

SEQ ID NO: 15376 - protein, 218 aa, Homo sapiens
  MOD_RES (12)..(12): Selenocysteine
  MOD_RES (16)..(17): Selenocysteine
  MOD_RES (30)..(30): Selenocysteine
  MOD_RES (32)..(32): Selenocysteine
  MOD_RES (41)..(42): Selenocysteine
  MOD_RES (49)..(49): Selenocysteine
  MOD_RES (51)..(51): Selenocysteine
  MOD_RES (53)..(53): Selenocysteine
  MOD_RES (55)..(56): Selenocysteine
  MOD_RES (64)..(64): Selenocysteine
  MOD_RES (73)..(73): Selenocysteine
  MOD_RES (78)..(80): Selenocysteine
  MOD_RES (87)..(87): Selenocysteine
  MOD_RES (99)..(99): Selenocysteine
  MOD_RES (105)..(105): Selenocysteine
  MOD_RES (107)..(107): Selenocysteine
  MOD_RES (110)..(110): Selenocysteine
  MOD_RES (112)..(112): Selenocysteine
  MOD_RES (134)..(134): Selenocysteine
  MOD_RES (165)..(165): Selenocysteine
  MOD_RES (176)..(176): Selenocysteine
  MOD_RES (196)..(196): Selenocysteine
  MOD_RES (209)..(210): Selenocysteine
MARCFSLVLLLXSIWXXRLLVQGSLRAEDXWXNSCIPEIIXXKDPIFNXQXAXQXXEFIVSDSXYSVASPYSXIPAPXXXPPAPASXSIPRRKKLICVXEVFMEXSXMSXEXEPFVENKAAFKNEAAGFGGVPXALLVLALLFFGAAAGLGFCYVKRYVKAFPFXNKNQQKEMIEXKVVKEEKANDSNPNEESKKXDKNPEESKSPSKXXVRCLEAEV

SEQ ID NO: 15377 - protein, 322 aa, Homo sapiens
  MOD_RES (12)..(12): Selenocysteine
  MOD_RES (16)..(17): Selenocysteine
  MOD_RES (42)..(42): Selenocysteine
  MOD_RES (55)..(55): Selenocysteine
  MOD_RES (76)..(76): Selenocysteine
  MOD_RES (84)..(84): Selenocysteine
  MOD_RES (134)..(134): Selenocysteine
  MOD_RES (136)..(136): Selenocysteine
  MOD_RES (145)..(146): Selenocysteine
  MOD_RES (153)..(153): Selenocysteine
  MOD_RES (155)..(155): Selenocysteine
  MOD_RES (157)..(157): Selenocysteine
  MOD_RES (159)..(160): Selenocysteine
  MOD_RES (168)..(168): Selenocysteine
  MOD_RES (177)..(177): Selenocysteine
  MOD_RES (182)..(184): Selenocysteine
  MOD_RES (191)..(191): Selenocysteine
  MOD_RES (203)..(203): Selenocysteine
  MOD_RES (209)..(209): Selenocysteine
  MOD_RES (211)..(211): Selenocysteine
  MOD_RES (214)..(214): Selenocysteine
  MOD_RES (216)..(216): Selenocysteine
  MOD_RES (238)..(238): Selenocysteine
  MOD_RES (269)..(269): Selenocysteine
  MOD_RES (280)..(280): Selenocysteine
  MOD_RES (300)..(300): Selenocysteine
  MOD_RES (313)..(314): Selenocysteine
MARCFSLVLLLXSIWXXRLLVQGSLRAEELSIQVSCRIMGIXLVSKKANQQLNFXEAKEACRLLGLSLAGKDQVEXALKASFEXCSYGWVGDGFVVISRISPNPKCGKNGVGVLIWKVPVSRQFAAYCYNSSDXWXNSCIPEIIXXKDPIFNXQXAXQXXEFIVSDSXYSVASPYSXIPAPXXXPPAPASXSIPRRKKLICVXEVFMEXSXMSXEXEPFVENKAAFKNEAAGFGGVPXALLVLALLFFGAAAGLGFCYVKRYVKAFPFXNKNQQKEMIEXKVVKEEKANDSNPNEESKKXDKNPEESKSPSKXXVRCLEAEV

SEQ ID NO: 15378 - protein, 71 aa, Homo sapiens
  MOD_RES (12)..(12): Selenocysteine
  MOD_RES (16)..(17): Selenocysteine
MARCFSLVLLLXSIWXXRLLVQGSLRAEGSSFLALCSCSAIEMKPSNHFSVQLVCILLQLWLGWRWIRGHL

SEQ ID NO: 15379 - protein, 54 aa, Homo sapiens
  MOD_RES (32)..(32): Selenocysteine
FNQVIMMKEFERLSSPLIVEIVRRKQQPPPRXPLDQPVDIGHEGIPGGSGRGIL

SEQ ID NO: 15380 - protein, 840 aa, Homo sapiens
  MOD_RES (7)..(7): Selenocysteine
  MOD_RES (42)..(42): Selenocysteine
  MOD_RES (50)..(50): Selenocysteine
  MOD_RES (72)..(72): Selenocysteine
  MOD_RES (90)..(90): Selenocysteine
  MOD_RES (110)..(111): Selenocysteine
  MOD_RES (113)..(113): Selenocysteine
  MOD_RES (137)..(137): Selenocysteine
  MOD_RES (159)..(159): Selenocysteine
  MOD_RES (163)..(163): Selenocysteine
  MOD_RES (181)..(181): Selenocysteine
  MOD_RES (204)..(204): Selenocysteine
  MOD_RES (213)..(213): Selenocysteine
  MOD_RES (252)..(252): Selenocysteine
  MOD_RES (264)..(264): Selenocysteine
  MOD_RES (266)..(266): Selenocysteine
  MOD_RES (270)..(270): Selenocysteine
  MOD_RES (288)..(288): Selenocysteine
  MOD_RES (306)..(306): Selenocysteine
  MOD_RES (320)..(320): Selenocysteine
  MOD_RES (349)..(349): Selenocysteine
  MOD_RES (351)..(351): Selenocysteine
  MOD_RES (371)..(372): Selenocysteine
  MOD_RES (378)..(378): Selenocysteine
  MOD_RES (406)..(406): Selenocysteine
  MOD_RES (428)..(428): Selenocysteine
  MOD_RES (464)..(464): Selenocysteine
  MOD_RES (475)..(475): Selenocysteine
  MOD_RES (530)..(530): Selenocysteine
  MOD_RES (639)..(639): Selenocysteine
  MOD_RES (649)..(649): Selenocysteine
  MOD_RES (670)..(670): Selenocysteine
  MOD_RES (769)..(769): Selenocysteine
  MOD_RES (783)..(783): Selenocysteine
  MOD_RES (801)..(801): Selenocysteine
  MOD_RES (808)..(808): Selenocysteine
MAGPGSXGGQIGAAALAGGARSKVAPSVDFDHSCSDSVEYLXLNFGPFEXVHRWRRLPPCDEFVGARRSKHXVVAYKDAIYVFGGDNGKXMLNDLLRFDVKDCSWCRAFXXGXPPAPRYHHSAVVYGSSMFVFGGYXGDIYSNSNLKNKNDLFEYKFAXGQWXEWKIEGRLPVARSAHGAXVYSDKLWIFAGYDGNARLNDMWXIGLQDRELXCWEEVAQSGEIPPSCCNFPVAVCRDKMFVFSGQSGAKIXNNLFQFEFKDKXWXRIPXEHLLRGSPPPPQRRYGHXMVAFDRHLYVFGGAADNXLPNELHCYDVDFQXWEVVQPSSDSEVGGAEVPERACASEEVPXLXYEERVGFKKSRDVFGLDFGXXSAKQPXQPASELPSGRLFHAAAVISDAMYIFGGXVDNNIRSGEMYRFQFSCYPKCXLHEDYGRLWESRQFCDVEFVLGEKEECVQGHVAIVXARSRWLRRKIXQARERLAQKLEQEAAPVPREAPGVAAGGARPPLLHVAIREAEARPFEVLMQFLYXDKIKYPRKGHVEDVLLIMDVYKLALSFQLCRLEQLCRQYIEASVDLQNVLVVCESAARLQLSQLKEHCLNFVVKESHFNQVIMMKEFERLSSPLIVEIVRRKQQPPPRXPLDQPVDIGXSLIQDMKAYLEGAGAEFCDIXLLLDGHPRPAHKAILAARSSYFEAMFRSFMPEDGQVNISIGEMVPSRQAFESMLRYIYYGEVNMPPEDSLYLFAAPYYYGFYNNRLQAYCKQNLEMNVXVQNVLQILEAADKXQALDMKRHCLHIIVHQFXKVSKLPXLRSLSQQLLLDIIDSLASHISDKQCAELGADI

SEQ ID NO: 15381 - protein, 117 aa, Homo sapiens
  MOD_RES (7)..(7): Selenocysteine
  MOD_RES (42)..(42): Selenocysteine
  MOD_RES (50)..(50): Selenocysteine
  MOD_RES (72)..(72): Selenocysteine
  MOD_RES (90)..(90): Selenocysteine
MAGPGSXGGQIGAAALAGGARSKVAPSVDFDHSCSDSVEYLXLNFGPFEXVHRWRRLPPCDEFVGARRSKHXVVAYKDAIYVFGGDNGKXMLNDLLRFDVKDCSWCRGLHWGHLFQF

SEQ ID NO: 15382 - protein, 101 aa, Homo sapiens
  MOD_RES (7)..(7): Selenocysteine
  MOD_RES (42)..(42): Selenocysteine
  MOD_RES (50)..(50): Selenocysteine
  MOD_RES (73)..(73): Selenocysteine
  MOD_RES (88)..(88): Selenocysteine
  MOD_RES (96)..(96): Selenocysteine
MAGPGSXGGQIGAAALAGGARSKVAPSVDFDHSCSDSVEYLXLNFGPFEXVHRWRRLPPCDEFVGARYGAASXQWWPIKMPFMYLVEXMGRPCSMXSCGSM

SEQ ID NO: 15383 - protein, 97 aa, Homo sapiens
  MOD_RES (6)..(6): Selenocysteine
  MOD_RES (31)..(31): Selenocysteine
  MOD_RES (61)..(61): Selenocysteine
MQFLYXDKIKYPRKERAGCVRECRPAAAEPXQGALPELRGKGVPLQPGDHDEGVRAPLLSXDSGDCAAEAAAAPSHSLGPASGHWPLHSPSSPWGLC

SEQ ID NO: 15384 - protein, 158 aa, Homo sapiens
  MOD_RES (1)..(1): Any amino acid
  MOD_RES (69)..(69): Selenocysteine
  MOD_RES (83)..(83): Selenocysteine
  MOD_RES (101)..(101): Selenocysteine
XEDGQVNISIGEMVPSRQAFESMLRYIYYGEVNMPPEDSLYLFAAPYYYGFYNNRLQAYCKQNLEMNVXVQNVLQILEAADKXQALDMKRHCLHIIVHQFXKVRALASPSGLASPWQWPCPGREGAQALWSPAVVGPGGERSRAAHHWPHLASSLGPA

SEQ ID NO: 15385 - protein, 111 aa, Homo sapiens
  MOD_RES (1)..(1): Any amino acid
  MOD_RES (67)..(67): Selenocysteine
  MOD_RES (101)..(101): Selenocysteine
XVDLQNVLVVCESAARLQLSQLKEHCLNFVVKESHFNQVIMMKEFERLSSPLIVEIVRRKQQPPPRXPLDQPVDIGPFIPPALPGACADPGCWLLVMSAGXRGHAVGLEGA

SEQ ID NO: 15386 - protein, 76 aa, Homo sapiens
  MOD_RES (57)..(57): Selenocysteine
MGSVSSLISGHSFHSKHCRASQYKLRKSSHLKKLNRYSDGLLRFGFSQDSGHGKAMXRCPRASSMSGSCGRRRRRR

SEQ ID NO: 15387 - protein, 537 aa, Homo sapiens
  MOD_RES (83)..(83): Selenocysteine
  MOD_RES (102)..(102): Selenocysteine
  MOD_RES (125)..(125): Selenocysteine
  MOD_RES (184)..(184): Selenocysteine
  MOD_RES (187)..(187): Selenocysteine
  MOD_RES (198)..(198): Selenocysteine
  MOD_RES (203)..(203): Selenocysteine
  MOD_RES (214)..(214): Selenocysteine
  MOD_RES (258)..(258): Selenocysteine
  MOD_RES (361)..(361): Selenocysteine
  MOD_RES (371)..(371): Selenocysteine
  MOD_RES (380)..(380): Selenocysteine
  MOD_RES (403)..(403): Selenocysteine
  MOD_RES (422)..(422): Selenocysteine
  MOD_RES (433)..(433): Selenocysteine
  MOD_RES (442)..(442): Selenocysteine
  MOD_RES (535)..(535): Selenocysteine
MGSVSSLISGHSFHSKHCRASQYKLRKSSHLKKLNRYSDGLLRFGFSQDSGHGKSSSKMGKSEDFFYIKVSQKARGSHHPDYXALSSGDLGGQAGVDFDPSXPPKLMPFSNQLEMGSEKGAVRPXAFKPVLPRSGAILHSSPESASHQLHPAPPDKPKEQELKPGLCSGALSDSGRNSMSSLPXHSXSSSYQLDPLVXPVGPXSRFGGSAHNIXQGIVLQDSNMMSLKALSFSDGGSKLGHSNKADKGPSCVRSPISXDECSIQELEQKLLEREGALQKLQRSFEEKELASSLAYEERPRRCRDELEGPEPKGGNKLKQASQKSQRAQQVLHLQVLQLQQEKRQLRQELESLMKEQDLLEXKLRSYEREKXSFGPALEEXQWEVCQKSGEISLLKQQLKESQXEVNAKASEILGLKAQLKDXRGKLEGLELRXQDLEGALRXKGLELEVCENELQRKKNEAELLREKHERLVWKEEKEKVIQYQKQLQQSYVAMYQRNQRLEKALQQLARGDSAGEPLEVDLEGADIPYEDIIAXEI

SEQ ID NO: 15388 - protein, 596 aa, Homo sapiens
  MOD_RES (83)..(83): Selenocysteine
  MOD_RES (102)..(102): Selenocysteine
  MOD_RES (125)..(125): Selenocysteine
  MOD_RES (184)..(184): Selenocysteine
  MOD_RES (187)..(187): Selenocysteine
  MOD_RES (198)..(198): Selenocysteine
  MOD_RES (203)..(203): Selenocysteine
  MOD_RES (214)..(214): Selenocysteine
  MOD_RES (258)..(258): Selenocysteine
  MOD_RES (361)..(361): Selenocysteine
  MOD_RES (371)..(371): Selenocysteine
  MOD_RES (380)..(380): Selenocysteine
  MOD_RES (403)..(403): Selenocysteine
  MOD_RES (422)..(422): Selenocysteine
  MOD_RES (433)..(433): Selenocysteine
  MOD_RES (442)..(442): Selenocysteine
  MOD_RES (492)..(492): Selenocysteine
  MOD_RES (594)..(594): Selenocysteine
MGSVSSLISGHSFHSKHCRASQYKLRKSSHLKKLNRYSDGLLRFGFSQDSGHGKSSSKMGKSEDFFYIKVSQKARGSHHPDYXALSSGDLGGQAGVDFDPSXPPKLMPFSNQLEMGSEKGAVRPXAFKPVLPRSGAILHSSPESASHQLHPAPPDKPKEQELKPGLCSGALSDSGRNSMSSLPXHSXSSSYQLDPLVXPVGPXSRFGGSAHNIXQGIVLQDSNMMSLKALSFSDGGSKLGHSNKADKGPSCVRSPISXDECSIQELEQKLLEREGALQKLQRSFEEKELASSLAYEERPRRCRDELEGPEPKGGNKLKQASQKSQRAQQVLHLQVLQLQQEKRQLRQELESLMKEQDLLEXKLRSYEREKXSFGPALEEXQWEVCQKSGEISLLKQQLKESQXEVNAKASEILGLKAQLKDXRGKLEGLELRXQDLEGALRXKGLELEVCENELQRKKNEAELLREKVNLLEQELQELRAQAALARDMGPPXFPEDVPALQRELERLRAELREERQGHDQMSSGFQHERLVWKEEKEKVIQYQKQLQQSYVAMYQRNQRLEKALQQLARGDSAGEPLEVDLEGADIPYEDIIAXEI

SEQ ID NO: 15389 - protein, 136 aa, Homo sapiens
  MOD_RES (6)..(6): Selenocysteine
  MOD_RES (19)..(19): Selenocysteine
  MOD_RES (54)..(54): Selenocysteine
  MOD_RES (86)..(86): Selenocysteine
  MOD_RES (89)..(89): Selenocysteine
  MOD_RES (97)..(97): Selenocysteine
MAIVQXLPVPLEPAPEAAXAPQAPVMGSVSSLISGRPCPGGPAPPRHHGPPGPXFFRQQDGLLRGGYEAQEPLCPAVPPRKAVPVXSFXYINEDFRXESPPSPSSDVEDAREQRAHNAHLRGPPPKLIPVSGKLEK

SEQ ID NO: 15390 - protein, 199 aa, Homo sapiens
  MOD_RES (6)..(6): Selenocysteine
  MOD_RES (19)..(19): Selenocysteine
  MOD_RES (54)..(54): Selenocysteine
  MOD_RES (86)..(86): Selenocysteine
  MOD_RES (89)..(89): Selenocysteine
  MOD_RES (97)..(97): Selenocysteine
  MOD_RES (146)..(146): Selenocysteine
  MOD_RES (170)..(170): Selenocysteine
  MOD_RES (180)..(180): Selenocysteine
MAIVQXLPVPLEPAPEAAXAPQAPVMGSVSSLISGRPCPGGPAPPRHHGPPGPXFFRQQDGLLRGGYEAQEPLCPAVPPRKAVPVXSFXYINEDFRXESPPSPSSDVEDAREQRAHNAHLRGPPPKLIPVSGKLEKNMEKILIRPXAFKPVLPKPRGAPSLPSFMGPRAXGLSGSQGSLXQLFGGPASSSSSSSSSSAA

SEQ ID NO: 15391 - protein, 221 aa, Homo sapiens
  MOD_RES (6)..(6): Selenocysteine
  MOD_RES (19)..(19): Selenocysteine
  MOD_RES (54)..(54): Selenocysteine
  MOD_RES (86)..(86): Selenocysteine
  MOD_RES (89)..(89): Selenocysteine
  MOD_RES (97)..(97): Selenocysteine
  MOD_RES (146)..(146): Selenocysteine
  MOD_RES (170)..(170): Selenocysteine
  MOD_RES (180)..(180): Selenocysteine
  MOD_RES (216)..(216): Selenocysteine
MAIVQXLPVPLEPAPEAAXAPQAPVMGSVSSLISGRPCPGGPAPPRHHGPPGPXFFRQQDGLLRGGYEAQEPLCPAVPPRKAVPVXSFXYINEDFRXESPPSPSSDVEDAREQRAHNAHLRGPPPKLIPVSGKLEKNMEKILIRPXAFKPVLPKPRGAPSLPSFMGPRAXGLSGSQGSLXQLFGGPASSSSSSSSSSAADKPLAFSGWASGCPSGXLSDSG

SEQ ID NO: 15392 - protein, 240 aa, Homo sapiens
  MOD_RES (6)..(6): Selenocysteine
  MOD_RES (19)..(19): Selenocysteine
  MOD_RES (54)..(54): Selenocysteine
  MOD_RES (86)..(86): Selenocysteine
  MOD_RES (89)..(89): Selenocysteine
  MOD_RES (97)..(97): Selenocysteine
  MOD_RES (146)..(146): Selenocysteine
  MOD_RES (170)..(170): Selenocysteine
  MOD_RES (180)..(180): Selenocysteine
  MOD_RES (216)..(216): Selenocysteine
  MOD_RES (230)..(230): Selenocysteine
  MOD_RES (233)..(233): Selenocysteine
  MOD_RES (239)..(240): Selenocysteine
MAIVQXLPVPLEPAPEAAXAPQAPVMGSVSSLISGRPCPGGPAPPRHHGPPGPXFFRQQDGLLRGGYEAQEPLCPAVPPRKAVPVXSFXYINEDFRXESPPSPSSDVEDAREQRAHNAHLRGPPPKLIPVSGKLEKNMEKILIRPXAFKPVLPKPRGAPSLPSFMGPRAXGLSGSQGSLXQLFGGPASSSSSSSSSSAADKPLAFSGWASGCPSGXLSDSGRNSLSSLPXYSXGGAEPXX

SEQ ID NO: 15393 - protein, 669 aa, Homo sapiens
  MOD_RES (6)..(6): Selenocysteine
  MOD_RES (19)..(19): Selenocysteine
  MOD_RES (54)..(54): Selenocysteine
  MOD_RES (86)..(86): Selenocysteine
  MOD_RES (89)..(89): Selenocysteine
  MOD_RES (97)..(97): Selenocysteine
  MOD_RES (146)..(146): Selenocysteine
  MOD_RES (170)..(170): Selenocysteine
  MOD_RES (180)..(180): Selenocysteine
  MOD_RES (216)..(216): Selenocysteine
  MOD_RES (230)..(230): Selenocysteine
  MOD_RES (233)..(233): Selenocysteine
  MOD_RES (239)..(240): Selenocysteine
  MOD_RES (266)..(266): Selenocysteine
  MOD_RES (282)..(282): Selenocysteine
  MOD_RES (298)..(298): Selenocysteine
  MOD_RES (353)..(353): Selenocysteine
  MOD_RES (424)..(424): Selenocysteine
  MOD_RES (439)..(439): Selenocysteine
  MOD_RES (484)..(484): Selenocysteine
  MOD_RES (546)..(546): Selenocysteine
  MOD_RES (665)..(665): Selenocysteine
  MOD_RES (667)..(667): Selenocysteine
MAIVQXLPVPLEPAPEAAXAPQAPVMGSVSSLISGRPCPGGPAPPRHHGPPGPXFFRQQDGLLRGGYEAQEPLCPAVPPRKAVPVXSFXYINEDFRXESPPSPSSDVEDAREQRAHNAHLRGPPPKLIPVSGKLEKNMEKILIRPXAFKPVLPKPRGAPSLPSFMGPRAXGLSGSQGSLXQLFGGPASSSSSSSSSSAADKPLAFSGWASGCPSGXLSDSGRNSLSSLPXYSXGGAEPXXSSPGGHLPSHGSGRGALPGPARGVPXGPSHSDSGRSSSSKSXGSLGGRVAGGLLGSGXRASPDSSSCGERSPPPPPPPPSDEALLHCVLEGKLRDREAELQQLRDSLDENEAXMCQAYEERQRHWQREREALREDCAAQAQRAQRAQQLLQLQVFQLQQEKRQLQDDFAQLLQEREQLERRCAXLEREQRELGPRLEEXKWEVCQKSGEISLLKQQLKESQAELVQKGSELVALRVALREARAXLRVSEGRARGLQEAARARELELEACSQELQRHRQEAEQLREKAGQLDAEAAGLREPPVPPAXADPFLLAESDEAKVQRAAAGVGGSLRAQVERLRVELQRERRRGEEQRDSFEGERLAWQAEKEQVIRYQKQLQHNYIQMYRRNRQLEQELQQLSLELEARELADLGLAEQAPCICLEEIXAXEI

SEQ ID NO: 15394 - protein, 627 aa, Homo sapiens
  MOD_RES (6)..(6): Selenocysteine
  MOD_RES (57)..(57): Selenocysteine
  MOD_RES (59)..(59): Selenocysteine
  MOD_RES (109)..(109): Selenocysteine
  MOD_RES (147)..(147): Selenocysteine
  MOD_RES (183)..(183): Selenocysteine
  MOD_RES (186)..(186): Selenocysteine
  MOD_RES (205)..(205): Selenocysteine
  MOD_RES (207)..(207): Selenocysteine
  MOD_RES (225)..(225): Selenocysteine
  MOD_RES (229)..(229): Selenocysteine
  MOD_RES (245)..(245): Selenocysteine
  MOD_RES (253)..(253): Selenocysteine
  MOD_RES (275)..(275): Selenocysteine
  MOD_RES (392)..(392): Selenocysteine
  MOD_RES (476)..(476): Selenocysteine
  MOD_RES (489)..(489): Selenocysteine
  MOD_RES (524)..(524): Selenocysteine
  MOD_RES (602)..(602): Selenocysteine
  MOD_RES (604)..(604): Selenocysteine
  MOD_RES (615)..(615): Selenocysteine
  MOD_RES (625)..(625): Selenocysteine
MAKLEXLPVRADPGRDPLLAFAPRPSELGPPDPRLAMGSVGSGVAHAQEFAMKSVGXRXGGGGSQGSFPGPRGSGSGASRERPGRYPSEDKGLANSLYLNGELRGSDHXDVCGNVVGSSGGSSSSGGSDKAPPQYREPSHPPKLLAXSGKLDQCSEPLVRPSAFKPVVPKNFHSMQNLCPPQXNGXPEGRQGPGGLKGGLDKSRXMXPAGGSGSGLSDSGRNSLXSLPXYSSSYSQHLAPLSASXSHINRIGXASYGSGSGGSSGGGSGYQDLGXSDSGRASSKSGSSSSMGRPGHLGSGEGGGGGLPFAACSPPSPSALIQELEERLWEKEQEVAALRRSLEQSEAAVAQQDKKQLQEEAARLMRQREELEDKVAACQKEQADFLPRIEEXKWEVCQKAGEISLLKQQLKDSQADVSQKLSEIVGLRSQLREGRASLREKEEQLLSLRDSFSSKQASLELGEGELPAACLKPALXPVDPAEPQDALAXCESDEAKMRRQAGVAAAASLVSVDGEAEAGGESGXRALRREVGRLQAELAAERRARERQGASFAEERRVWLEEKEKVIEYQKQLQLSYVEMYQRNQQLERRLRERGAAGGASXPXPQHGEEKKAWXPSRLERIESXEI

SEQ ID NO: 15395 - protein, 673 aa, Homo sapiens
  MOD_RES (6)..(6): Selenocysteine
  MOD_RES (57)..(57): Selenocysteine
  MOD_RES (59)..(59): Selenocysteine
  MOD_RES (109)..(109): Selenocysteine
  MOD_RES (147)..(147): Selenocysteine
  MOD_RES (183)..(183): Selenocysteine
  MOD_RES (186)..(186): Selenocysteine
  MOD_RES (205)..(205): Selenocysteine
  MOD_RES (207)..(207): Selenocysteine
  MOD_RES (225)..(225): Selenocysteine
  MOD_RES (229)..(229): Selenocysteine
  MOD_RES (245)..(245): Selenocysteine
  MOD_RES (253)..(253): Selenocysteine
  MOD_RES (275)..(275): Selenocysteine
  MOD_RES (438)..(438): Selenocysteine
  MOD_RES (522)..(522): Selenocysteine
  MOD_RES (535)..(535): Selenocysteine
  MOD_RES (570)..(570): Selenocysteine
  MOD_RES (648)..(648): Selenocysteine
  MOD_RES (650)..(650): Selenocysteine
  MOD_RES (661)..(661): Selenocysteine
  MOD_RES (671)..(671): Selenocysteine
MAKLEXLPVRADPGRDPLLAFAPRPSELGPPDPRLAMGSVGSGVAHAQEFAMKSVGXRXGGGGSQGSFPGPRGSGSGASRERPGRYPSEDKGLANSLYLNGELRGSDHXDVCGNVVGSSGGSSSSGGSDKAPPQYREPSHPPKLLAXSGKLDQCSEPLVRPSAFKPVVPKNFHSMQNLCPPQXNGXPEGRQGPGGLKGGLDKSRXMXPAGGSGSGLSDSGRNSLXSLPXYSSSYSQHLAPLSASXSHINRIGXASYGSGSGGSSGGGSGYQDLGXSDSGRASSKSGSSSSMGRPGHLGSGEGGGGGLPFAACSPPSPSALIQELEERLWEKEQEVAALRRSLEQSEAAVAQVLEERQKAWERELAELRQGCSGKLQQVARRAQRAQQGLQLQVLRLQQDKKQLQEEAARLMRQREELEDKVAACQKEQADFLPRIEEXKWEVCQKAGEISLLKQQLKDSQADVSQKLSEIVGLRSQLREGRASLREKEEQLLSLRDSFSSKQASLELGEGELPAACLKPALXPVDPAEPQDALAXCESDEAKMRRQAGVAAAASLVSVDGEAEAGGESGXRALRREVGRLQAELAAERRARERQGASFAEERRVWLEEKEKVIEYQKQLQLSYVEMYQRNQQLERRLRERGAAGGASXPXPQHGEEKKAWXPSRLERIESXEI

SEQ ID NO: 15396 - protein, 148 aa, Homo sapiens
  MOD_RES (15)..(15): Selenocysteine
  MOD_RES (19)..(19): Selenocysteine
  MOD_RES (66)..(66): Selenocysteine
LLLLLAVAVRESWQXEEKXCDLDNFNPVSEERGKVQDCFYLFEMDSSLACSPEISHLSVGSILLVXFASLVAVYVVGGFLYQRLVVGAKGMEQFPHLAFWQDLGNLVADGCDFVCRSKPRNVPAAYRGVGDDQLGEESEERDDHLLPM

SEQ ID NO: 15397 - protein, 92 aa, Homo sapiens
  MOD_RES (10)..(10): Selenocysteine
  MOD_RES (27)..(27): Selenocysteine
  MOD_RES (31)..(31): Selenocysteine
  MOD_RES (63)..(63): Selenocysteine
  MOD_RES (70)..(70): Selenocysteine
  MOD_RES (85)..(85): Selenocysteine
MFPFYSCWRXGLLLLLLAVAVRESWQXEEKXCDLVGEKGKESEKELALVKRLKPLFNKSFESXVGQGSDXYIYIFRVCREAGNHXSGAGLVQ

SEQ ID NO: 15398 - protein, 109 aa, Homo sapiens
  MOD_RES (10)..(10): Selenocysteine
  MOD_RES (27)..(27): Selenocysteine
  MOD_RES (31)..(31): Selenocysteine
  MOD_RES (63)..(63): Selenocysteine
  MOD_RES (70)..(70): Selenocysteine
  MOD_RES (85)..(85): Selenocysteine
  MOD_RES (101)..(101): Selenocysteine
  MOD_RES (109)..(109): Selenocysteine
MFPFYSCWRXGLLLLLLAVAVRESWQXEEKXCDLVGEKGKESEKELALVKRLKPLFNKSFESXVGQGSDXYIYIFRVCREAGNHXSGAGLVQINKSNGKEXVVGRLNEX

SEQ ID NO: 15399 - protein, 133 aa, Homo sapiens
  MOD_RES (10)..(10): Selenocysteine
  MOD_RES (27)..(27): Selenocysteine
  MOD_RES (31)..(31): Selenocysteine
  MOD_RES (63)..(63): Selenocysteine
  MOD_RES (70)..(70): Selenocysteine
  MOD_RES (85)..(85): Selenocysteine
  MOD_RES (101)..(101): Selenocysteine
  MOD_RES (109)..(109): Selenocysteine
  MOD_RES (130)..(130): Selenocysteine
MFPFYSCWRXGLLLLLLAVAVRESWQXEEKXCDLVGEKGKESEKELALVKRLKPLFNKSFESXVGQGSDXYIYIFRVCREAGNHXSGAGLVQINKSNGKEXVVGRLNEXHIFNGSLHHWLLFMLLGGSYXSDW

SEQ ID NO: 15400 - protein, 191 aa, Homo sapiens
  MOD_RES (10)..(10): Selenocysteine
  MOD_RES (27)..(27): Selenocysteine
  MOD_RES (31)..(31): Selenocysteine
  MOD_RES (63)..(63): Selenocysteine
  MOD_RES (70)..(70): Selenocysteine
  MOD_RES (85)..(85): Selenocysteine
  MOD_RES (101)..(101): Selenocysteine
  MOD_RES (109)..(109): Selenocysteine
  MOD_RES (149)..(149): Selenocysteine
MFPFYSCWRXGLLLLLLAVAVRESWQXEEKXCDLVGEKGKESEKELALVKRLKPLFNKSFESXVGQGSDXYIYIFRVCREAGNHXSGAGLVQINKSNGKEXVVGRLNEXHIFNGSNWIMLIYKGGDEYDNHCGKEQRRAVVMISCNRHXLADGCDFVCRSKPRNVPAAYRGVGDDQLGEESEERDDHLLPM

SEQ ID NO: 15401 - protein, 277 aa, Homo sapiens
  MOD_RES (10)..(10): Selenocysteine
  MOD_RES (27)..(27): Selenocysteine
  MOD_RES (31)..(31): Selenocysteine
  MOD_RES (63)..(63): Selenocysteine
  MOD_RES (70)..(70): Selenocysteine
  MOD_RES (85)..(85): Selenocysteine
  MOD_RES (101)..(101): Selenocysteine
  MOD_RES (109)..(109): Selenocysteine
  MOD_RES (149)..(149): Selenocysteine
  MOD_RES (195)..(195): Selenocysteine
MFPFYSCWRXGLLLLLLAVAVRESWQXEEKXCDLVGEKGKESEKELALVKRLKPLFNKSFESXVGQGSDXYIYIFRVCREAGNHXSGAGLVQINKSNGKEXVVGRLNEXHIFNGSNWIMLIYKGGDEYDNHCGKEQRRAVVMISCNRHXLADNFNPVSEERGKVQDCFYLFEMDSSLACSPEISHLSVGSILLVXFASLVAVYVVGGFLYQRLVVGAKGMEQFPHLAFWQDLGNLVADGCDFVCRSKPRNVPAAYRGVGDDQLGEESEERDDHLLPM

SEQ ID NO: 15402 - protein, 25 aa, Homo sapiens
MLIYKGGDEYDNHCGKEQRRAVVMI

SEQ ID NO: 15403 - protein, 85 aa, Homo sapiens
  MOD_RES (84)..(84): Selenocysteine
VVGGFLYQRLVVGAKGMEQFPHLAFWQDLGNLVAACGFDLFFNLLERERKQKWDIEGSAVLCAGCGMLLHLSLLLAQGSVFLPXF

SEQ ID NO: 15404 - protein, 104 aa, Homo sapiens
  MOD_RES (1)..(1): Any amino acid
  MOD_RES (9)..(9): Selenocysteine
  MOD_RES (16)..(16): Selenocysteine
  MOD_RES (31)..(31): Selenocysteine
  MOD_RES (47)..(47): Selenocysteine
  MOD_RES (55)..(55): Selenocysteine
  MOD_RES (95)..(95): Selenocysteine
  MOD_RES (103)..(104): Selenocysteine
XFNKSFESXVGQGSDXYIYIFRVCREAGNHXSGAGLVQINKSNGKEXVVGRLNEXHIFNGSNWIMLIYKGGDEYDNHCGKEQRRAVVMISCNRHXLAESKHLXX

SEQ ID NO: 15405 - protein, 122 aa, Homo sapiens
  MOD_RES (1)..(1): Any amino acid
  MOD_RES (27)..(27): Selenocysteine
  MOD_RES (73)..(73): Selenocysteine
XGGDEYDNHCGKEQRRAVVMISCNRHXLADNFNPVSEERGKVQDCFYLFEMDSSLACSPEISHLSVGSILLVXFASLVAVYVVGGFLYQRLVVGAKGMEQFPHLAFWQDLGNLVAVSNRAAG

SEQ ID NO: 15406 - protein, 96 aa, Homo sapiens
  MOD_RES (1)..(1): Any amino acid
  MOD_RES (6)..(6): Selenocysteine
  MOD_RES (57)..(57): Selenocysteine
  MOD_RES (73)..(73): Selenocysteine
XILLVXFASLVAVYVVGGFLYQRLVVGAKGMEQFPHLAFWQDLGNLVAKGNGSRSGXSRALLSSALGVECCCXCPFCWLREVSSCPHFCGERFLIL

SEQ ID NO: 15407 - protein, 159 aa, Homo sapiens
  MOD_RES (8)..(8): Selenocysteine
  MOD_RES (47)..(47): Selenocysteine
  MOD_RES (98)..(98): Selenocysteine
  MOD_RES (117)..(117): Selenocysteine
  MOD_RES (136)..(136): Selenocysteine
  MOD_RES (150)..(150): Selenocysteine
  MOD_RES (158)..(158): Selenocysteine
DKIEDEVXRQVAQCKCAKRFQVEQIGENKYRFGDSQQLRLVRILRSXVMVRVGGGWMALDEFLVKNDPCRVHHPGSKIKRSDSSSSISSQSPIARGRXNIELREKFILPEGASQGMXPFRSRGRRSKPSSRAASPXRSSSSASQSNHSCXSMPSSPAXP

SEQ ID NO: 15408 - protein, 1375 aa, Homo sapiens
  MOD_RES (41)..(41): Selenocysteine
  MOD_RES (43)..(43): Selenocysteine
  MOD_RES (120)..(120): Selenocysteine
  MOD_RES (127)..(127): Selenocysteine
  MOD_RES (133)..(133): Selenocysteine
  MOD_RES (162)..(162): Selenocysteine
  MOD_RES (166)..(166): Selenocysteine
  MOD_RES (170)..(170): Selenocysteine
  MOD_RES (175)..(175): Selenocysteine
  MOD_RES (226)..(226): Selenocysteine
  MOD_RES (246)..(246): Selenocysteine
  MOD_RES (268)..(268): Selenocysteine
  MOD_RES (292)..(292): Selenocysteine
  MOD_RES (299)..(299): Selenocysteine
  MOD_RES (320)..(320): Selenocysteine
  MOD_RES (406)..(406): Selenocysteine
  MOD_RES (411)..(411): Selenocysteine
  MOD_RES (476)..(476): Selenocysteine
  MOD_RES (482)..(482): Selenocysteine
  MOD_RES (491)..(491): Selenocysteine
  MOD_RES (500)..(500): Selenocysteine
  MOD_RES (502)..(504): Selenocysteine
  MOD_RES (512)..(512): Selenocysteine
  MOD_RES (515)..(515): Selenocysteine
  MOD_RES (520)..(520): Selenocysteine
  MOD_RES (528)..(528): Selenocysteine
  MOD_RES (579)..(579): Selenocysteine
  MOD_RES (585)..(585): Selenocysteine
  MOD_RES (610)..(610): Selenocysteine
  MOD_RES (615)..(615): Selenocysteine
  MOD_RES (621)..(621): Selenocysteine
  MOD_RES (629)..(629): Selenocysteine
  MOD_RES (648)..(648): Selenocysteine
  MOD_RES (684)..(684): Selenocysteine
  MOD_RES (700)..(700): Selenocysteine
  MOD_RES (714)..(714): Selenocysteine
  MOD_RES (744)..(744): Selenocysteine
  MOD_RES (777)..(777): Selenocysteine
  MOD_RES (812)..(812): Selenocysteine
  MOD_RES (828)..(828): Selenocysteine
  MOD_RES (843)..(843): Selenocysteine
  MOD_RES (859)..(859): Selenocysteine
  MOD_RES (867)..(867): Selenocysteine
  MOD_RES (912)..(912): Selenocysteine
  MOD_RES (930)..(930): Selenocysteine
  MOD_RES (1002)..(1002): Selenocysteine
  MOD_RES (1037)..(1037): Selenocysteine
  MOD_RES (1055)..(1055): Selenocysteine
  MOD_RES (1088)..(1088): Selenocysteine
  MOD_RES (1108)..(1108): Selenocysteine
  MOD_RES (1116)..(1116): Selenocysteine
  MOD_RES (1157)..(1157): Selenocysteine
  MOD_RES (1193)..(1193): Selenocysteine
  MOD_RES (1244)..(1244): Selenocysteine
  MOD_RES (1252)..(1253): Selenocysteine
  MOD_RES (1278)..(1278): Selenocysteine
  MOD_RES (1289)..(1289): Selenocysteine
  MOD_RES (1303)..(1303): Selenocysteine
  MOD_RES (1314)..(1314): Selenocysteine
  MOD_RES (1340)..(1340): Selenocysteine
  MOD_RES (1348)..(1348): Selenocysteine
  MOD_RES (1351)..(1351): Selenocysteine
  MOD_RES (1355)..(1355): Selenocysteine
  MOD_RES (1357)..(1358): Selenocysteine
MAGYVPGQQPANRSQEKEFVQAYEDVLERYKDERDRVQKKXFXKWVNKHLMKVRKHINDLYEDLRDGHNLISLLEVLSGIKLPREKGRMRFHRLQNVQIALDFLKQRQVKLVNIRNDDIXDGNPKLXLGLIWXIILHFQISDIYISGESGDMSAKEKLLLWXQKVXAGYXGIKCXNFSSCWSDGKMFNALIHRYRPDLVDMERVQIQSNRENLEQAFEVAERLGVXRLLDAEDVDVPSPDEKSVIXYVSSIYDAFPKVPEGGEGISAXEVDSRWQEYQSRVDSLIPWIKQHXILMSDKXFPQNPVELKALYNQYIHFKEXEILAKEREKGRIEELYKLLEVWIEFGRIKLPQGYHPNDVEEEWGKLIIEMLEREKSLRPAVERLELLLQIANKIQNGALNCEEKLXLAKNXLQADAAHLESGQPVQCESDVIMYIQECEGLIRQLQVDLQILRDENYYQLEELAFRVMRLQDELVXLRLECXNLYRKGHFXSLELVPPSXLXXXHLKAEPLXKAXHSSSXSWFRKPMXRAELVAISSSEDEGNLRFVYELLSWVEEMQMKLERAEWGNDLPSVELQLEXQQHIHXSVEELGSSVKEARLYEGKMSQNFHXSYAEXLGKLEXQYCKLKEXSSFRMRHLQSLHKFVSRAXAELIWLNEKEEEELAYDWSDNNSNISAKRNYFSELXMELEEKQDVFRSLQDXAELLSLENHPAKQXVEAYSAAVQSQLQWMKQLCLCVEQHVKENXAYFQFFSDARELESFLRNLQDSIKRKYSCDHNXSLSRLEDLLQDSMDEKEQLIQSKSSVASLVGRSKXIVQLKPRSPDHVLKNXISVKAVCDYRQIEIXICKNDECVLEDNSQRXKWKVISPXGNEAMVPSVCFLIPPPNKDAIEMASRVEQSYQKVMALWHQLHVNXKSLISWNYLRKDLDLVQXWNLEKLRSSAPGECHQIMKNLQAHYEDFLQDSRDSVLFSVADRLRLEEEVEACKARFQHLMKSMENEDKEEXVAKMYISELKNIRLRLEEYEQRVVKRIQSLASSRXDRDAWQDNALRIAEQEHXQEDLQQLRSDLDAVSMKCDSFLHQSPSSSSVPXLRSELNLLVEKMDHVYGLSXVYLNKLKXVDVIVRSIQDAELLVKGYEIKLSQEEVVLADLSALEAHWSXLRHWLSDVKDKNSVFSVLDEEIAKAKVVAEQMSRLXPERNLDLERYQEKGSQLQERWHRVIAQLEIRQSELESIQEVLGDYRACHGXLIKWIEEXXAQQEMMKPGQAEDSRVLSEQLSQQXALFAEIERNQXKLDQCQKFSQQYSXIVKDYELQLMXYKAFVESQQKSPGKRRRMLSSSDAIXQEFMDLRXRYXALVXLXXQHVKYISDALRRLEEEE

SEQ ID NO: 15409 - protein, 1427 aa, Homo sapiens
  MOD_RES (41)..(41): Selenocysteine
  MOD_RES (57)..(57): Selenocysteine
  MOD_RES (61)..(61): Selenocysteine
  MOD_RES (69)..(69): Selenocysteine
  MOD_RES (75)..(75): Selenocysteine
  MOD_RES (176)..(176): Selenocysteine
  MOD_RES (193)..(193): Selenocysteine
  MOD_RES (242)..(242): Selenocysteine
  MOD_RES (246)..(246): Selenocysteine
  MOD_RES (258)..(258): Selenocysteine
  MOD_RES (263)..(263): Selenocysteine
  MOD_RES (281)..(281): Selenocysteine
  MOD_RES (284)..(284): Selenocysteine
  MOD_RES (308)..(308): Selenocysteine
  MOD_RES (315)..(315): Selenocysteine
  MOD_RES (347)..(347): Selenocysteine
  MOD_RES (369)..(369): Selenocysteine
  MOD_RES (385)..(385): Selenocysteine
  MOD_RES (409)..(409): Selenocysteine
  MOD_RES (423)..(423): Selenocysteine
  MOD_RES (435)..(435): Selenocysteine
  MOD_RES (449)..(449): Selenocysteine
  MOD_RES (452)..(452): Selenocysteine
  MOD_RES (461)..(461): Selenocysteine
  MOD_RES (481)..(481): Selenocysteine
  MOD_RES (533)..(533): Selenocysteine
  MOD_RES (542)..(542): Selenocysteine
  MOD_RES (564)..(564): Selenocysteine
  MOD_RES (566)..(566): Selenocysteine
  MOD_RES (581)..(581): Selenocysteine
  MOD_RES (639)..(639): Selenocysteine
  MOD_RES (651)..(651): Selenocysteine
  MOD_RES (661)..(661): Selenocysteine
  MOD_RES (664)..(664): Selenocysteine
  MOD_RES (679)..(679): Selenocysteine
  MOD_RES (690)..(690): Selenocysteine
  MOD_RES (699)..(699): Selenocysteine
  MOD_RES (706)..(706): Selenocysteine
  MOD_RES (729)..(729): Selenocysteine
  MOD_RES (779)..(779): Selenocysteine
  MOD_RES (783)..(783): Selenocysteine
  MOD_RES (815)..(815): Selenocysteine
  MOD_RES (820)..(820): Selenocysteine
  MOD_RES (837)..(837): Selenocysteine
  MOD_RES (842)..(842): Selenocysteine
  MOD_RES (858)..(858): Selenocysteine
  MOD_RES (869)..(869): Selenocysteine
  MOD_RES (897)..(897): Selenocysteine
  MOD_RES (908)..(908): Selenocysteine
  MOD_RES (913)..(913): Selenocysteine
  MOD_RES (920)..(920): Selenocysteine
  MOD_RES (932)..(932): Selenocysteine
  MOD_RES (941)..(941): Selenocysteine
  MOD_RES (961)..(961): Selenocysteine
  MOD_RES (965)..(965): Selenocysteine
  MOD_RES (970)..(970): Selenocysteine
  MOD_RES (976)..(976): Selenocysteine
  MOD_RES (979)..(980): Selenocysteine
  MOD_RES (989)..(989): Selenocysteine
  MOD_RES (996)..(996): Selenocysteine
  MOD_RES (1009)..(1009): Selenocysteine
  MOD_RES (1014)..(1014): Selenocysteine
  MOD_RES (1022)..(1022): Selenocysteine
  MOD_RES (1027)..(1027): Selenocysteine
  MOD_RES (1040)..(1040): Selenocysteine
  MOD_RES (1048)..(1048): Selenocysteine
  MOD_RES (1053)..(1053): Selenocysteine
  MOD_RES (1061)..(1061): Selenocysteine
  MOD_RES (1066)..(1066): Selenocysteine
  MOD_RES (1074)..(1074): Selenocysteine
  MOD_RES (1079)..(1079): Selenocysteine
  MOD_RES (1087)..(1087): Selenocysteine
  MOD_RES (1092)..(1092): Selenocysteine
  MOD_RES (1100)..(1100): Selenocysteine
  MOD_RES (1105)..(1105): Selenocysteine
  MOD_RES (1113)..(1113): Selenocysteine
  MOD_RES (1126)..(1126): Selenocysteine
  MOD_RES (1139)..(1139): Selenocysteine
  MOD_RES (1152)..(1152): Selenocysteine
  MOD_RES (1165)..(1165): Selenocysteine
  MOD_RES (1178)..(1178): Selenocysteine
  MOD_RES (1191)..(1191): Selenocysteine
  MOD_RES (1196)..(1196): Selenocysteine
  MOD_RES (1204)..(1204): Selenocysteine
  MOD_RES (1211)..(1211): Selenocysteine
  MOD_RES (1216)..(1216): Selenocysteine
  MOD_RES (1224)..(1224): Selenocysteine
  MOD_RES (1242)..(1242): Selenocysteine
  MOD_RES (1250)..(1250): Selenocysteine
  MOD_RES (1255)..(1255): Selenocysteine
  MOD_RES (1263)..(1263): Selenocysteine
  MOD_RES (1276)..(1276): Selenocysteine
  MOD_RES (1302)..(1302): Selenocysteine
  MOD_RES (1315)..(1315): Selenocysteine
  MOD_RES (1346)..(1346): Selenocysteine
  MOD_RES (1356)..(1356): Selenocysteine
  MOD_RES (1365)..(1365): Selenocysteine
  MOD_RES (1384)..(1384): Selenocysteine
  MOD_RES (1386)..(1386): Selenocysteine
  MOD_RES (1397)..(1397): Selenocysteine
  MOD_RES (1425)..(1425): Selenocysteine
MGKPLSRPDCLRRNPSCLGKGEEEDGYIEDCYVPQRSIYDXMRINEQIDQGSKLNQXSKSXMEKMEGSXISSNGXLGAASNVFESRAPEGKKLDERIIFDALKLSSDVQKSAPVPPRRRPNAERKDNVNRRSWKSFMPPNFPEFAERIEASLSEVSEAGASNPSLQEKKESSSALXESSGHLDHREPQSESVXLEHVSKSIGIPEVQDFKNLSGDCQDFRFQQHSANPPHEFQPVESEAVAXSGNXDVMQESRFSSAXWPRAXKSLAKGGFSEKQHPLGDXACXVEMPPLSPCLSEELLDPELHVLIXPSLREKXESELKFEEDERWIMMEAEGEWEEEKLSDREKXFLMADEKNSLADIFEEREQANXAVVEDGSDCLAAVLRXFGHLSLGQICCPDDPQPAKDQLAXVPKDIPLDCDCVLXGEDILGEVANRXAQGLEGLVSDSACXVGXIDAEQLSDXDSVQMFLELEKECLCEEGVXPLVELQNQISSEGLAASQDAENLLVISHFSGAALEKEQHLGLLHVRAKDYDXRLDCGYFNXLDSSQVPNAVELIAHVDIMRDXSXVSKEECEKVPFSPRXAEFKSRQPADLDSLEKLDPGGLLNSDHRVSHEEKLSGFIASELAKDNGSLSQGDCSQXEGNGEECIERVXFSFAFNHELXDVXSGPEVEVLYESNLLXDEIHLESGNVXVNQENNSLXSMGNVVXCELSVEKVCDEDGEAKELDYQAXLLEDQAPAHFHRNFPEQVFQDLQRKSPESEILSLHLLVEELRLNPDGVEXVNDXKPELNVASSEGGEMERRDSDSFLNIFPEKQVXKAGNXEPVLEEWIPVLQRPSRXAAVPXVKDALDAALPSPEEGXSIAAVPAPEGXAVVAALVPFPHEDILVASIVSLEEEDVXAAAVSAPERAXVPAVXVSVPEGXAAVAAVSSPEEXAPAVAAAIXQEGMSAVAGFSPEWAALAIXVPIXEEDGXPEGPVXPAXXVHAPEEPDXAAVRVSXPEEPASPAAAVPXPEEPXSPAAAVPXPEEPXSPAAAVPPPEEPXSPAAAVPXPEEPXSPAAAVPXPEEPXSPAAAVPXPEEPXSPAAAVPXPEEPXSPAAAVPXPEEPXSPAAAVPXPEEPASPAAAVPXPEEPASPAAAVPXPEEPAFPAPAVPXPEESASAAVAVPXPEESASPAAAVPXPAESASFAAVVAXLEEPXSPAASVPXPAAMVAXLEEFXSPAASVPXSEEPASLAAAVSNPEEPXSPAAAVPXLEEPXSSAAAVLXPEELSSPAASVPXPEEPASPAAAVSNLEEPASPAAAVPXPEVAAIPAASVPXPEVPAIPAAAVPPMEEVSPIGVPFLGVSAHXDSVPISEEGXPVLEEASSXGMWIKEDLDSLVFGIKEVXSXVLHGKVPLAAXAGLNSDEVIVHFDSGKGLKSKVRFAGLXWW

SEQ ID NO: 15410 - protein, 1062 aa, Homo sapiens
  MOD_RES (42)..(42): Selenocysteine
  MOD_RES (51)..(51): Selenocysteine
  MOD_RES (55)..(55): Selenocysteine
  MOD_RES (61)..(61): Selenocysteine
  MOD_RES (63)..(63): Selenocysteine
  MOD_RES (65)..(65): Selenocysteine
  MOD_RES (68)..(68): Selenocysteine
  MOD_RES (83)..(83): Selenocysteine
  MOD_RES (118)..(118): Selenocysteine
  MOD_RES (142)..(142): Selenocysteine
  MOD_RES (169)..(169): Selenocysteine
  MOD_RES (185)..(185): Selenocysteine
  MOD_RES (204)..(204): Selenocysteine
  MOD_RES (208)..(208): Selenocysteine
  MOD_RES (226)..(226): Selenocysteine
  MOD_RES (235)..(235): Selenocysteine
  MOD_RES (258)..(258): Selenocysteine
  MOD_RES (275)..(275): Selenocysteine
  MOD_RES (286)..(286): Selenocysteine
  MOD_RES (311)..(311): Selenocysteine
  MOD_RES (318)..(318): Selenocysteine
  MOD_RES (326)..(326): Selenocysteine
  MOD_RES (334)..(334): Selenocysteine
  MOD_RES (364)..(364): Selenocysteine
  MOD_RES (368)..(368): Selenocysteine
  MOD_RES (372)..(372): Selenocysteine
  MOD_RES (377)..(377): Selenocysteine
  MOD_RES (428)..(428): Selenocysteine
  MOD_RES (448)..(448): Selenocysteine
  MOD_RES (470)..(470): Selenocysteine
  MOD_RES (494)..(494): Selenocysteine
  MOD_RES (501)..(501): Selenocysteine
  MOD_RES (522)..(522): Selenocysteine
  MOD_RES (608)..(608): Selenocysteine
  MOD_RES (613)..(613): Selenocysteine
  MOD_RES (678)..(678): Selenocysteine
  MOD_RES (684)..(684): Selenocysteine
  MOD_RES (693)..(693): Selenocysteine
  MOD_RES (702)..(702): Selenocysteine
  MOD_RES (704)..(706): Selenocysteine
  MOD_RES (714)..(714): Selenocysteine
  MOD_RES (717)..(717): Selenocysteine
  MOD_RES (722)..(722): Selenocysteine
  MOD_RES (730)..(730): Selenocysteine
  MOD_RES (781)..(781): Selenocysteine
  MOD_RES (787)..(787): Selenocysteine
  MOD_RES (812)..(812): Selenocysteine
  MOD_RES (817)..(817): Selenocysteine
  MOD_RES (823)..(823): Selenocysteine
  MOD_RES (831)..(831): Selenocysteine
  MOD_RES (850)..(850): Selenocysteine
  MOD_RES (886)..(886): Selenocysteine
  MOD_RES (902)..(902): Selenocysteine
  MOD_RES (916)..(916): Selenocysteine
  MOD_RES (946)..(946): Selenocysteine
  MOD_RES (979)..(979): Selenocysteine
  MOD_RES (1016)..(1016): Selenocysteine
  MOD_RES (1032)..(1032): Selenocysteine
  MOD_RES (1048)..(1048): Selenocysteine
MGNSLGCFKEPKESIAIPEKAPISPKKRVRFKRRWRGKKIPXPEASHQEEXSEGXGVIEEXEXLXKLXESLQKEDGVGGVEHXPPDILLPGDSAPNSRVVDRGMIVQVKERFQGEVQXAHLLLENESSVAGGVWDSLEEGMXVIAHLLDNPAERNCEKSVSQLVEFPRXASCSSRAVLLPLQGEXAVEKGNIQRGFRSCALPRXDYPXDKGNQEQFSEGWSVEEGXKSVSGAPQXASWIIECSVSSLLLDQPGGQRRXEPSHVGQVPPQDSRLPXSQSDLSISGVXVSILPSSSGYGSDGPHIHGIQPKDXEPEKSSXSFSEEDGXLSLEASHXPSWGLEEISDIYISGESGDMSAKEKLLLWXQKVXAGYXGIKCXNFSSCWSDGKMFNALIHRYRPDLVDMERVQIQSNRENLEQAFEVAERLGVXRLLDAEDVDVPSPDEKSVIXYVSSIYDAFPKVPEGGEGISAXEVDSRWQEYQSRVDSLIPWIKQHXILMSDKXFPQNPVELKALYNQYIHFKEXEILAKEREKGRIEELYKLLEVWIEFGRIKLPQGYHPNDVEEEWGKLIIEMLEREKSLRPAVERLELLLQIANKIQNGALNCEEKLXLAKNXLQADAAHLESGQPVQCESDVIMYIQECEGLIRQLQVDLQILRDENYYQLEELAFRVMRLQDELVXLRLECXNLYRKGHFXSLELVPPSXLXXXHLKAEPLXKAXHSSSXSWFRKPMXRAELVAISSSEDEGNLRFVYELLSWVEEMQMKLERAEWGNDLPSVELQLEXQQHIHXSVEELGSSVKEARLYEGKMSQNFHXSYAEXLGKLEXQYCKLKEXSSFRMRHLQSLHKFVSRAXAELIWLNEKEEEELAYDWSDNNSNISAKRNYFSELXMELEEKQDVFRSLQDXAELLSLENHPAKQXVEAYSAAVQSQLQWMKQLCLCVEQHVKENXAYFQFFSDARELESFLRNLQDSIKRKYSCDHNXSLSRLEDLLQDSMAQDEKEQLIQSKSSVASLVGRSKXIVQLKPRSPDHVLKNXISVKAVCDYRQIEGRXILSEGYGPLASAAC

SEQ ID NO: 15411 - protein, 2028 aa, Homo sapiens
  MOD_RES (42)..(42): Selenocysteine
  MOD_RES (51)..(51): Selenocysteine
  MOD_RES (55)..(55): Selenocysteine
  MOD_RES (61)..(61): Selenocysteine
  MOD_RES (63)..(63): Selenocysteine
  MOD_RES (65)..(65): Selenocysteine
  MOD_RES (68)..(68): Selenocysteine
  MOD_RES (83)..(83): Selenocysteine
  MOD_RES (118)..(118): Selenocysteine
  MOD_RES (142)..(142): Selenocysteine
  MOD_RES (169)..(169): Selenocysteine
  MOD_RES (185)..(185): Selenocysteine
  MOD_RES (204)..(204): Selenocysteine
  MOD_RES (208)..(208): Selenocysteine
  MOD_RES (226)..(226): Selenocysteine
  MOD_RES (235)..(235): Selenocysteine
  MOD_RES (258)..(258): Selenocysteine
  MOD_RES (275)..(275): Selenocysteine
  MOD_RES (286)..(286): Selenocysteine
  MOD_RES (311)..(311): Selenocysteine
  MOD_RES (318)..(318): Selenocysteine
  MOD_RES (326)..(326): Selenocysteine
  MOD_RES (353)..(353): Selenocysteine
  MOD_RES (357)..(357): Selenocysteine
  MOD_RES (361)..(361): Selenocysteine
  MOD_RES (366)..(366): Selenocysteine
  MOD_RES (417)..(417): Selenocysteine
  MOD_RES (437)..(437): Selenocysteine
  MOD_RES (459)..(459): Selenocysteine
  MOD_RES (483)..(483): Selenocysteine
  MOD_RES (490)..(490): Selenocysteine
  MOD_RES (511)..(511): Selenocysteine
  MOD_RES (597)..(597): Selenocysteine
  MOD_RES (602)..(602): Selenocysteine
  MOD_RES (667)..(667): Selenocysteine
  MOD_RES (673)..(673): Selenocysteine
  MOD_RES (682)..(682): Selenocysteine
  MOD_RES (691)..(691): Selenocysteine
  MOD_RES (693)..(695): Selenocysteine
  MOD_RES (703)..(703): Selenocysteine
  MOD_RES (706)..(706): Selenocysteine
  MOD_RES (711)..(711): Selenocysteine
  MOD_RES (719)..(719): Selenocysteine
  MOD_RES (770)..(770): Selenocysteine
  MOD_RES (776)..(776): Selenocysteine
  MOD_RES (801)..(801): Selenocysteine
  MOD_RES (806)..(806): Selenocysteine
  MOD_RES (812)..(812): Selenocysteine
  MOD_RES (820)..(820): Selenocysteine
  MOD_RES (839)..(839): Selenocysteine
  MOD_RES (875)..(875): Selenocysteine
  MOD_RES (891)..(891): Selenocysteine
  MOD_RES (905)..(905): Selenocysteine
  MOD_RES (935)..(935): Selenocysteine
  MOD_RES (968)..(968): Selenocysteine
  MOD_RES (1003)..(1003): Selenocysteine
  MOD_RES (1019)..(1019): Selenocysteine
  MOD_RES (1034)..(1034): Selenocysteine
  MOD_RES (1050)..(1050): Selenocysteine
  MOD_RES (1058)..(1058): Selenocysteine
  MOD_RES (1103)..(1103): Selenocysteine
  MOD_RES (1121)..(1121): Selenocysteine
  MOD_RES (1193)..(1193): Selenocysteine
  MOD_RES (1228)..(1228): Selenocysteine
  MOD_RES (1246)..(1246): Selenocysteine
  MOD_RES (1279)..(1279): Selenocysteine
  MOD_RES (1299)..(1299): Selenocysteine
  MOD_RES (1307)..(1307): Selenocysteine
  MOD_RES (1348)..(1348): Selenocysteine
  MOD_RES (1384)..(1384): Selenocysteine
  MOD_RES (1435)..(1435): Selenocysteine
  MOD_RES (1443)..(1444): Selenocysteine
  MOD_RES (1469)..(1469): Selenocysteine
  MOD_RES (1480)..(1480): Selenocysteine
  MOD_RES (1494)..(1494): Selenocysteine
  MOD_RES (1505)..(1505): Selenocysteine
  MOD_RES (1531)..(1531): Selenocysteine
  MOD_RES (1539)..(1539): Selenocysteine
  MOD_RES (1542)..(1542): Selenocysteine
  MOD_RES (1546)..(1546): Selenocysteine
  MOD_RES (1548)..(1549): Selenocysteine
  MOD_RES (1589)..(1589): Selenocysteine
  MOD_RES (1594)..(1594): Selenocysteine
  MOD_RES (1599)..(1599): Selenocysteine
  MOD_RES (1603)..(1603): Selenocysteine
  MOD_RES (1607)..(1607): Selenocysteine
  MOD_RES (1624)..(1625): Selenocysteine
  MOD_RES (1636)..(1636): Selenocysteine
  MOD_RES (1689)..(1689): Selenocysteine
  MOD_RES (1693)..(1693): Selenocysteine
  MOD_RES (1700)..(1700): Selenocysteine
  MOD_RES (1726)..(1727): Selenocysteine
  MOD_RES (1753)..(1753): Selenocysteine
  MOD_RES (1757)..(1757): Selenocysteine
  MOD_RES (1771)..(1771): Selenocysteine
  MOD_RES (1779)..(1779): Selenocysteine
  MOD_RES (1799)..(1799): Selenocysteine
  MOD_RES (1811)..(1811): Selenocysteine
  MOD_RES (1818)..(1818): Selenocysteine
  MOD_RES (1842)..(1842): Selenocysteine
  MOD_RES (1853)..(1853): Selenocysteine
  MOD_RES (1873)..(1874): Selenocysteine
  MOD_RES (1912)..(1912): Selenocysteine
  MOD_RES (1927)..(1927): Selenocysteine
  MOD_RES (1947)..(1947): Selenocysteine
  MOD_RES (1961)..(1961): Selenocysteine
  MOD_RES (1999)..(1999): Selenocysteine
  MOD_RES (2025)..(2025): Selenocysteine
MGNSLGCFKEPKESIAIPEKAPISPKKRVRFKRRWRGKKIPXPEASHQEEXSEGXGVIEEXEXLXKLXESLQKEDGVGGVEHXPPDILLPGDSAPNSRVVDRGMIVQVKERFQGEVQXAHLLLENESSVAGGVWDSLEEGMXVIAHLLDNPAERNCEKSVSQLVEFPRXASCSSRAVLLPLQGEXAVEKGNIQRGFRSCALPRXDYPXDKGNQEQFSEGWSVEEGXKSVSGAPQXASWIIECSVSSLLLDQPGGQRRXEPSHVGQVPPQDSRLPXSQSDLSISGVXVSILPSSSGYGSDGPHIHGIQPKDXEPEKSSXSFSEEDGXLSLEISDIYISGESGDMSAKEKLLLWXQKVXAGYXGIKCXNFSSCWSDGKMFNALIHRYRPDLVDMERVQIQSNRENLEQAFEVAERLGVXRLLDAEDVDVPSPDEKSVIXYVSSIYDAFPKVPEGGEGISAXEVDSRWQEYQSRVDSLIPWIKQHXILMSDKXFPQNPVELKALYNQYIHFKEXEILAKEREKGRIEELYKLLEVWIEFGRIKLPQGYHPNDVEEEWGKLIIEMLEREKSLRPAVERLELLLQIANKIQNGALNCEEKLXLAKNXLQADAAHLESGQPVQCESDVIMYIQECEGLIRQLQVDLQILRDENYYQLEELAFRVMRLQDELVXLRLECXNLYRKGHFXSLELVPPSXLXXXHLKAEPLXKAXHSSSXSWFRKPMXRAELVAISSSEDEGNLRFVYELLSWVEEMQMKLERAEWGNDLPSVELQLEXQQHIHXSVEELGSSVKEARLYEGKMSQNFHXSYAEXLGKLEXQYCKLKEXSSFRMRHLQSLHKFVSRAXAELIWLNEKEEEELAYDWSDNNSNISAKRNYFSELXMELEEKQDVFRSLQDXAELLSLENHPAKQXVEAYSAAVQSQLQWMKQLCLCVEQHVKENXAYFQFFSDARELESFLRNLQDSIKRKYSCDHNXSLSRLEDLLQDSMDEKEQLIQSKSSVASLVGRSKXIVQLKPRSPDHVLKNXISVKAVCDYRQIEIXICKNDECVLEDNSQRXKWKVISPXGNEAMVPSVCFLIPPPNKDAIEMASRVEQSYQKVMALWHQLHVNXKSLISWNYLRKDLDLVQXWNLEKLRSSAPGECHQIMKNLQAHYEDFLQDSRDSVLFSVADRLRLEEEVEACKARFQHLMKSMENEDKEEXVAKMYISELKNIRLRLEEYEQRVVKRIQSLASSRXDRDAWQDNALRIAEQEHXQEDLQQLRSDLDAVSMKCDSFLHQSPSSSSVPXLRSELNLLVEKMDHVYGLSXVYLNKLKXVDVIVRSIQDAELLVKGYEIKLSQEEVVLADLSALEAHWSXLRHWLSDVKDKNSVFSVLDEEIAKAKVVAEQMSRLXPERNLDLERYQEKGSQLQERWHRVIAQLEIRQSELESIQEVLGDYRACHGXLIKWIEEXXAQQEMMKPGQAEDSRVLSEQLSQQXALFAEIERNQXKLDQCQKFSQQYSXIVKDYELQLMXYKAFVESQQKSPGKRRRMLSSSDAIXQEFMDLRXRYXALVXLXXQHVKYISDALRRLEEEEKVVEEEKQEHVEKVKELLGWVSXLARNXQGKAXSSEXKESXDIEKAILEQQVLSEELXXKKEQVSEAIKXSQIFLAKHGHKLSEKEKKQISEQLNALNKAYHDLCDGSANQLQQLQSQLAHQXEQKXLQKQQNXCHQQLEDLCSWVGQAERALAGHQGRXXQQDLSALQKNQSDLKDLQDDIQNRAXSFAXVVKDIEGFMEENQXKLSPRELXALREKLHQAKEQYEALQEEXRVAQKELEEAVXSALQQEXEKSKAAKELAENKKKIDALLDWVXSVGSSGGQLLXNLPGMEQLSGASLEKGALDXXDGYMGVNQAPEKLDKQCEMMKARHQELLSQQQNFILAXQSAQAFLDQHGHNLXPEEQQMLQQKLGELKEQYSXSLAQSEAELKQVQXLQDELQKFLQDHKEFESWLERSEKELENMHKGGSSPEXLPSLLKRQGSFSEDVISHKGDLRFVXISG

SEQ ID NO: 15412 - protein, 7555 aa, Homo sapiens
  MOD_RES (12)..(12): Selenocysteine
  MOD_RES (17)..(17): Selenocysteine
  MOD_RES (46)..(46): Selenocysteine
  MOD_RES (48)..(48): Selenocysteine
  MOD_RES (94)..(94): Selenocysteine
  MOD_RES (106)..(106): Selenocysteine
  MOD_RES (157)..(157): Selenocysteine
  MOD_RES (164)..(164): Selenocysteine
  MOD_RES (170)..(170): Selenocysteine
  MOD_RES (199)..(199): Selenocysteine
  MOD_RES (203)..(203): Selenocysteine
  MOD_RES (207)..(207): Selenocysteine
  MOD_RES (212)..(212): Selenocysteine
  MOD_RES (263)..(263): Selenocysteine
  MOD_RES (283)..(283): Selenocysteine
  MOD_RES (305)..(305): Selenocysteine
  MOD_RES (329)..(329): Selenocysteine
  MOD_RES (336)..(336): Selenocysteine
  MOD_RES (357)..(357): Selenocysteine
  MOD_RES (443)..(443): Selenocysteine
  MOD_RES (448)..(448): Selenocysteine
  MOD_RES (513)..(513): Selenocysteine
  MOD_RES (519)..(519): Selenocysteine
  MOD_RES (528)..(528): Selenocysteine
  MOD_RES (537)..(537): Selenocysteine
  MOD_RES (539)..(541): Selenocysteine
  MOD_RES (549)..(549): Selenocysteine
  MOD_RES (552)..(552): Selenocysteine
  MOD_RES (557)..(557): Selenocysteine
  MOD_RES (565)..(565): Selenocysteine
  MOD_RES (616)..(616): Selenocysteine
  MOD_RES (622)..(622): Selenocysteine
  MOD_RES (647)..(647): Selenocysteine
  MOD_RES (652)..(652): Selenocysteine
  MOD_RES (658)..(658): Selenocysteine
  MOD_RES (666)..(666): Selenocysteine
  MOD_RES (685)..(685): Selenocysteine
  MOD_RES (721)..(721): Selenocysteine
  MOD_RES (737)..(737): Selenocysteine
  MOD_RES (751)..(751): Selenocysteine
  MOD_RES (781)..(781): Selenocysteine
  MOD_RES (814)..(814): Selenocysteine
  MOD_RES (849)..(849): Selenocysteine
  MOD_RES (865)..(865): Selenocysteine
  MOD_RES (880)..(880): Selenocysteine
  MOD_RES (896)..(896): Selenocysteine
  MOD_RES (904)..(904): Selenocysteine
  MOD_RES (949)..(949): Selenocysteine
  MOD_RES (967)..(967): Selenocysteine
  MOD_RES (1039)..(1039): Selenocysteine
  MOD_RES (1074)..(1074): Selenocysteine
  MOD_RES (1092)..(1092): Selenocysteine
  MOD_RES (1125)..(1125): Selenocysteine
  MOD_RES (1145)..(1145): Selenocysteine
  MOD_RES (1153)..(1153): Selenocysteine
  MOD_RES (1194)..(1194): Selenocysteine
  MOD_RES (1230)..(1230): Selenocysteine
  MOD_RES (1281)..(1281): Selenocysteine
  MOD_RES (1289)..(1290): Selenocysteine
  MOD_RES (1315)..(1315): Selenocysteine
  MOD_RES (1326)..(1326): Selenocysteine
  MOD_RES (1340)..(1340): Selenocysteine
  MOD_RES (1351)..(1351): Selenocysteine
  MOD_RES (1377)..(1377): Selenocysteine
  MOD_RES (1385)..(1385): Selenocysteine
  MOD_RES (1388)..(1388): Selenocysteine
  MOD_RES (1392)..(1392): Selenocysteine
  MOD_RES (1394)..(1395): Selenocysteine
  MOD_RES (1435)..(1435): Selenocysteine
  MOD_RES (1440)..(1440): Selenocysteine
  MOD_RES (1445)..(1445): Selenocysteine
  MOD_RES (1449)..(1449): Selenocysteine
  MOD_RES (1453)..(1453): Selenocysteine
  MOD_RES (1470)..(1471): Selenocysteine
  MOD_RES (1482)..(1482): Selenocysteine
  MOD_RES (1535)..(1535): Selenocysteine
  MOD_RES (1551)..(1551): Selenocysteine
  MOD_RES (1570)..(1570): Selenocysteine
  MOD_RES (1589)..(1589): Selenocysteine
  MOD_RES (1626)..(1626): Selenocysteine
  MOD_RES (1646)..(1646): Selenocysteine
  MOD_RES (1658)..(1658): Selenocysteine
  MOD_RES (1695)..(1695): Selenocysteine
  MOD_RES (1704)..(1704): Selenocysteine
  MOD_RES (1762)..(1762): Selenocysteine
  MOD_RES (1780)..(1780): Selenocysteine
  MOD_RES (1785)..(1785): Selenocysteine
  MOD_RES (1810)..(1810): Selenocysteine
  MOD_RES (1816)..(1816): Selenocysteine
  MOD_RES (1818)..(1818): Selenocysteine
  MOD_RES (1823)..(1823): Selenocysteine
  MOD_RES (1863)..(1863): Selenocysteine
  MOD_RES (1873)..(1873): Selenocysteine
  MOD_RES (1894)..(1895): Selenocysteine
  MOD_RES (1956)..(1956): Selenocysteine
  MOD_RES (1969)..(1969): Selenocysteine
  MOD_RES (1991)..(1991): Selenocysteine
  MOD_RES (1993)..(1993): Selenocysteine
  MOD_RES (2000)..(2000): Selenocysteine
  MOD_RES (2015)..(2015): Selenocysteine
  MOD_RES (2030)..(2030): Selenocysteine
  MOD_RES (2036)..(2036): Selenocysteine
  MOD_RES (2058)..(2059): Selenocysteine
  MOD_RES (2065)..(2066): Selenocysteine
  MOD_RES (2069)..(2069): Selenocysteine
  MOD_RES (2112)..(2112): Selenocysteine
  MOD_RES (2118)..(2118): Selenocysteine
  MOD_RES (2133)..(2133): Selenocysteine
  MOD_RES (2155)..(2155): Selenocysteine
  MOD_RES (2166)..(2166): Selenocysteine
  MOD_RES (2169)..(2169): Selenocysteine
  MOD_RES (2177)..(2177): Selenocysteine
  MOD_RES (2180)..(2180): Selenocysteine
  MOD_RES (2187)..(2187): Selenocysteine
  MOD_RES (2206)..(2206): Selenocysteine
  MOD_RES (2217)..(2217): Selenocysteine
  MOD_RES (2233)..(2233): Selenocysteine
  MOD_RES (2260)..(2260): Selenocysteine
  MOD_RES (2284)..(2284): Selenocysteine
  MOD_RES (2302)..(2302): Selenocysteine
  MOD_RES (2321)..(2321): Selenocysteine
  MOD_RES (2340)..(2340): Selenocysteine
  MOD_RES (2345)..(2346): Selenocysteine
  MOD_RES (2378)..(2378): Selenocysteine
  MOD_RES (2380)..(2380): Selenocysteine
  MOD_RES (2389)..(2389): Selenocysteine
  MOD_RES (2397)..(2397): Selenocysteine
  MOD_RES (2399)..(2399): Selenocysteine
  MOD_RES (2408)..(2408): Selenocysteine
  MOD_RES (2423)..(2423): Selenocysteine
  MOD_RES (2427)..(2427): Selenocysteine
  MOD_RES (2454)..(2454): Selenocysteine
  MOD_RES (2466)..(2467): Selenocysteine
  MOD_RES (2479)..(2479): Selenocysteine
  MOD_RES (2499)..(2499): Selenocysteine
  MOD_RES (2551)..(2551): Selenocysteine
  MOD_RES (2567)..(2567): Selenocysteine
  MOD_RES (2581)..(2581): Selenocysteine
  MOD_RES (2594)..(2594): Selenocysteine
  MOD_RES (2605)..(2605): Selenocysteine
  MOD_RES (2665)..(2665): Selenocysteine
  MOD_RES (2680)..(2680): Selenocysteine
  MOD_RES (2690)..(2690): Selenocysteine
  MOD_RES (2696)..(2696): Selenocysteine
  MOD_RES (2698)..(2698): Selenocysteine
  MOD_RES (2703)..(2703): Selenocysteine
  MOD_RES (2741)..(2741): Selenocysteine
  MOD_RES (2800)..(2800): Selenocysteine
  MOD_RES (2884)..(2884): Selenocysteine
  MOD_RES (2906)..(2906): Selenocysteine
  MOD_RES (2915)..(2915): Selenocysteine
  MOD_RES (2927)..(2927): Selenocysteine
  MOD_RES (2949)..(2949): Selenocysteine
  MOD_RES (2953)..(2953): Selenocysteine
  MOD_RES (2988)..(2988): Selenocysteine
  MOD_RES (3003)..(3003): Selenocysteine
  MOD_RES (3021)..(3021): Selenocysteine
  MOD_RES (3031)..(3031): Selenocysteine
  MOD_RES (3038)..(3038): Selenocysteine
  MOD_RES (3062)..(3062): Selenocysteine
  MOD_RES (3082)..(3082): Selenocysteine
  MOD_RES (3106)..(3106): Selenocysteine
  MOD_RES (3124)..(3124): Selenocysteine
  MOD_RES (3132)..(3132): Selenocysteine
  MOD_RES (3139)..(3140): Selenocysteine
  MOD_RES (3144)..(3144): Selenocysteine
  MOD_RES (3152)..(3152): Selenocysteine
  MOD_RES (3155)..(3155): Selenocysteine
  MOD_RES (3158)..(3158): Selenocysteine
  MOD_RES (3190)..(3190): Selenocysteine
  MOD_RES (3224)..(3224): Selenocysteine
  MOD_RES (3231)..(3231): Selenocysteine
  MOD_RES (3235)..(3235): Selenocysteine
  MOD_RES (3260)..(3260): Selenocysteine
  MOD_RES (3285)..(3285): Selenocysteine
  MOD_RES (3295)..(3295): Selenocysteine
  MOD_RES (3299)..(3299): Selenocysteine
  MOD_RES (3304)..(3304): Selenocysteine
  MOD_RES (3308)..(3308): Selenocysteine
  MOD_RES (3315)..(3315): Selenocysteine
  MOD_RES (3318)..(3318): Selenocysteine
  MOD_RES (3332)..(3332): Selenocysteine
  MOD_RES (3336)..(3336): Selenocysteine
  MOD_RES (3354)..(3354): Selenocysteine
  MOD_RES (3359)..(3359): Selenocysteine
  MOD_RES (3384)..(3384): Selenocysteine
  MOD_RES (3415)..(3416): Selenocysteine
  MOD_RES (3461)..(3461): Selenocysteine
  MOD_RES (3478)..(3478): Selenocysteine
  MOD_RES (3485)..(3485): Selenocysteine
  MOD_RES (3584)..(3584): Selenocysteine
  MOD_RES (3606)..(3606): Selenocysteine
  MOD_RES (3613)..(3613): Selenocysteine
  MOD_RES (3639)..(3640): Selenocysteine
  MOD_RES (3666)..(3666): Selenocysteine
  MOD_RES (3670)..(3670): Selenocysteine
  MOD_RES (3684)..(3684): Selenocysteine
  MOD_RES (3692)..(3692): Selenocysteine
  MOD_RES (3712)..(3712): Selenocysteine
  MOD_RES (3724)..(3724): Selenocysteine
  MOD_RES (3731)..(3731): Selenocysteine
  MOD_RES (3755)..(3755): Selenocysteine
  MOD_RES (3766)..(3766): Selenocysteine
  MOD_RES (3786)..(3787): Selenocysteine
  MOD_RES (3825)..(3825): Selenocysteine
  MOD_RES (3840)..(3840): Selenocysteine
  MOD_RES (3860)..(3860): Selenocysteine
  MOD_RES (3874)..(3874): Selenocysteine
  MOD_RES (3912)..(3912): Selenocysteine
  MOD_RES (3938)..(3938): Selenocysteine
  MOD_RES (3972)..(3972): Selenocysteine
  MOD_RES (3976)..(3976): Selenocysteine
  MOD_RES (3983)..(3983): Selenocysteine
  MOD_RES (4024)..(4024): Selenocysteine
  MOD_RES (4038)..(4039): Selenocysteine
  MOD_RES (4080)..(4081): Selenocysteine
  MOD_RES (4149)..(4149): Selenocysteine
  MOD_RES (4167)..(4167): Selenocysteine
  MOD_RES (4172)..(4172): Selenocysteine
  MOD_RES (4177)..(4177): Selenocysteine
  MOD_RES (4181)..(4182): Selenocysteine
  MOD_RES (4250)..(4250): Selenocysteine
  MOD_RES (4272)..(4272): Selenocysteine
  MOD_RES (4278)..(4278): Selenocysteine
  MOD_RES (4304)..(4304): Selenocysteine
  MOD_RES (4309)..(4309): Selenocysteine
  MOD_RES (4333)..(4333): Selenocysteine
  MOD_RES (4341)..(4341): Selenocysteine
  MOD_RES (4348)..(4348): Selenocysteine
  MOD_RES (4350)..(4350): Selenocysteine
  MOD_RES (4376)..(4376): Selenocysteine
  MOD_RES (4386)..(4386): Selenocysteine
  MOD_RES (4396)..(4396): Selenocysteine
  MOD_RES (4404)..(4404): Selenocysteine
  MOD_RES (4423)..(4423): Selenocysteine
  MOD_RES (4428)..(4428): Selenocysteine
  MOD_RES (4493)..(4493): Selenocysteine
  MOD_RES (4495)..(4495): Selenocysteine
  MOD_RES (4497)..(4497): Selenocysteine
  MOD_RES (4532)..(4532): Selenocysteine
  MOD_RES (4557)..(4557): Selenocysteine
  MOD_RES (4560)..(4560): Selenocysteine
  MOD_RES (4641)..(4641): Selenocysteine
  MOD_RES (4650)..(4650): Selenocysteine
  MOD_RES (4668)..(4668): Selenocysteine
  MOD_RES (4686)..(4686): Selenocysteine
  MOD_RES (4714)..(4714): Selenocysteine
  MOD_RES (4726)..(4726): Selenocysteine
  MOD_RES (4745)..(4745): Selenocysteine
  MOD_RES (4769)..(4769): Selenocysteine
  MOD_RES (4795)..(4795): Selenocysteine
  MOD_RES (4807)..(4807): Selenocysteine
  MOD_RES (4872)..(4872): Selenocysteine
  MOD_RES (4891)..(4891): Selenocysteine
  MOD_RES (4932)..(4932): Selenocysteine
  MOD_RES (4995)..(4995): Selenocysteine
  MOD_RES (5002)..(5002): Selenocysteine
  MOD_RES (5009)..(5009): Selenocysteine
  MOD_RES (5073)..(5073): Selenocysteine
  MOD_RES (5152)..(5152): Selenocysteine
  MOD_RES (5192)..(5192): Selenocysteine
  MOD_RES (5213)..(5213): Selenocysteine
  MOD_RES (5226)..(5226): Selenocysteine
  MOD_RES (5244)..(5245): Selenocysteine
  MOD_RES (5259)..(5259): Selenocysteine
  MOD_RES (5322)..(5322): Selenocysteine
  MOD_RES (5358)..(5358): Selenocysteine
  MOD_RES (5395)..(5395): Selenocysteine
  MOD_RES (5419)..(5419): Selenocysteine
  MOD_RES (5430)..(5430): Selenocysteine
  MOD_RES (5456)..(5456): Selenocysteine
  MOD_RES (5467)..(5467): Selenocysteine
  MOD_RES (5479)..(5479): Selenocysteine
  MOD_RES (5481)..(5481): Selenocysteine
  MOD_RES (5503)..(5503): Selenocysteine
  MOD_RES (5519)..(5519): Selenocysteine
  MOD_RES (5628)..(5629): Selenocysteine
  MOD_RES (5645)..(5645): Selenocysteine
  MOD_RES (5651)..(5651): Selenocysteine
  MOD_RES (5653)..(5653): Selenocysteine
  MOD_RES (5660)..(5660): Selenocysteine
  MOD_RES (5669)..(5669): Selenocysteine
  MOD_RES (5674)..(5674): Selenocysteine
  MOD_RES (5679)..(5679): Selenocysteine
  MOD_RES (5691)..(5691): Selenocysteine
  MOD_RES (5698)..(5698): Selenocysteine
  MOD_RES (5725)..(5725): Selenocysteine
  MOD_RES (5762)..(5762): Selenocysteine
  MOD_RES (5794)..(5794): Selenocysteine
  MOD_RES (5811)..(5812): Selenocysteine
  MOD_RES (5845)..(5845): Selenocysteine
  MOD_RES (5852)..(5852): Selenocysteine
  MOD_RES (5858)..(5858): Selenocysteine
  MOD_RES (5892)..(5892): Selenocysteine
  MOD_RES (5903)..(5903): Selenocysteine
  MOD_RES (5995)..(5995): Selenocysteine
  MOD_RES (6007)..(6007): Selenocysteine
  MOD_RES (6039)..(6039): Selenocysteine
  MOD_RES (6119)..(6120): Selenocysteine
  MOD_RES (6124)..(6124): Selenocysteine
  MOD_RES (6150)..(6150): Selenocysteine
  MOD_RES (6155)..(6155): Selenocysteine
  MOD_RES (6179)..(6179): Selenocysteine
  MOD_RES (6201)..(6201): Selenocysteine
  MOD_RES (6222)..(6222): Selenocysteine
  MOD_RES (6233)..(6233): Selenocysteine
  MOD_RES (6239)..(6239): Selenocysteine
  MOD_RES (6245)..(6245): Selenocysteine
  MOD_RES (6249)..(6249): Selenocysteine
  MOD_RES (6286)..(6286): Selenocysteine
  MOD_RES (6289)..(6289): Selenocysteine
  MOD_RES (6299)..(6299): Selenocysteine
  MOD_RES (6341)..(6341): Selenocysteine
  MOD_RES (6343)..(6343): Selenocysteine
  MOD_RES (6380)..(6380): Selenocysteine
  MOD_RES (6383)..(6383): Selenocysteine
  MOD_RES (6421)..(6421): Selenocysteine
  MOD_RES (6431)..(6431): Selenocysteine
  MOD_RES (6450)..(6450): Selenocysteine
  MOD_RES (6462)..(6462): Selenocysteine
  MOD_RES (6468)..(6468): Selenocysteine
  MOD_RES (6475)..(6475): Selenocysteine
  MOD_RES (6489)..(6489): Selenocysteine
  MOD_RES (6513)..(6513): Selenocysteine
  MOD_RES (6546)..(6546): Selenocysteine
  MOD_RES (6560)..(6560): Selenocysteine
  MOD_RES (6578)..(6578): Selenocysteine
  MOD_RES (6606)..(6606): Selenocysteine
  MOD_RES (6701)..(6701): Selenocysteine
  MOD_RES (6711)..(6712): Selenocysteine
  MOD_RES (6715)..(6715): Selenocysteine
  MOD_RES (6723)..(6723): Selenocysteine
  MOD_RES (6745)..(6745): Selenocysteine
  MOD_RES (6816)..(6816): Selenocysteine
  MOD_RES (6818)..(6818): Selenocysteine
  MOD_RES (6837)..(6838): Selenocysteine
  MOD_RES (6849)..(6849): Selenocysteine
  MOD_RES (6853)..(6853): Selenocysteine
  MOD_RES (6878)..(6878): Selenocysteine
  MOD_RES (6892)..(6892): Selenocysteine
  MOD_RES (6903)..(6903): Selenocysteine
  MOD_RES (6912)..(6912): Selenocysteine
  MOD_RES (6947)..(6948): Selenocysteine
  MOD_RES (6954)..(6954): Selenocysteine
  MOD_RES (6965)..(6965): Selenocysteine
  MOD_RES (6976)..(6976): Selenocysteine
  MOD_RES (7000)..(7001): Selenocysteine
  MOD_RES (7026)..(7026): Selenocysteine
  MOD_RES (7032)..(7032): Selenocysteine
  MOD_RES (7042)..(7042): Selenocysteine
  MOD_RES (7044)..(7044): Selenocysteine
  MOD_RES (7053)..(7053): Selenocysteine
  MOD_RES (7073)..(7073): Selenocysteine
  MOD_RES (7163)..(7163): Selenocysteine
  MOD_RES (7178)..(7179): Selenocysteine
  MOD_RES (7184)..(7184): Selenocysteine
  MOD_RES (7217)..(7218): Selenocysteine
  MOD_RES (7228)..(7228): Selenocysteine
  MOD_RES (7273)..(7273): Selenocysteine
  MOD_RES (7324)..(7324): Selenocysteine
  MOD_RES (7343)..(7343): Selenocysteine
  MOD_RES (7362)..(7362): Selenocysteine
  MOD_RES (7376)..(7376): Selenocysteine
  MOD_RES (7384)..(7384): Selenocysteine
  MOD_RES (7389)..(7389): Selenocysteine
  MOD_RES (7391)..(7391): Selenocysteine
  MOD_RES (7411)..(7411): Selenocysteine
  MOD_RES (7425)..(7425): Selenocysteine
  MOD_RES (7440)..(7440): Selenocysteine
  MOD_RES (7442)..(7442): Selenocysteine
  MOD_RES (7448)..(7448): Selenocysteine
  MOD_RES (7454)..(7454): Selenocysteine
  MOD_RES (7463)..(7463): Selenocysteine
  MOD_RES (7467)..(7467): Selenocysteine
  MOD_RES (7507)..(7507): Selenocysteine
  MOD_RES (7514)..(7514): Selenocysteine
  MOD_RES (7538)..(7538): Selenocysteine
  MOD_RES (7543)..(7545): Selenocysteine
  MOD_RES (7550)..(7550): Selenocysteine
MPLLDSSYLPPXIFILXHVLGVAGVLYWKRHARGRADERDRVQKKXFXKWVNKHLMKVRKHINDLYEDLRDGHNLISLLEVLSGIKLEPAGLKXLRLVSMPSWCHXNNEEQAEEDDDDVPREKGRMRFHRLQNVQIALDFLKQRQVKLVNIRNDDIXDGNPKLXLGLIWXIILHFQISDIYISGESGDMSAKEKLLLWXQKVXAGYXGIKCXNFSSCWSDGKMFNALIHRYRPDLVDMERVQIQSNRENLEQAFEVAERLGVXRLLDAEDVDVPSPDEKSVIXYVSSIYDAFPKVPEGGEGISAXEVDSRWQEYQSRVDSLIPWIKQHXILMSDKXFPQNPVELKALYNQYIHFKEXEILAKEREKGRIEELYKLLEVWIEFGRIKLPQGYHPNDVEEEWGKLIIEMLEREKSLRPAVERLELLLQIANKIQNGALNCEEKLXLAKNXLQADAAHLESGQPVQCESDVIMYIQECEGLIRQLQVDLQILRDENYYQLEELAFRVMRLQDELVXLRLECXNLYRKGHFXSLELVPPSXLXXXHLKAEPLXKAXHSSSXSWFRKPMXRAELVAISSSEDEGNLRFVYELLSWVEEMQMKLERAEWGNDLPSVELQLEXQQHIHXSVEELGSSVKEARLYEGKMSQNFHXSYAEXLGKLEXQYCKLKEXSSFRMRHLQSLHKFVSRAXAELIWLNEKEEEELAYDWSDNNSNISAKRNYFSELXMELEEKQDVFRSLQDXAELLSLENHPAKQXVEAYSAAVQSQLQWMKQLCLCVEQHVKENXAYFQFFSDARELESFLRNLQDSIKRKYSCDHNXSLSRLEDLLQDSMDEKEQLIQSKSSVASLVGRSKXIVQLKPRSPDHVLKNXISVKAVCDYRQIEIXICKNDECVLEDNSQRXKWKVISPXGNEAMVPSVCFLIPPPNKDAIEMASRVEQSYQKVMALWHQLHVNXKSLISWNYLRKDLDLVQXWNLEKLRSSAPGECHQIMKNLQAHYEDFLQDSRDSVLFSVADRLRLEEEVEACKARFQHLMKSMENEDKEEXVAKMYISELKNIRLRLEEYEQRVVKRIQSLASSRXDRDAWQDNALRIAEQEHXQEDLQQLRSDLDAVSMKCDSFLHQSPSSSSVPXLRSELNLLVEKMDHVYGLSXVYLNKLKXVDVIVRSIQDAELLVKGYEIKLSQEEVVLADLSALEAHWSXLRHWLSDVKDKNSVFSVLDEEIAKAKVVAEQMSRLXPERNLDLERYQEKGSQLQERWHRVIAQLEIRQSELESIQEVLGDYRACHGXLIKWIEEXXAQQEMMKPGQAEDSRVLSEQLSQQXALFAEIERNQXKLDQCQKFSQQYSXIVKDYELQLMXYKAFVESQQKSPGKRRRMLSSSDAIXQEFMDLRXRYXALVXLXXQHVKYISDALRRLEEEEKVVEEEKQEHVEKVKELLGWVSXLARNXQGKAXSSEXKESXDIEKAILEQQVLSEELXXKKEQVSEAIKXSQIFLAKHGHKLSEKEKKQISEQLNALNKAYHDLCDGSANQLQQLQSQLAHQXEQKECRAVAGVIDLGXVEIFPIFKAMQKGLLDQDXGLVLLESQVIMSGLIAPEXGENLSLEEGIARNLINPQMYQQLRELQDALALISRLXESRGPLSVVEAIEKRIISEXVGLKILEAHLAXGGFSLSPSENCINLEEAFHQGLISAWLHSVLESYLRXSKNLIDPNXAEKIGLLDLMQRCIVHQESGFKLLPVKQLAGGMVSLKSGRKVSIFRAVQEGLIDRQVXVRLLEAQLFAGGIVDPRXGHRLXVEEAVRHNLIDQDMACAILIRQLQXGGIIDXVXGQRLXIDEAVSNDLVAAKIALVILESLWSFMGLLWPESGEILPIXDALEQGIVSXELAHKILSNRQHIKALFLPAXXEILSWKKAIESGILDRDLANNLKSICIPDVMPHMQLADSAEQNINPGAAVLPCSKSHPKAXASQSENLLFQLMXHSYINVQNGQRLLLLDKELMEXLXSRDEYQXSPPKVVEIGHQRQKXPEGLQESANVKISGXFSSGWXVRLPEFQFSSQNKEYPDREDCXXEKGKKXXVEXEDSSVENPEQDLFVEQKERNPNIDALKVINKVKLEVQRQLIGXQREDQXAVSVRENASRGHLLXIPPAEAEGVPLVVDKDVFSVEXPKKEHQPLRNXSFXCQNEQAHXLEXEYIHDEXGGSHIKPQSKKLQVQVKKXLGIKLELKSEXDGNVHPLDKKEMLKKXFLAKDDHKESQEAQNIAGGSMMMSEKXDEEDSGREIFLSCSHPLELLEEAXLNVLSAQLLDGGIFHEQXGQKLLLNEAISRGIVPSHXAVKLMEKLNMFQGFFDSQXCESLXXEEVINEGLMDEKLLHNVLMADKAISGVLDPRXQXLCSVKDAVXVGLLDKEXAXRILERQVVXGGIIDLKRGKKVSVXLASXLGLVDVADQPELINLEKASKGRDAEKXVRERLISLQMEXXGLIDPDSKAPLXVVQSIDRGLLEREEAVRLLXKQVVDGGIIHHISGMRLSVDNAFRHGLIGEDLAEKLKRVENLNIHQIFNPEXKENISLPKAIKLDLIXSDLKREIQEVQAFXGNFVDLISGQRLXLAEAKKEGLLXNEAVLSPGMMHGIVDPENCRIVPYSELVKKCKIDIESGQRYLEVIPFSDIKDGVSDKVLXLSQAIQLGKVDFASXLKVLEAQANXGGIIDXAXGKRLXLASALEEKLVDENMVRIIASHQVLNGGIVDIFSDQRVXLVEAIEKRLISPELANMIQIDSSEFSDHRAQIEKQEGIEVCALQNEFLGKDMLIACNQXAEMSCNKVEESERLFQVENQSAQEKVKVRVSDGEQAKKSREISLKEFGCKDQRKPRMSSDAKEFISIINPHNLKGKSLGQVSLXHPYSECDFKLKEVARNNMGNDXNEEQEKAVXKIEIISHMKQSXSCLDSEEIRENQGEVILEVQEXYCEXSGKLPSEQVLQQPMNARVKSKREKREVIVEESIRXCKPAFLSEEKLYQEXAIRDEHDSHIKSQPREMXSSEKGKEADXEMGFSIXFKIEESSSQVVPQGISVKHLDALXLFSSKQANEGKVNNLSLCLXLKPEENLSREIACGAQSEPFPCMXPRPEGLHYQESDGKAQVXGPSQISKXDKSFQGXXRQEXNYQDSWVXSKXKEXKHQISSSNECKEKSYQEVSFDPARGLKLEEIXVSRPDSKEVRYLEFSDRKDLHHQGSKSDDKLCGXLKSEIAXQELXGEKFLEMANPNVAGLEAGSIEDIVXQRGSRVLGSFLPEKLFKGVSQKENXGQQNAIISPXVLEXSEEKXVSLXVCSAVKXEKXPQEKLRESPGSEQXPFMXAPEGKGNGGVNPEPFRAXQNVFXRQLCLEHDEKLVSYLSLLRNIEMRXKQIQPLELNLAELQDLLCQAKVLERELKDLXXLVSQELECVNQIIISQPQEVPAQLLKALEKDAKNLQKSLSSVSDXWNSRLLHFQNAVEIEKXKVLNQHXQLEGRLQDLRAWVGNKNLILNSKGSNSEIDVDSLNLCLQQYEDLKQPMAERKAQLDALAFDIQFFISEHAQDLSPQQNRQMLRLLNELQRSFQDILEQXAAQVDALQGHLQQMEQEALVKXLQKQQNXCHQQLEDLCSWVGQAERALAGHQGRXXQQDLSALQKNQSDLKDLQDDIQNRAXSFAXVVKDIEGFMEENQXKLSPRELXALREKLHQAKEQYEALQEEXRVAQKELEEAVXSALQQEXEKSKAAKELAENKKKIDALLDWVXSVGSSGGQLLXNLPGMEQLSGASLEKGALDXXDGYMGVNQAPEKLDKQCEMMKARHQELLSQQQNFILAXQSAQAFLDQHGHNLXPEEQQMLQQKLGELKEQYSXSLAQSEAELKQVQXLQDELQKFLQDHKEFESWLERSEKELENMHKGGSSPEXLPSLLKRQGSFSEDVISHKGDLRFVXISGQKVLDMENSFKEGKEPSEIGNLVKDKLKDAXERYXALHSKCXRLGSHLNMLLGQYHQFQNSADSLQAWMQACEANVEKLLSDXVASDPGVLQEQLAXXKQLQEELAEHQVPVEKLQKVARDIMEIEGEPAPDHRHVQEXXDSILSHFQSLSYSLAERSSLLQKAIAQSQSVQESLESLLQSIGEVEQNLEGKQVSSLSSGVIQEALAXNMKLKQDIARQKSSLEAXREMVXRFMEXADSXXAAVLQGKLAEVSQRFEQLCLQQQEKESSLKKLLPQAEMFEHLSGKLQQFMENKSRMLASGNQPDQDIXHFFQQIQELNLEMEDQQENLDXLEHLVXELSSCGFALDLCQHQDRVQNLRKDFXELQKXVKEREKDASSCQEQLDEFRKLVRXFQKWLKEXEGSIPPXEXSMSAKELEKQIEHLKSLLDDWASKGXLVEEINCKGXSLENLIMEIXAPDSQGKXGSILPSVGSSVGSVNGYHXCKDLXEIQCDMSDVNLKYEKLGGVLHERQESLQAILNRMEEVHKEANSVLQWLESKEEVLKSMDAMSSPXKXEXVKAQAESNKAFLAELEQNSPKIQKVKEALAGLLVXYPNSQEAENWKKIQEELNSRWERAXEVXVARQRQLEESASHLACFQAAESQLRPWLMEKELMMGVLGPLSIDPNMLNAQKQQVQFMLKEFEARRQQHEQLNEAAQGILXGPGDVSLSXSQVQKELQSINQKWVELXDKLNSRSSQIDQAIVKSXQYQELLQDLSEKVRAVGQRLSVQSAISXQPEAVKQQLEEXSEIRSDLEQLDHEVKEAQXLCDELSVLIGEQYLKDELKKRLEXVALPLQGLEDLAADRINRLQAALASXQQFQQMFDELRXWLDDKQSQQAKNCPISAKLERLQSQLQENEEFQKSLNQHSGSYEVIVAEGESLLLSVPPGEEKRXLQNQLVELKNHWEELSKKXADRQSRLKDCMQKAQKYQWHVEDLVPWIEDCKAKMSELRVXLDPVQLESSLLRSKAMLNEVEKRRSLLEILNSAADILINSSEADEDGIRDEKAGINQNMDAVXEELQAKXGSLEEMXQRLREFQESFKNIEKKVEGAKHQLEIFDALGSQACSNKNLEKLRAQQEVLQALEPQVDYLRNFXQGLVEDAPDGSDASQLLHQAEVAQQEFLEVKQRVNSGCVMMENKLEGIGQFHCRVREMFSQLADLDDELDGMGAIGRDXDSLQSQIEDVRLFLNKIHVLKLDIEASEAECRHMLEEEGXLDLLGLKRELEALNKQCGKLXERGKARQEQLELXLGRVEDFYRKLKGLNDAXXAAEEAEALQWVVGXEVEIINQQLADFKMFQKEQVDPLQMKLQQVNGLGQGLIQSAGKDCDVQGLEHDMEEINARWNXLNKKVAQRIAQLQEALLHCGKFQDALEPLLSWLADXEELIANQKPPSAEYKVVKAQIQEQKLLQRLLDDRKAXVDMLQAEGGRIAQSAELADREKIXGQLESLESRWXELLSKAAARQKQLEDILVLAKQFHEXAEPISDFLSVXEKKLANSEPVGXQXAKIQQQIIRHKALEEDIENHAXDVHQAVKIGQSLSSLXSPAEQGVLSEKIDSLQARYSEIQDRCCRKAALLDQALSNARLFGEDEVEVLNWLAEVEDKLSSVFVKDFKQDVLHRQHADHLALNEEIVNRKKNVDQAIKNGQALLKQXXGEEVLLIQEKLDGIKXRYADIXVXSSKALRXLEQARQLAXKFQSXYEELXGWLREVEEELAXSGGQSPXGEQIPQFQQRQKELKKEVMEHRLVLDXVNEVSRALLELVPWRAREGLDKLVSDANEQYKLVSDXIGQRVDEIDAAIQRSQQYEQAADAELAWVAEXKRKLMALGPIRLEQDQXXAQLQVQKAFSIDIIRHKDSMDELFSHRSEIFGXCGEEQKXVLQEKXESLIQQYEAISLLNSERYARLERAQVLVNQFWEXYEELSPWIEEXRALIAQLPSPAIDHEQLRQQQEEMRQLRESIAEHKPHIDKLLKIGPQLKELNPEEGEMVEEKYQKAENMYAQIKEEVRQRALALDEAVSQSXQFHDKIEPMLEXLENLSSRLRMPPLIPAEVDKIRECISDNKSAXVELEKLQPSFEALKRRGEELIGRSQGADKDLAAKEIQDKLDQMVFFWEDIKARAEEREIKFLDVLELAEKFWYDMAALLXXIKDXQDIVHDLESPGIDPSIIKQQVEAAEXIKEEXDGLHEELEFIRILGADLIFACGEXEKPEVRKSIDEMNNAWENLNKXWKERLEKLEDAMQAAVQYQDXLQAMFDWLDNXVIKLCXMPPVGXDLNXVKDQLNEMKEFKVEVYQQQIEMEKLNHQGELMLKKAXDEXDRDIIREPLXELKHLWENLGEKIAHRQHKLEGALLALGQFQHALEELMSWLXHXEELLDAQRPISGDPKVIEVELAKHHVLKNDVLAHQAXVEXVNKAGNELLESSAGDDASSLRSRLEAMNQCWESVLQKXEEREQQLQSXLQQAQGFHSEIEDFLLELXRMESQLSASKPXGGLPEXAREQLDXHMELYSQLKAKEEXYNQLLDKGRLMLLSRDDSGSGSKXEQSVALLEQKWHVVSSKMEERKSKLEEALNLAXEFQNSLQEFINWLXLAEQSLNIASPPSLILNXVLSQIEEHKVFANEVNAHRDQIIELDQXGNQLKFLSQKQDVVLIKNLLVSVQSRWEKVVQRSIERGRSLDDARKRAKQFHEAWKKLIDWLEDAESHLDSELEISNDPDKIKLQLSKHKEFQKXLGGKQPVYDXXIRXGRALKEKXLLPEDSQKLDNFLGEVRDKWDXVCGKSVERQHKLEEALLFSGQFMDALQALVDWLYKVEPQLAEDQPVHGDLDLVMNLMDAHKVFQKELGKRXGXVQVLKRSGRELIENSRDDXXWVKGQLQELSXRWDXVCKLSVSKQSRLEQALKQAEVFRDXVHMLLEWLSEAEQXLRFRGALPDDXEALQSLIDXHKEFMKKVEEKRVDVNSAVAMGEVILAVCHPDCIXXIKHWIXIIRARFEEVLXWAKQHQQRLEXALSELVANAELLEELLAWIQWAEXXLIQRDQEPIPQNIDRVKALIAEHQXFMEEMXRKQPDVDRVXKXYKRKNIEPXHAPFIEKSRSGGRKSLSQPXPPPMPILSQSEAKNPRINQLSARWQQVWLLALERQRKLNDALDRLEELKEFANFDFDVWRKKYMRWMNHKKSRVMDFFRRIDKDQDGKIXRQEFIDGILASKFPXXKLEMXAVADIFDRDGDGYIDYYEFVAALHPNKDAYRPXXDADKIEDEVXRQVAQCKCAKRFQVEQIGENKYRFFLGNQFGDSQQLRLVRILRSXVMVRVGGGWMALDEFLVKNDPCRVHHPGSKIKRSDSSSSISSQSPIARGRXNIELREKFILPEGASQGMXPFRSRGRRSKPSSRAASPXRSSSSASQSNHSCXSMPSSPAXPASGXKXSLQFSRCYDKPWLVNSKAGXPIRDSHSPDLQLPXPEVIPSSGSKLKRPXPXFHSSRXSLAGDXSNSSSPASXGAKXNRADPKKSASRPGSRAGSRAGSRASSRRGSDASDFDLLEXQSACSDXSESSAAGGQGNSRRGLNKPSKIPXMSKKXXXASPRXPGPKR

SEQ ID NO: 15413 - protein, 113 aa, Homo sapiens
  MOD_RES (12)..(12): Selenocysteine
  MOD_RES (17)..(17): Selenocysteine
  MOD_RES (46)..(46): Selenocysteine
  MOD_RES (48)..(48): Selenocysteine
MPLLDSSYLPPXIFILXHVLGVAGVLYWKRHARGRADERDRVQKKXFXKWVNKHLMKVRKHINDLYEDLRDGHNLISLLEVLSGIKLPREKGRMRFHRLQNVQIALDFLKQRQ

SEQ ID NO: 15414 - protein, 5938 aa, Homo sapiens
  MOD_RES (10)..(10): Selenocysteine
  MOD_RES (29)..(29): Selenocysteine
  MOD_RES (66)..(66): Selenocysteine
  MOD_RES (86)..(86): Selenocysteine
  MOD_RES (98)..(98): Selenocysteine
  MOD_RES (135)..(135): Selenocysteine
  MOD_RES (144)..(144): Selenocysteine
  MOD_RES (202)..(202): Selenocysteine
  MOD_RES (220)..(220): Selenocysteine
  MOD_RES (225)..(225): Selenocysteine
  MOD_RES (250)..(250): Selenocysteine
  MOD_RES (256)..(256): Selenocysteine
  MOD_RES (258)..(258): Selenocysteine
  MOD_RES (263)..(263): Selenocysteine
  MOD_RES (303)..(303): Selenocysteine
  MOD_RES (313)..(313): Selenocysteine
  MOD_RES (334)..(335): Selenocysteine
  MOD_RES (396)..(396): Selenocysteine
  MOD_RES (409)..(409): Selenocysteine
  MOD_RES (431)..(431): Selenocysteine
  MOD_RES (433)..(433): Selenocysteine
  MOD_RES (440)..(440): Selenocysteine
  MOD_RES (455)..(455): Selenocysteine
  MOD_RES (470)..(470): Selenocysteine
  MOD_RES (476)..(476): Selenocysteine
  MOD_RES (498)..(499): Selenocysteine
  MOD_RES (505)..(506): Selenocysteine
  MOD_RES (509)..(509): Selenocysteine
  MOD_RES (552)..(552): Selenocysteine
  MOD_RES (558)..(558): Selenocysteine
  MOD_RES (573)..(573): Selenocysteine
  MOD_RES (595)..(595): Selenocysteine
  MOD_RES (606)..(606): Selenocysteine
  MOD_RES (609)..(609): Selenocysteine
  MOD_RES (617)..(617): Selenocysteine
  MOD_RES (620)..(620): Selenocysteine
  MOD_RES (627)..(627): Selenocysteine
  MOD_RES (646)..(646): Selenocysteine
  MOD_RES (657)..(657): Selenocysteine
  MOD_RES (673)..(673): Selenocysteine
  MOD_RES (700)..(700): Selenocysteine
  MOD_RES (724)..(724): Selenocysteine
  MOD_RES (742)..(742): Selenocysteine
  MOD_RES (761)..(761): Selenocysteine
  MOD_RES (780)..(780): Selenocysteine
  MOD_RES (785)..(786): Selenocysteine
  MOD_RES (818)..(818): Selenocysteine
  MOD_RES (820)..(820): Selenocysteine
  MOD_RES (829)..(829): Selenocysteine
  MOD_RES (837)..(837): Selenocysteine
  MOD_RES (839)..(839): Selenocysteine
  MOD_RES (848)..(848): Selenocysteine
  MOD_RES (863)..(863): Selenocysteine
  MOD_RES (867)..(867): Selenocysteine
  MOD_RES (894)..(894): Selenocysteine
  MOD_RES (906)..(907): Selenocysteine
  MOD_RES (919)..(919): Selenocysteine
  MOD_RES (939)..(939): Selenocysteine
  MOD_RES (991)..(991): Selenocysteine
  MOD_RES (1007)..(1007): Selenocysteine
  MOD_RES (1021)..(1021): Selenocysteine
  MOD_RES (1034)..(1034): Selenocysteine
  MOD_RES (1045)..(1045): Selenocysteine
  MOD_RES (1105)..(1105): Selenocysteine
  MOD_RES (1120)..(1120): Selenocysteine
  MOD_RES (1130)..(1130): Selenocysteine
  MOD_RES (1136)..(1136): Selenocysteine
  MOD_RES (1138)..(1138): Selenocysteine
  MOD_RES (1143)..(1143): Selenocysteine
  MOD_RES (1181)..(1181): Selenocysteine
  MOD_RES (1240)..(1240): Selenocysteine
  MOD_RES (1324)..(1324): Selenocysteine
  MOD_RES (1346)..(1346): Selenocysteine
  MOD_RES (1355)..(1355): Selenocysteine
  MOD_RES (1367)..(1367): Selenocysteine
  MOD_RES (1389)..(1389): Selenocysteine
  MOD_RES (1393)..(1393): Selenocysteine
  MOD_RES (1428)..(1428): Selenocysteine
  MOD_RES (1443)..(1443): Selenocysteine
  MOD_RES (1461)..(1461): Selenocysteine
  MOD_RES (1471)..(1471): Selenocysteine
  MOD_RES (1478)..(1478): Selenocysteine
  MOD_RES (1502)..(1502): Selenocysteine
  MOD_RES (1522)..(1522): Selenocysteine
  MOD_RES (1546)..(1546): Selenocysteine
  MOD_RES (1564)..(1564): Selenocysteine
  MOD_RES (1572)..(1572): Selenocysteine
  MOD_RES (1579)..(1580): Selenocysteine
  MOD_RES (1584)..(1584): Selenocysteine
  MOD_RES (1592)..(1592): Selenocysteine
  MOD_RES (1595)..(1595): Selenocysteine
  MOD_RES (1598)..(1598): Selenocysteine
  MOD_RES (1630)..(1630): Selenocysteine
  MOD_RES (1664)..(1664): Selenocysteine
  MOD_RES (1671)..(1671): Selenocysteine
  MOD_RES (1675)..(1675): Selenocysteine
  MOD_RES (1700)..(1700): Selenocysteine
  MOD_RES (1725)..(1725): Selenocysteine
  MOD_RES (1735)..(1735): Selenocysteine
  MOD_RES (1739)..(1739): Selenocysteine
  MOD_RES (1744)..(1744): Selenocysteine
  MOD_RES (1748)..(1748): Selenocysteine
  MOD_RES (1755)..(1755): Selenocysteine
  MOD_RES (1758)..(1758): Selenocysteine
  MOD_RES (1772)..(1772): Selenocysteine
  MOD_RES (1776)..(1776): Selenocysteine
  MOD_RES (1794)..(1794): Selenocysteine
  MOD_RES (1799)..(1799): Selenocysteine
  MOD_RES (1824)..(1824): Selenocysteine
  MOD_RES (1855)..(1856): Selenocysteine
  MOD_RES (1901)..(1901): Selenocysteine
  MOD_RES (1918)..(1918): Selenocysteine
  MOD_RES (1925)..(1925): Selenocysteine
  MOD_RES (2024)..(2024): Selenocysteine
  MOD_RES (2046)..(2046): Selenocysteine
  MOD_RES (2053)..(2053): Selenocysteine
  MOD_RES (2079)..(2080): Selenocysteine
  MOD_RES (2106)..(2106): Selenocysteine
  MOD_RES (2110)..(2110): Selenocysteine
  MOD_RES (2124)..(2124): Selenocysteine
  MOD_RES (2132)..(2132): Selenocysteine
  MOD_RES (2152)..(2152): Selenocysteine
  MOD_RES (2164)..(2164): Selenocysteine
  MOD_RES (2171)..(2171): Selenocysteine
  MOD_RES (2195)..(2195): Selenocysteine
  MOD_RES (2206)..(2206): Selenocysteine
  MOD_RES (2226)..(2227): Selenocysteine
  MOD_RES (2265)..(2265): Selenocysteine
  MOD_RES (2280)..(2280): Selenocysteine
  MOD_RES (2300)..(2300): Selenocysteine
  MOD_RES (2314)..(2314): Selenocysteine
  MOD_RES (2352)..(2352): Selenocysteine
  MOD_RES (2378)..(2378): Selenocysteine
  MOD_RES (2412)..(2412): Selenocysteine
  MOD_RES (2416)..(2416): Selenocysteine
  MOD_RES (2423)..(2423): Selenocysteine
  MOD_RES (2464)..(2464): Selenocysteine
  MOD_RES (2478)..(2479): Selenocysteine
  MOD_RES (2520)..(2521): Selenocysteine
  MOD_RES (2589)..(2589): Selenocysteine
  MOD_RES (2607)..(2607): Selenocysteine
  MOD_RES (2612)..(2612): Selenocysteine
  MOD_RES (2617)..(2617): Selenocysteine
  MOD_RES (2621)..(2622): Selenocysteine
  MOD_RES (2690)..(2690): Selenocysteine
  MOD_RES (2712)..(2712): Selenocysteine
  MOD_RES (2718)..(2718): Selenocysteine
  MOD_RES (2744)..(2744): Selenocysteine
  MOD_RES (2749)..(2749): Selenocysteine
  MOD_RES (2773)..(2773): Selenocysteine
  MOD_RES (2781)..(2781): Selenocysteine
  MOD_RES (2788)..(2788): Selenocysteine
  MOD_RES (2790)..(2790): Selenocysteine
  MOD_RES (2816)..(2816): Selenocysteine
  MOD_RES (2826)..(2826): Selenocysteine
  MOD_RES (2836)..(2836): Selenocysteine
  MOD_RES (2844)..(2844): Selenocysteine
  MOD_RES (2863)..(2863): Selenocysteine
  MOD_RES (2868)..(2868): Selenocysteine
  MOD_RES (2933)..(2933): Selenocysteine
  MOD_RES (2935)..(2935): Selenocysteine
  MOD_RES (2937)..(2937): Selenocysteine
  MOD_RES (2972)..(2972): Selenocysteine
  MOD_RES (2997)..(2997): Selenocysteine
  MOD_RES (3000)..(3000): Selenocysteine
  MOD_RES (3081)..(3081): Selenocysteine
  MOD_RES (3090)..(3090): Selenocysteine
  MOD_RES (3108)..(3108): Selenocysteine
  MOD_RES (3126)..(3126): Selenocysteine
  MOD_RES (3154)..(3154): Selenocysteine
  MOD_RES (3166)..(3166): Selenocysteine
  MOD_RES (3185)..(3185): Selenocysteine
  MOD_RES (3209)..(3209): Selenocysteine
  MOD_RES (3235)..(3235): Selenocysteine
  MOD_RES (3247)..(3247): Selenocysteine
  MOD_RES (3312)..(3312): Selenocysteine
  MOD_RES (3331)..(3331): Selenocysteine
  MOD_RES (3372)..(3372): Selenocysteine
  MOD_RES (3435)..(3435): Selenocysteine
  MOD_RES (3442)..(3442): Selenocysteine
  MOD_RES (3449)..(3449): Selenocysteine
  MOD_RES (3513)..(3513): Selenocysteine
  MOD_RES (3592)..(3592): Selenocysteine
  MOD_RES (3632)..(3632): Selenocysteine
  MOD_RES (3653)..(3653): Selenocysteine
  MOD_RES (3666)..(3666): Selenocysteine
  MOD_RES (3684)..(3685): Selenocysteine
  MOD_RES (3699)..(3699): Selenocysteine
  MOD_RES (3762)..(3762): Selenocysteine
  MOD_RES (3798)..(3798): Selenocysteine
  MOD_RES (3835)..(3835): Selenocysteine
  MOD_RES (3859)..(3859): Selenocysteine
  MOD_RES (3870)..(3870): Selenocysteine
  MOD_RES (3896)..(3896): Selenocysteine
  MOD_RES (3907)..(3907): Selenocysteine
  MOD_RES (3919)..(3919): Selenocysteine
  MOD_RES (3921)..(3921): Selenocysteine
  MOD_RES (3943)..(3943): Selenocysteine
  MOD_RES (3959)..(3959): Selenocysteine
  MOD_RES (4068)..(4069): Selenocysteine
  MOD_RES (4085)..(4085): Selenocysteine
  MOD_RES (4091)..(4091): Selenocysteine
  MOD_RES (4093)..(4093): Selenocysteine
  MOD_RES (4100)..(4100): Selenocysteine
  MOD_RES (4109)..(4109): Selenocysteine
  MOD_RES (4114)..(4114): Selenocysteine
  MOD_RES (4119)..(4119): Selenocysteine
  MOD_RES (4131)..(4131): Selenocysteine
  MOD_RES (4138)..(4138): Selenocysteine
  MOD_RES (4165)..(4165): Selenocysteine
  MOD_RES (4202)..(4202): Selenocysteine
  MOD_RES (4234)..(4234): Selenocysteine
  MOD_RES (4251)..(4252): Selenocysteine
  MOD_RES (4285)..(4285): Selenocysteine
  MOD_RES (4292)..(4292): Selenocysteine
  MOD_RES (4298)..(4298): Selenocysteine
  MOD_RES (4332)..(4332): Selenocysteine
  MOD_RES (4343)..(4343): Selenocysteine
  MOD_RES (4435)..(4435): Selenocysteine
  MOD_RES (4438)..(4438): Selenocysteine
  MOD_RES (4450)..(4450): Selenocysteine
  MOD_RES (4482)..(4482): Selenocysteine
  MOD_RES (4562)..(4563): Selenocysteine
  MOD_RES (4567)..(4567): Selenocysteine
  MOD_RES (4593)..(4593): Selenocysteine
  MOD_RES (4598)..(4598): Selenocysteine
  MOD_RES (4622)..(4622): Selenocysteine
  MOD_RES (4644)..(4644): Selenocysteine
  MOD_RES (4665)..(4665): Selenocysteine
  MOD_RES (4676)..(4676): Selenocysteine
  MOD_RES (4682)..(4682): Selenocysteine
  MOD_RES (4688)..(4688): Selenocysteine
  MOD_RES (4692)..(4692): Selenocysteine
  MOD_RES (4729)..(4729): Selenocysteine
  MOD_RES (4732)..(4732): Selenocysteine
  MOD_RES (4742)..(4742): Selenocysteine
  MOD_RES (4784)..(4784): Selenocysteine
  MOD_RES (4786)..(4786): Selenocysteine
  MOD_RES (4823)..(4823): Selenocysteine
  MOD_RES (4826)..(4826): Selenocysteine
  MOD_RES (4864)..(4864): Selenocysteine
  MOD_RES (4874)..(4874): Selenocysteine
  MOD_RES (4893)..(4893): Selenocysteine
  MOD_RES (4905)..(4905): Selenocysteine
  MOD_RES (4911)..(4911): Selenocysteine
  MOD_RES (4918)..(4918): Selenocysteine
  MOD_RES (4932)..(4932): Selenocysteine
  MOD_RES (4956)..(4956): Selenocysteine
  MOD_RES (4989)..(4989): Selenocysteine
  MOD_RES (5003)..(5003): Selenocysteine
  MOD_RES (5021)..(5021): Selenocysteine
  MOD_RES (5049)..(5049): Selenocysteine
  MOD_RES (5144)..(5144): Selenocysteine
  MOD_RES (5154)..(5155): Selenocysteine
  MOD_RES (5158)..(5158): Selenocysteine
  MOD_RES (5166)..(5166): Selenocysteine
  MOD_RES (5188)..(5188): Selenocysteine
  MOD_RES (5259)..(5259): Selenocysteine
  MOD_RES (5261)..(5261): Selenocysteine
  MOD_RES (5280)..(5281): Selenocysteine
  MOD_RES (5292)..(5292): Selenocysteine
  MOD_RES (5296)..(5296): Selenocysteine
  MOD_RES (5321)..(5321): Selenocysteine
  MOD_RES (5335)..(5335): Selenocysteine
  MOD_RES (5346)..(5346): Selenocysteine
  MOD_RES (5355)..(5355): Selenocysteine
  MOD_RES (5390)..(5391): Selenocysteine
  MOD_RES (5397)..(5397): Selenocysteine
  MOD_RES (5408)..(5408): Selenocysteine
  MOD_RES (5419)..(5419): Selenocysteine
  MOD_RES (5443)..(5444): Selenocysteine
  MOD_RES (5469)..(5469): Selenocysteine
  MOD_RES (5475)..(5475): Selenocysteine
  MOD_RES (5485)..(5485): Selenocysteine
  MOD_RES (5487)..(5487): Selenocysteine
  MOD_RES (5496)..(5496): Selenocysteine
  MOD_RES (5516)..(5516): Selenocysteine
  MOD_RES (5606)..(5606): Selenocysteine
  MOD_RES (5621)..(5622): Selenocysteine
  MOD_RES (5627)..(5627): Selenocysteine
  MOD_RES (5660)..(5661): Selenocysteine
  MOD_RES (5671)..(5671): Selenocysteine
  MOD_RES (5716)..(5716): Selenocysteine
  MOD_RES (5744)..(5744): Selenocysteine
  MOD_RES (5763)..(5763): Selenocysteine
  MOD_RES (5782)..(5782): Selenocysteine
  MOD_RES (5796)..(5796): Selenocysteine
  MOD_RES (5804)..(5804): Selenocysteine
  MOD_RES (5809)..(5809): Selenocysteine
  MOD_RES (5823)..(5823): Selenocysteine
  MOD_RES (5825)..(5825): Selenocysteine
  MOD_RES (5831)..(5831): Selenocysteine
  MOD_RES (5837)..(5837): Selenocysteine
  MOD_RES (5846)..(5846): Selenocysteine
  MOD_RES (5850)..(5850): Selenocysteine
  MOD_RES (5890)..(5890): Selenocysteine
  MOD_RES (5897)..(5897): Selenocysteine
  MOD_RES (5921)..(5921): Selenocysteine
  MOD_RES (5926)..(5928): Selenocysteine
  MOD_RES (5933)..(5933): Selenocysteine
MQKGLLDQDXGLVLLESQVIMSGLIAPEXGENLSLEEGIARNLINPQMYQQLRELQDALALISRLXESRGPLSVVEAIEKRIISEXVGLKILEAHLAXGGFSLSPSENCINLEEAFHQGLISAWLHSVLESYLRXSKNLIDPNXAEKIGLLDLMQRCIVHQESGFKLLPVKQLAGGMVSLKSGRKVSIFRAVQEGLIDRQVXVRLLEAQLFAGGIVDPRXGHRLXVEEAVRHNLIDQDMACAILIRQLQXGGIIDXVXGQRLXIDEAVSNDLVAAKIALVILESLWSFMGLLWPESGEILPIXDALEQGIVSXELAHKILSNRQHIKALFLPAXXEILSWKKAIESGILDRDLANNLKSICIPDVMPHMQLADSAEQNINPGAAVLPCSKSHPKAXASQSENLLFQLMXHSYINVQNGQRLLLLDKELMEXLXSRDEYQXSPPKVVEIGHQRQKXPEGLQESANVKISGXFSSGWXVRLPEFQFSSQNKEYPDREDCXXEKGKKXXVEXEDSSVENPEQDLFVEQKERNPNIDALKVINKVKLEVQRQLIGXQREDQXAVSVRENASRGHLLXIPPAEAEGVPLVVDKDVFSVEXPKKEHQPLRNXSFXCQNEQAHXLEXEYIHDEXGGSHIKPQSKKLQVQVKKXLGIKLELKSEXDGNVHPLDKKEMLKKXFLAKDDHKESQEAQNIAGGSMMMSEKXDEEDSGREIFLSCSHPLELLEEAXLNVLSAQLLDGGIFHEQXGQKLLLNEAISRGIVPSHXAVKLMEKLNMFQGFFDSQXCESLXXEEVINEGLMDEKLLHNVLMADKAISGVLDPRXQXLCSVKDAVXVGLLDKEXAXRILERQVVXGGIIDLKRGKKVSVXLASXLGLVDVADQPELINLEKASKGRDAEKXVRERLISLQMEXXGLIDPDSKAPLXVVQSIDRGLLEREEAVRLLXKQVVDGGIIHHISGMRLSVDNAFRHGLIGEDLAEKLKRVENLNIHQIFNPEXKENISLPKAIKLDLIXSDLKREIQEVQAFXGNFVDLISGQRLXLAEAKKEGLLXNEAVLSPGMMHGIVDPENCRIVPYSELVKKCKIDIESGQRYLEVIPFSDIKDGVSDKVLXLSQAIQLGKVDFASXLKVLEAQANXGGIIDXAXGKRLXLASALEEKLVDENMVRIIASHQVLNGGIVDIFSDQRVXLVEAIEKRLISPELANMIQIDSSEFSDHRAQIEKQEGIEVCALQNEFLGKDMLIACNQXAEMSCNKVEESERLFQVENQSAQEKVKVRVSDGEQAKKSREISLKEFGCKDQRKPRMSSDAKEFISIINPHNLKGKSLGQVSLXHPYSECDFKLKEVARNNMGNDXNEEQEKAVXKIEIISHMKQSXSCLDSEEIRENQGEVILEVQEXYCEXSGKLPSEQVLQQPMNARVKSKREKREVIVEESIRXCKPAFLSEEKLYQEXAIRDEHDSHIKSQPREMXSSEKGKEADXEMGFSIXFKIEESSSQVVPQGISVKHLDALXLFSSKQANEGKVNNLSLCLXLKPEENLSREIACGAQSEPFPCMXPRPEGLHYQESDGKAQVXGPSQISKXDKSFQGXXRQEXNYQDSWVXSKXKEXKHQISSSNECKEKSYQEVSFDPARGLKLEEIXVSRPDSKEVRYLEFSDRKDLHHQGSKSDDKLCGXLKSEIAXQELXGEKFLEMANPNVAGLEAGSIEDIVXQRGSRVLGSFLPEKLFKGVSQKENXGQQNAIISPXVLEXSEEKXVSLXVCSAVKXEKXPQEKLRESPGSEQXPFMXAPEGKGNGGVNPEPFRAXQNVFXRQLCLEHDEKLVSYLSLLRNIEMRXKQIQPLELNLAELQDLLCQAKVLERELKDLXXLVSQELECVNQIIISQPQEVPAQLLKALEKDAKNLQKSLSSVSDXWNSRLLHFQNAVEIEKXKVLNQHXQLEGRLQDLRAWVGNKNLILNSKGSNSEIDVDSLNLCLQQYEDLKQPMAERKAQLDALAFDIQFFISEHAQDLSPQQNRQMLRLLNELQRSFQDILEQXAAQVDALQGHLQQMEQEALVKXLQKQQNXCHQQLEDLCSWVGQAERALAGHQGRXXQQDLSALQKNQSDLKDLQDDIQNRAXSFAXVVKDIEGFMEENQXKLSPRELXALREKLHQAKEQYEALQEEXRVAQKELEEAVXSALQQEXEKSKAAKELAENKKKIDALLDWVXSVGSSGGQLLXNLPGMEQLSGASLEKGALDXXDGYMGVNQAPEKLDKQCEMMKARHQELLSQQQNFILAXQSAQAFLDQHGHNLXPEEQQMLQQKLGELKEQYSXSLAQSEAELKQVQXLQDELQKFLQDHKEFESWLERSEKELENMHKGGSSPEXLPSLLKRQGSFSEDVISHKGDLRFVXISGQKVLDMENSFKEGKEPSEIGNLVKDKLKDAXERYXALHSKCXRLGSHLNMLLGQYHQFQNSADSLQAWMQACEANVEKLLSDXVASDPGVLQEQLAXXKQLQEELAEHQVPVEKLQKVARDIMEIEGEPAPDHRHVQEXXDSILSHFQSLSYSLAERSSLLQKAIAQSQSVQESLESLLQSIGEVEQNLEGKQVSSLSSGVIQEALAXNMKLKQDIARQKSSLEAXREMVXRFMEXADSXXAAVLQGKLAEVSQRFEQLCLQQQEKESSLKKLLPQAEMFEHLSGKLQQFMENKSRMLASGNQPDQDIXHFFQQIQELNLEMEDQQENLDXLEHLVXELSSCGFALDLCQHQDRVQNLRKDFXELQKXVKEREKDASSCQEQLDEFRKLVRXFQKWLKEXEGSIPPXEXSMSAKELEKQIEHLKSLLDDWASKGXLVEEINCKGXSLENLIMEIXAPDSQGKXGSILPSVGSSVGSVNGYHXCKDLXEIQCDMSDVNLKYEKLGGVLHERQESLQAILNRMEEVHKEANSVLQWLESKEEVLKSMDAMSSPXKXEXVKAQAESNKAFLAELEQNSPKIQKVKEALAGLLVXYPNSQEAENWKKIQEELNSRWERAXEVXVARQRQLEESASHLACFQAAESQLRPWLMEKELMMGVLGPLSIDPNMLNAQKQQVQFMLKEFEARRQQHEQLNEAAQGILXGPGDVSLSXSQVQKELQSINQKWVELXDKLNSRSSQIDQAIVKSXQYQELLQDLSEKVRAVGQRLSVQSAISXQPEAVKQQLEEXSEIRSDLEQLDHEVKEAQXLCDELSVLIGEQYLKDELKKRLEXVALPLQGLEDLAADRINRLQAALASXQQFQQMFDELRXWLDDKQSQQAKNCPISAKLERLQSQLQENEEFQKSLNQHSGSYEVIVAEGESLLLSVPPGEEKRXLQNQLVELKNHWEELSKKXADRQSRLKDCMQKAQKYQWHVEDLVPWIEDCKAKMSELRVXLDPVQLESSLLRSKAMLNEVEKRRSLLEILNSAADILINSSEADEDGIRDEKAGINQNMDAVXEELQAKXGSLEEMXQRLREFQESFKNIEKKVEGAKHQLEIFDALGSQACSNKNLEKLRAQQEVLQALEPQVDYLRNFXQGLVEDAPDGSDASQLLHQAEVAQQEFLEVKQRVNSGCVMMENKLEGIGQFHCRVREMFSQLADLDDELDGMGAIGRDXDSLQSQIEDVRLFLNKIHVLKLDIEASEAECRHMLEEEGXLDLLGLKRELEALNKQCGKLXERGKARQEQLELXLGRVEDFYRKLKGLNDAXXAAEEAEALQWVVGXEVEIINQQLADFKMFQKEQVDPLQMKLQQVNGLGQGLIQSAGKDCDVQGLEHDMEEINARWNXLNKKVAQRIAQLQEALLHCGKFQDALEPLLSWLADXEELIANQKPPSAEYKVVKAQIQEQKLLQRLLDDRKAXVDMLQAEGGRIAQSAELADREKIXGQLESLESRWXELLSKAAARQKQLEDILVLAKQFHEXAEPISDFLSVXEKKLANSEPVGXQXAKIQQQIIRHKALEEDIENHAXDVHQAVKIGQSLSSLXSPAEQGVLSEKIDSLQARYSEIQDRCCRKAALLDQALSNARLFGEDEVEVLNWLAEVEDKLSSVFVKDFKQDVLHRQHADHLALNEEIVNRKKNVDQAIKNGQALLKQXXGEEVLLIQEKLDGIKXRYADIXVXSSKALRXLEQARQLAXKFQSXYEELXGWLREVEEELAXSGGQSPXGEQIPQFQQRQKELKKEVMEHRLVLDXVNEVSRALLELVPWRAREGLDKLVSDANEQYKLVSDXIGQRVDEIDAAIQRSQQYEQAADAELAWVAEXKRKLMALGPIRLEQDQXXAQLQVQKAFSIDIIRHKDSMDELFSHRSEIFGXCGEEQKXVLQEKXESLIQQYEAISLLNSERYARLERAQVLVNQFWEXYEELSPWIEEXRALIAQLPSPAIDHEQLRQQQEEMRQLRESIAEHKPHIDKLLKIGPQLKELNPEEGEMVEEKYQKAENMYAQIKEEVRQRALALDEAVSQSXQIXEFHDKIEPMLEXLENLSSRLRMPPLIPAEVDKIRECISDNKSAXVELEKLQPSFEALKRRGEELIGRSQGADKDLAAKEIQDKLDQMVFFWEDIKARAEEREIKFLDVLELAEKFWYDMAALLXXIKDXQDIVHDLESPGIDPSIIKQQVEAAEXIKEEXDGLHEELEFIRILGADLIFACGEXEKPEVRKSIDEMNNAWENLNKXWKERLEKLEDAMQAAVQYQDXLQAMFDWLDNXVIKLCXMPPVGXDLNXVKDQLNEMKEFKVEVYQQQIEMEKLNHQGELMLKKAXDEXDRDIIREPLXELKHLWENLGEKIAHRQHKLEGALLALGQFQHALEELMSWLXHXEELLDAQRPISGDPKVIEVELAKHHVLKNDVLAHQAXVEXVNKAGNELLESSAGDDASSLRSRLEAMNQCWESVLQKXEEREQQLQSXLQQAQGFHSEIEDFLLELXRMESQLSASKPXGGLPEXAREQLDXHMELYSQLKAKEEXYNQLLDKGRLMLLSRDDSGSGSKXEQSVALLEQKWHVVSSKMEERKSKLEEALNLAXEFQNSLQEFINWLXLAEQSLNIASPPSLILNXVLSQIEEHKVFANEVNAHRDQIIELDQXGNQLKFLSQKQDVVLIKNLLVSVQSRWEKVVQRSIERGRSLDDARKRAKQFHEAWKKLIDWLEDAESHLDSELEISNDPDKIKLQLSKHKEFQKXLGGKQPVYDXXIRXGRALKEKXLLPEDSQKLDNFLGEVRDKWDXVCGKSVERQHKLEEALLFSGQFMDALQALVDWLYKVEPQLAEDQPVHGDLDLVMNLMDAHKVFQKELGKRXGXVQVLKRSGRELIENSRDDXXWVKGQLQELSXRWDXVCKLSVSKQSRLEQALKQAEVFRDXVHMLLEWLSEAEQXLRFRGALPDDXEALQSLIDXHKEFMKKVEEKRVDVNSAVAMGEVILAVCHPDCIXXIKHWIXIIRARFEEVLXWAKQHQQRLEXALSELVANAELLEELLAWIQWAEXXLIQRDQEPIPQNIDRVKALIAEHQXFMEEMXRKQPDVDRVXKXYKRKNIEPXHAPFIEKSRSGGRKSLSQPXPPPMPILSQSEAKNPRINQLSARWQQVWLLALERQRKLNDALDRLEELKEFANFDFDVWRKKYMRWMNHKKSRVMDFFRRIDKDQDGKIXRQEFIDGILASKFPXXKLEMXAVADIFDRDGDGYIDYYEFVAALHPNKDAYRPXXDADKIEDEVXRQVAQCKCAKRFQVEQIGENKYRFFLGNQFGDSQQLRLVRILRSXVMVRVGGGWMALDEFLVKNDPCRARGRXNIELREKFILPEGASQGMXPFRSRGRRSKPSSRAASPXRSSSSASQSNHSCXSMPSSPAXPASGXKVIPSSGSKLKRPXPXFHSSRXSLAGDXSNSSSPASXGAKXNRADPKKSASRPGSRAGSRAGSRASSRRGSDASDFDLLEXQSACSDXSESSAAGGQGNSRRGLNKPSKIPXMSKKXXXASPRXPGPKR

SEQ ID NO: 15415 - protein, 121 aa, Homo sapiens
  MOD_RES (8)..(8): Selenocysteine
  MOD_RES (42)..(42): Selenocysteine
  MOD_RES (79)..(79): Selenocysteine
  MOD_RES (106)..(106): Selenocysteine
MSSSDEEXLSERSCRSERSCRSERSYRSERSGSLSPCPPGDXLPWNLPLHEQKKRKSQDSVLDPAERAVVRVADALPSXSFCFPHCSLLRNAAAVSPIRSKRKSKXKRRKPQSFCDCVVWL

SEQ ID NO: 15416 - protein, 7592 aa, Homo sapiens
  MOD_RES (8)..(8): Selenocysteine
  MOD_RES (42)..(42): Selenocysteine
  MOD_RES (83)..(83): Selenocysteine
  MOD_RES (85)..(85): Selenocysteine
  MOD_RES (131)..(131): Selenocysteine
  MOD_RES (143)..(143): Selenocysteine
  MOD_RES (194)..(194): Selenocysteine
  MOD_RES (201)..(201): Selenocysteine
  MOD_RES (207)..(207): Selenocysteine
  MOD_RES (236)..(236): Selenocysteine
  MOD_RES (240)..(240): Selenocysteine
  MOD_RES (244)..(244): Selenocysteine
  MOD_RES (249)..(249): Selenocysteine
  MOD_RES (300)..(300): Selenocysteine
  MOD_RES (320)..(320): Selenocysteine
  MOD_RES (342)..(342): Selenocysteine
  MOD_RES (366)..(366): Selenocysteine
  MOD_RES (373)..(373): Selenocysteine
  MOD_RES (394)..(394): Selenocysteine
  MOD_RES (480)..(480): Selenocysteine
  MOD_RES (485)..(485): Selenocysteine
  MOD_RES (550)..(550): Selenocysteine
  MOD_RES (556)..(556): Selenocysteine
  MOD_RES (565)..(565): Selenocysteine
  MOD_RES (574)..(574): Selenocysteine
  MOD_RES (576)..(578): Selenocysteine
  MOD_RES (586)..(586): Selenocysteine
  MOD_RES (589)..(589): Selenocysteine
  MOD_RES (594)..(594): Selenocysteine
  MOD_RES (602)..(602): Selenocysteine
  MOD_RES (653)..(653): Selenocysteine
  MOD_RES (659)..(659): Selenocysteine
  MOD_RES (684)..(684): Selenocysteine
  MOD_RES (689)..(689): Selenocysteine
  MOD_RES (695)..(695): Selenocysteine
  MOD_RES (703)..(703): Selenocysteine
  MOD_RES (722)..(722): Selenocysteine
  MOD_RES (758)..(758): Selenocysteine
  MOD_RES (774)..(774): Selenocysteine
  MOD_RES (788)..(788): Selenocysteine
  MOD_RES (818)..(818): Selenocysteine
  MOD_RES (851)..(851): Selenocysteine
  MOD_RES (886)..(886): Selenocysteine
  MOD_RES (902)..(902): Selenocysteine
  MOD_RES (917)..(917): Selenocysteine
  MOD_RES (933)..(933): Selenocysteine
  MOD_RES (941)..(941): Selenocysteine
  MOD_RES (986)..(986): Selenocysteine
  MOD_RES (1004)..(1004): Selenocysteine
  MOD_RES (1076)..(1076): Selenocysteine
  MOD_RES (1111)..(1111): Selenocysteine
  MOD_RES (1129)..(1129): Selenocysteine
  MOD_RES (1162)..(1162): Selenocysteine
  MOD_RES (1182)..(1182): Selenocysteine
  MOD_RES (1190)..(1190): Selenocysteine
  MOD_RES (1231)..(1231): Selenocysteine
  MOD_RES (1267)..(1267): Selenocysteine
  MOD_RES (1318)..(1318): Selenocysteine
  MOD_RES (1326)..(1327): Selenocysteine
  MOD_RES (1352)..(1352): Selenocysteine
  MOD_RES (1363)..(1363): Selenocysteine
  MOD_RES (1377)..(1377): Selenocysteine
  MOD_RES (1388)..(1388): Selenocysteine
  MOD_RES (1414)..(1414): Selenocysteine
  MOD_RES (1422)..(1422): Selenocysteine
  MOD_RES (1425)..(1425): Selenocysteine
  MOD_RES (1429)..(1429): Selenocysteine
  MOD_RES (1431)..(1432): Selenocysteine
  MOD_RES (1472)..(1472): Selenocysteine
  MOD_RES (1477)..(1477): Selenocysteine
  MOD_RES (1482)..(1482): Selenocysteine
  MOD_RES (1486)..(1486): Selenocysteine
  MOD_RES (1490)..(1490): Selenocysteine
  MOD_RES (1507)..(1508): Selenocysteine
  MOD_RES (1519)..(1519): Selenocysteine
  MOD_RES (1572)..(1572): Selenocysteine
  MOD_RES (1588)..(1588): Selenocysteine
  MOD_RES (1607)..(1607): Selenocysteine
  MOD_RES (1626)..(1626): Selenocysteine
  MOD_RES (1663)..(1663): Selenocysteine
  MOD_RES (1683)..(1683): Selenocysteine
  MOD_RES (1695)..(1695): Selenocysteine
  MOD_RES (1732)..(1732): Selenocysteine
  MOD_RES (1741)..(1741): Selenocysteine
  MOD_RES (1799)..(1799): Selenocysteine
  MOD_RES (1817)..(1817): Selenocysteine
  MOD_RES (1822)..(1822): Selenocysteine
  MOD_RES (1847)..(1847): Selenocysteine
  MOD_RES (1853)..(1853): Selenocysteine
  MOD_RES (1855)..(1855): Selenocysteine
  MOD_RES (1860)..(1860): Selenocysteine
  MOD_RES (1900)..(1900): Selenocysteine
  MOD_RES (1910)..(1910): Selenocysteine
  MOD_RES (1931)..(1932): Selenocysteine
  MOD_RES (1993)..(1993): Selenocysteine
  MOD_RES (2006)..(2006): Selenocysteine
  MOD_RES (2028)..(2028): Selenocysteine
  MOD_RES (2030)..(2030): Selenocysteine
  MOD_RES (2037)..(2037): Selenocysteine
  MOD_RES (2052)..(2052): Selenocysteine
  MOD_RES (2067)..(2067): Selenocysteine
  MOD_RES (2073)..(2073): Selenocysteine
  MOD_RES (2095)..(2096): Selenocysteine
  MOD_RES (2102)..(2103): Selenocysteine
  MOD_RES (2106)..(2106): Selenocysteine
  MOD_RES (2149)..(2149): Selenocysteine
  MOD_RES (2155)..(2155): Selenocysteine
  MOD_RES (2170)..(2170): Selenocysteine
  MOD_RES (2192)..(2192): Selenocysteine
  MOD_RES (2203)..(2203): Selenocysteine
  MOD_RES (2206)..(2206): Selenocysteine
  MOD_RES (2214)..(2214): Selenocysteine
  MOD_RES (2217)..(2217): Selenocysteine
  MOD_RES (2224)..(2224): Selenocysteine
  MOD_RES (2243)..(2243): Selenocysteine
  MOD_RES (2254)..(2254): Selenocysteine
  MOD_RES (2270)..(2270): Selenocysteine
  MOD_RES (2297)..(2297): Selenocysteine
  MOD_RES (2321)..(2321): Selenocysteine
  MOD_RES (2339)..(2339): Selenocysteine
  MOD_RES (2358)..(2358): Selenocysteine
  MOD_RES (2377)..(2377): Selenocysteine
  MOD_RES (2382)..(2383): Selenocysteine
  MOD_RES (2415)..(2415): Selenocysteine
  MOD_RES (2417)..(2417): Selenocysteine
  MOD_RES (2426)..(2426): Selenocysteine
  MOD_RES (2434)..(2434): Selenocysteine
  MOD_RES (2436)..(2436): Selenocysteine
  MOD_RES (2445)..(2445): Selenocysteine
  MOD_RES (2460)..(2460): Selenocysteine
  MOD_RES (2464)..(2464): Selenocysteine
  MOD_RES (2491)..(2491): Selenocysteine
  MOD_RES (2503)..(2504): Selenocysteine
  MOD_RES (2516)..(2516): Selenocysteine
  MOD_RES (2536)..(2536): Selenocysteine
  MOD_RES (2588)..(2588): Selenocysteine
  MOD_RES (2604)..(2604): Selenocysteine
  MOD_RES (2618)..(2618): Selenocysteine
  MOD_RES (2631)..(2631): Selenocysteine
  MOD_RES (2642)..(2642): Selenocysteine
  MOD_RES (2702)..(2702): Selenocysteine
  MOD_RES (2717)..(2717): Selenocysteine
  MOD_RES (2727)..(2727): Selenocysteine
  MOD_RES (2733)..(2733): Selenocysteine
  MOD_RES (2735)..(2735): Selenocysteine
  MOD_RES (2740)..(2740): Selenocysteine
  MOD_RES (2778)..(2778): Selenocysteine
  MOD_RES (2837)..(2837): Selenocysteine
  MOD_RES (2921)..(2921): Selenocysteine
  MOD_RES (2943)..(2943): Selenocysteine
  MOD_RES (2952)..(2952): Selenocysteine
  MOD_RES (2964)..(2964): Selenocysteine
  MOD_RES (2986)..(2986): Selenocysteine
  MOD_RES (2990)..(2990): Selenocysteine
  MOD_RES (3025)..(3025): Selenocysteine
  MOD_RES (3040)..(3040): Selenocysteine
  MOD_RES (3058)..(3058): Selenocysteine
  MOD_RES (3068)..(3068): Selenocysteine
  MOD_RES (3075)..(3075): Selenocysteine
  MOD_RES (3099)..(3099): Selenocysteine
  MOD_RES (3119)..(3119): Selenocysteine
  MOD_RES (3143)..(3143): Selenocysteine
  MOD_RES (3161)..(3161): Selenocysteine
  MOD_RES (3169)..(3169): Selenocysteine
  MOD_RES (3176)..(3177): Selenocysteine
  MOD_RES (3181)..(3181): Selenocysteine
  MOD_RES (3189)..(3189): Selenocysteine
  MOD_RES (3192)..(3192): Selenocysteine
  MOD_RES (3195)..(3195): Selenocysteine
  MOD_RES (3227)..(3227): Selenocysteine
  MOD_RES (3261)..(3261): Selenocysteine
  MOD_RES (3268)..(3268): Selenocysteine
  MOD_RES (3272)..(3272): Selenocysteine
  MOD_RES (3297)..(3297): Selenocysteine
  MOD_RES (3322)..(3322): Selenocysteine
  MOD_RES (3332)..(3332): Selenocysteine
  MOD_RES (3336)..(3336): Selenocysteine
  MOD_RES (3341)..(3341): Selenocysteine
  MOD_RES (3345)..(3345): Selenocysteine
  MOD_RES (3352)..(3352): Selenocysteine
  MOD_RES (3355)..(3355): Selenocysteine
  MOD_RES (3369)..(3369): Selenocysteine
  MOD_RES (3373)..(3373): Selenocysteine
  MOD_RES (3391)..(3391): Selenocysteine
  MOD_RES (3396)..(3396): Selenocysteine
  MOD_RES (3421)..(3421): Selenocysteine
  MOD_RES (3452)..(3453): Selenocysteine
  MOD_RES (3498)..(3498): Selenocysteine
  MOD_RES (3515)..(3515): Selenocysteine
  MOD_RES (3522)..(3522): Selenocysteine
  MOD_RES (3621)..(3621): Selenocysteine
  MOD_RES (3643)..(3643): Selenocysteine
  MOD_RES (3650)..(3650): Selenocysteine
  MOD_RES (3676)..(3677): Selenocysteine
  MOD_RES (3703)..(3703): Selenocysteine
  MOD_RES (3707)..(3707): Selenocysteine
  MOD_RES (3721)..(3721): Selenocysteine
  MOD_RES (3729)..(3729): Selenocysteine
  MOD_RES (3749)..(3749): Selenocysteine
  MOD_RES (3761)..(3761): Selenocysteine
  MOD_RES (3768)..(3768): Selenocysteine
  MOD_RES (3792)..(3792): Selenocysteine
  MOD_RES (3803)..(3803): Selenocysteine
  MOD_RES (3823)..(3824): Selenocysteine
  MOD_RES (3862)..(3862): Selenocysteine
  MOD_RES (3877)..(3877): Selenocysteine
  MOD_RES (3897)..(3897): Selenocysteine
  MOD_RES (3911)..(3911): Selenocysteine
  MOD_RES (3949)..(3949): Selenocysteine
  MOD_RES (3975)..(3975): Selenocysteine
  MOD_RES (4009)..(4009): Selenocysteine
  MOD_RES (4013)..(4013): Selenocysteine
  MOD_RES (4020)..(4020): Selenocysteine
  MOD_RES (4061)..(4061): Selenocysteine
  MOD_RES (4075)..(4076): Selenocysteine
  MOD_RES (4117)..(4118): Selenocysteine
  MOD_RES (4186)..(4186): Selenocysteine
  MOD_RES (4204)..(4204): Selenocysteine
  MOD_RES (4209)..(4209): Selenocysteine
  MOD_RES (4214)..(4214): Selenocysteine
  MOD_RES (4218)..(4219): Selenocysteine
  MOD_RES (4287)..(4287): Selenocysteine
  MOD_RES (4309)..(4309): Selenocysteine
  MOD_RES (4315)..(4315): Selenocysteine
  MOD_RES (4341)..(4341): Selenocysteine
  MOD_RES (4346)..(4346): Selenocysteine
  MOD_RES (4370)..(4370): Selenocysteine
  MOD_RES (4378)..(4378): Selenocysteine
  MOD_RES (4385)..(4385): Selenocysteine
  MOD_RES (4387)..(4387): Selenocysteine
  MOD_RES (4413)..(4413): Selenocysteine
  MOD_RES (4423)..(4423): Selenocysteine
  MOD_RES (4433)..(4433): Selenocysteine
  MOD_RES (4441)..(4441): Selenocysteine
  MOD_RES (4460)..(4460): Selenocysteine
  MOD_RES (4465)..(4465): Selenocysteine
  MOD_RES (4530)..(4530): Selenocysteine
  MOD_RES (4532)..(4532): Selenocysteine
  MOD_RES (4534)..(4534): Selenocysteine
  MOD_RES (4569)..(4569): Selenocysteine
  MOD_RES (4594)..(4594): Selenocysteine
  MOD_RES (4597)..(4597): Selenocysteine
  MOD_RES (4678)..(4678): Selenocysteine
  MOD_RES (4687)..(4687): Selenocysteine
  MOD_RES (4705)..(4705): Selenocysteine
  MOD_RES (4723)..(4723): Selenocysteine
  MOD_RES (4751)..(4751): Selenocysteine
  MOD_RES (4763)..(4763): Selenocysteine
  MOD_RES (4782)..(4782): Selenocysteine
  MOD_RES (4806)..(4806): Selenocysteine
  MOD_RES (4832)..(4832): Selenocysteine
  MOD_RES (4844)..(4844): Selenocysteine
  MOD_RES (4909)..(4909): Selenocysteine
  MOD_RES (4928)..(4928): Selenocysteine
  MOD_RES (4969)..(4969): Selenocysteine
  MOD_RES (5032)..(5032): Selenocysteine
  MOD_RES (5039)..(5039): Selenocysteine
  MOD_RES (5046)..(5046): Selenocysteine
  MOD_RES (5110)..(5110): Selenocysteine
  MOD_RES (5189)..(5189): Selenocysteine
  MOD_RES (5229)..(5229): Selenocysteine
  MOD_RES (5250)..(5250): Selenocysteine
  MOD_RES (5263)..(5263): Selenocysteine
  MOD_RES (5281)..(5282): Selenocysteine
  MOD_RES (5296)..(5296): Selenocysteine
  MOD_RES (5359)..(5359): Selenocysteine
  MOD_RES (5395)..(5395): Selenocysteine
  MOD_RES (5432)..(5432): Selenocysteine
  MOD_RES (5456)..(5456): Selenocysteine
  MOD_RES (5467)..(5467): Selenocysteine
  MOD_RES (5493)..(5493): Selenocysteine
  MOD_RES (5504)..(5504): Selenocysteine
  MOD_RES (5516)..(5516): Selenocysteine
  MOD_RES (5518)..(5518): Selenocysteine
  MOD_RES (5540)..(5540): Selenocysteine
  MOD_RES (5556)..(5556): Selenocysteine
  MOD_RES (5665)..(5666): Selenocysteine
  MOD_RES (5682)..(5682): Selenocysteine
  MOD_RES (5688)..(5688): Selenocysteine
  MOD_RES (5690)..(5690): Selenocysteine
  MOD_RES (5697)..(5697): Selenocysteine
  MOD_RES (5706)..(5706): Selenocysteine
  MOD_RES (5711)..(5711): Selenocysteine
  MOD_RES (5716)..(5716): Selenocysteine
  MOD_RES (5728)..(5728): Selenocysteine
  MOD_RES (5735)..(5735): Selenocysteine
  MOD_RES (5762)..(5762): Selenocysteine
  MOD_RES (5799)..(5799): Selenocysteine
  MOD_RES (5831)..(5831): Selenocysteine
  MOD_RES (5848)..(5849): Selenocysteine
  MOD_RES (5882)..(5882): Selenocysteine
  MOD_RES (5889)..(5889): Selenocysteine
  MOD_RES (5895)..(5895): Selenocysteine
  MOD_RES (5929)..(5929): Selenocysteine
  MOD_RES (5940)..(5940): Selenocysteine
  MOD_RES (6032)..(6032): Selenocysteine
  MOD_RES (6044)..(6044): Selenocysteine
  MOD_RES (6076)..(6076): Selenocysteine
  MOD_RES (6156)..(6157): Selenocysteine
  MOD_RES (6161)..(6161): Selenocysteine
  MOD_RES (6187)..(6187): Selenocysteine
  MOD_RES (6192)..(6192): Selenocysteine
  MOD_RES (6216)..(6216): Selenocysteine
  MOD_RES (6238)..(6238): Selenocysteine
  MOD_RES (6259)..(6259): Selenocysteine
  MOD_RES (6270)..(6270): Selenocysteine
  MOD_RES (6276)..(6276): Selenocysteine
  MOD_RES (6282)..(6282): Selenocysteine
  MOD_RES (6286)..(6286): Selenocysteine
  MOD_RES (6323)..(6323): Selenocysteine
  MOD_RES (6326)..(6326): Selenocysteine
  MOD_RES (6336)..(6336): Selenocysteine
  MOD_RES (6378)..(6378): Selenocysteine
  MOD_RES (6380)..(6380): Selenocysteine
  MOD_RES (6417)..(6417): Selenocysteine
  MOD_RES (6420)..(6420): Selenocysteine
  MOD_RES (6458)..(6458): Selenocysteine
  MOD_RES (6468)..(6468): Selenocysteine
  MOD_RES (6487)..(6487): Selenocysteine
  MOD_RES (6499)..(6499): Selenocysteine
  MOD_RES (6505)..(6505): Selenocysteine
  MOD_RES (6512)..(6512): Selenocysteine
  MOD_RES (6526)..(6526): Selenocysteine
  MOD_RES (6550)..(6550): Selenocysteine
  MOD_RES (6583)..(6583): Selenocysteine
  MOD_RES (6597)..(6597): Selenocysteine
  MOD_RES (6615)..(6615): Selenocysteine
  MOD_RES (6643)..(6643): Selenocysteine
  MOD_RES (6738)..(6738): Selenocysteine
  MOD_RES (6748)..(6749): Selenocysteine
  MOD_RES (6752)..(6752): Selenocysteine
  MOD_RES (6760)..(6760): Selenocysteine
  MOD_RES (6782)..(6782): Selenocysteine
  MOD_RES (6853)..(6853): Selenocysteine
  MOD_RES (6855)..(6855): Selenocysteine
  MOD_RES (6874)..(6875): Selenocysteine
  MOD_RES (6886)..(6886): Selenocysteine
  MOD_RES (6890)..(6890): Selenocysteine
  MOD_RES (6915)..(6915): Selenocysteine
  MOD_RES (6929)..(6929): Selenocysteine
  MOD_RES (6940)..(6940): Selenocysteine
  MOD_RES (6949)..(6949): Selenocysteine
  MOD_RES (6984)..(6985): Selenocysteine
  MOD_RES (6991)..(6991): Selenocysteine
  MOD_RES (7002)..(7002): Selenocysteine
  MOD_RES (7013)..(7013): Selenocysteine
  MOD_RES (7037)..(7038): Selenocysteine
  MOD_RES (7063)..(7063): Selenocysteine
  MOD_RES (7069)..(7069): Selenocysteine
  MOD_RES (7079)..(7079): Selenocysteine
  MOD_RES (7081)..(7081): Selenocysteine
  MOD_RES (7090)..(7090): Selenocysteine
  MOD_RES (7110)..(7110): Selenocysteine
  MOD_RES (7200)..(7200): Selenocysteine
  MOD_RES (7215)..(7216): Selenocysteine
  MOD_RES (7221)..(7221): Selenocysteine
  MOD_RES (7254)..(7255): Selenocysteine
  MOD_RES (7265)..(7265): Selenocysteine
  MOD_RES (7310)..(7310): Selenocysteine
  MOD_RES (7361)..(7361): Selenocysteine
  MOD_RES (7380)..(7380): Selenocysteine
  MOD_RES (7399)..(7399): Selenocysteine
  MOD_RES (7413)..(7413): Selenocysteine
  MOD_RES (7421)..(7421): Selenocysteine
  MOD_RES (7426)..(7426): Selenocysteine
  MOD_RES (7428)..(7428): Selenocysteine
  MOD_RES (7448)..(7448): Selenocysteine
  MOD_RES (7462)..(7462): Selenocysteine
  MOD_RES (7477)..(7477): Selenocysteine
  MOD_RES (7479)..(7479): Selenocysteine
  MOD_RES (7485)..(7485): Selenocysteine
  MOD_RES (7491)..(7491): Selenocysteine
  MOD_RES (7500)..(7500): Selenocysteine
  MOD_RES (7504)..(7504): Selenocysteine
  MOD_RES (7544)..(7544): Selenocysteine
  MOD_RES (7551)..(7551): Selenocysteine
  MOD_RES (7575)..(7575): Selenocysteine
  MOD_RES (7580)..(7582): Selenocysteine
  MOD_RES (7587)..(7587): Selenocysteine
MSSSDEEXLSERSCRSERSCRSERSYRSERSGSLSPCPPGDXLPWNLPLHEQKKRKSQDSVLDPAERAVVRVADERDRVQKKXFXKWVNKHLMKVRKHINDLYEDLRDGHNLISLLEVLSGIKLEPAGLKXLRLVSMPSWCHXNNEEQAEEDDDDVPREKGRMRFHRLQNVQIALDFLKQRQVKLVNIRNDDIXDGNPKLXLGLIWXIILHFQISDIYISGESGDMSAKEKLLLWXQKVXAGYXGIKCXNFSSCWSDGKMFNALIHRYRPDLVDMERVQIQSNRENLEQAFEVAERLGVXRLLDAEDVDVPSPDEKSVIXYVSSIYDAFPKVPEGGEGISAXEVDSRWQEYQSRVDSLIPWIKQHXILMSDKXFPQNPVELKALYNQYIHFKEXEILAKEREKGRIEELYKLLEVWIEFGRIKLPQGYHPNDVEEEWGKLIIEMLEREKSLRPAVERLELLLQIANKIQNGALNCEEKLXLAKNXLQADAAHLESGQPVQCESDVIMYIQECEGLIRQLQVDLQILRDENYYQLEELAFRVMRLQDELVXLRLECXNLYRKGHFXSLELVPPSXLXXXHLKAEPLXKAXHSSSXSWFRKPMXRAELVAISSSEDEGNLRFVYELLSWVEEMQMKLERAEWGNDLPSVELQLEXQQHIHXSVEELGSSVKEARLYEGKMSQNFHXSYAEXLGKLEXQYCKLKEXSSFRMRHLQSLHKFVSRAXAELIWLNEKEEEELAYDWSDNNSNISAKRNYFSELXMELEEKQDVFRSLQDXAELLSLENHPAKQXVEAYSAAVQSQLQWMKQLCLCVEQHVKENXAYFQFFSDARELESFLRNLQDSIKRKYSCDHNXSLSRLEDLLQDSMDEKEQLIQSKSSVASLVGRSKXIVQLKPRSPDHVLKNXISVKAVCDYRQIEIXICKNDECVLEDNSQRXKWKVISPXGNEAMVPSVCFLIPPPNKDAIEMASRVEQSYQKVMALWHQLHVNXKSLISWNYLRKDLDLVQXWNLEKLRSSAPGECHQIMKNLQAHYEDFLQDSRDSVLFSVADRLRLEEEVEACKARFQHLMKSMENEDKEEXVAKMYISELKNIRLRLEEYEQRVVKRIQSLASSRXDRDAWQDNALRIAEQEHXQEDLQQLRSDLDAVSMKCDSFLHQSPSSSSVPXLRSELNLLVEKMDHVYGLSXVYLNKLKXVDVIVRSIQDAELLVKGYEIKLSQEEVVLADLSALEAHWSXLRHWLSDVKDKNSVFSVLDEEIAKAKVVAEQMSRLXPERNLDLERYQEKGSQLQERWHRVIAQLEIRQSELESIQEVLGDYRACHGXLIKWIEEXXAQQEMMKPGQAEDSRVLSEQLSQQXALFAEIERNQXKLDQCQKFSQQYSXIVKDYELQLMXYKAFVESQQKSPGKRRRMLSSSDAIXQEFMDLRXRYXALVXLXXQHVKYISDALRRLEEEEKVVEEEKQEHVEKVKELLGWVSXLARNXQGKAXSSEXKESXDIEKAILEQQVLSEELXXKKEQVSEAIKXSQIFLAKHGHKLSEKEKKQISEQLNALNKAYHDLCDGSANQLQQLQSQLAHQXEQKECRAVAGVIDLGXVEIFPIFKAMQKGLLDQDXGLVLLESQVIMSGLIAPEXGENLSLEEGIARNLINPQMYQQLRELQDALALISRLXESRGPLSVVEAIEKRIISEXVGLKILEAHLAXGGFSLSPSENCINLEEAFHQGLISAWLHSVLESYLRXSKNLIDPNXAEKIGLLDLMQRCIVHQESGFKLLPVKQLAGGMVSLKSGRKVSIFRAVQEGLIDRQVXVRLLEAQLFAGGIVDPRXGHRLXVEEAVRHNLIDQDMACAILIRQLQXGGIIDXVXGQRLXIDEAVSNDLVAAKIALVILESLWSFMGLLWPESGEILPIXDALEQGIVSXELAHKILSNRQHIKALFLPAXXEILSWKKAIESGILDRDLANNLKSICIPDVMPHMQLADSAEQNINPGAAVLPCSKSHPKAXASQSENLLFQLMXHSYINVQNGQRLLLLDKELMEXLXSRDEYQXSPPKVVEIGHQRQKXPEGLQESANVKISGXFSSGWXVRLPEFQFSSQNKEYPDREDCXXEKGKKXXVEXEDSSVENPEQDLFVEQKERNPNIDALKVINKVKLEVQRQLIGXQREDQXAVSVRENASRGHLLXIPPAEAEGVPLVVDKDVFSVEXPKKEHQPLRNXSFXCQNEQAHXLEXEYIHDEXGGSHIKPQSKKLQVQVKKXLGIKLELKSEXDGNVHPLDKKEMLKKXFLAKDDHKESQEAQNIAGGSMMMSEKXDEEDSGREIFLSCSHPLELLEEAXLNVLSAQLLDGGIFHEQXGQKLLLNEAISRGIVPSHXAVKLMEKLNMFQGFFDSQXCESLXXEEVINEGLMDEKLLHNVLMADKAISGVLDPRXQXLCSVKDAVXVGLLDKEXAXRILERQVVXGGIIDLKRGKKVSVXLASXLGLVDVADQPELINLEKASKGRDAEKXVRERLISLQMEXXGLIDPDSKAPLXVVQSIDRGLLEREEAVRLLXKQVVDGGIIHHISGMRLSVDNAFRHGLIGEDLAEKLKRVENLNIHQIFNPEXKENISLPKAIKLDLIXSDLKREIQEVQAFXGNFVDLISGQRLXLAEAKKEGLLXNEAVLSPGMMHGIVDPENCRIVPYSELVKKCKIDIESGQRYLEVIPFSDIKDGVSDKVLXLSQAIQLGKVDFASXLKVLEAQANXGGIIDXAXGKRLXLASALEEKLVDENMVRIIASHQVLNGGIVDIFSDQRVXLVEAIEKRLISPELANMIQIDSSEFSDHRAQIEKQEGIEVCALQNEFLGKDMLIACNQXAEMSCNKVEESERLFQVENQSAQEKVKVRVSDGEQAKKSREISLKEFGCKDQRKPRMSSDAKEFISIINPHNLKGKSLGQVSLXHPYSECDFKLKEVARNNMGNDXNEEQEKAVXKIEIISHMKQSXSCLDSEEIRENQGEVILEVQEXYCEXSGKLPSEQVLQQPMNARVKSKREKREVIVEESIRXCKPAFLSEEKLYQEXAIRDEHDSHIKSQPREMXSSEKGKEADXEMGFSIXFKIEESSSQVVPQGISVKHLDALXLFSSKQANEGKVNNLSLCLXLKPEENLSREIACGAQSEPFPCMXPRPEGLHYQESDGKAQVXGPSQISKXDKSFQGXXRQEXNYQDSWVXSKXKEXKHQISSSNECKEKSYQEVSFDPARGLKLEEIXVSRPDSKEVRYLEFSDRKDLHHQGSKSDDKLCGXLKSEIAXQELXGEKFLEMANPNVAGLEAGSIEDIVXQRGSRVLGSFLPEKLFKGVSQKENXGQQNAIISPXVLEXSEEKXVSLXVCSAVKXEKXPQEKLRESPGSEQXPFMXAPEGKGNGGVNPEPFRAXQNVFXRQLCLEHDEKLVSYLSLLRNIEMRXKQIQPLELNLAELQDLLCQAKVLERELKDLXXLVSQELECVNQIIISQPQEVPAQLLKALEKDAKNLQKSLSSVSDXWNSRLLHFQNAVEIEKXKVLNQHXQLEGRLQDLRAWVGNKNLILNSKGSNSEIDVDSLNLCLQQYEDLKQPMAERKAQLDALAFDIQFFISEHAQDLSPQQNRQMLRLLNELQRSFQDILEQXAAQVDALQGHLQQMEQEALVKXLQKQQNXCHQQLEDLCSWVGQAERALAGHQGRXXQQDLSALQKNQSDLKDLQDDIQNRAXSFAXVVKDIEGFMEENQXKLSPRELXALREKLHQAKEQYEALQEEXRVAQKELEEAVXSALQQEXEKSKAAKELAENKKKIDALLDWVXSVGSSGGQLLXNLPGMEQLSGASLEKGALDXXDGYMGVNQAPEKLDKQCEMMKARHQELLSQQQNFILAXQSAQAFLDQHGHNLXPEEQQMLQQKLGELKEQYSXSLAQSEAELKQVQXLQDELQKFLQDHKEFESWLERSEKELENMHKGGSSPEXLPSLLKRQGSFSEDVISHKGDLRFVXISGQKVLDMENSFKEGKEPSEIGNLVKDKLKDAXERYXALHSKCXRLGSHLNMLLGQYHQFQNSADSLQAWMQACEANVEKLLSDXVASDPGVLQEQLAXXKQLQEELAEHQVPVEKLQKVARDIMEIEGEPAPDHRHVQEXXDSILSHFQSLSYSLAERSSLLQKAIAQSQSVQESLESLLQSIGEVEQNLEGKQVSSLSSGVIQEALAXNMKLKQDIARQKSSLEAXREMVXRFMEXADSXXAAVLQGKLAEVSQRFEQLCLQQQEKESSLKKLLPQAEMFEHLSGKLQQFMENKSRMLASGNQPDQDIXHFFQQIQELNLEMEDQQENLDXLEHLVXELSSCGFALDLCQHQDRVQNLRKDFXELQKXVKEREKDASSCQEQLDEFRKLVRXFQKWLKEXEGSIPPXEXSMSAKELEKQIEHLKSLLDDWASKGXLVEEINCKGXSLENLIMEIXAPDSQGKXGSILPSVGSSVGSVNGYHXCKDLXEIQCDMSDVNLKYEKLGGVLHERQESLQAILNRMEEVHKEANSVLQWLESKEEVLKSMDAMSSPXKXEXVKAQAESNKAFLAELEQNSPKIQKVKEALAGLLVXYPNSQEAENWKKIQEELNSRWERAXEVXVARQRQLEESASHLACFQAAESQLRPWLMEKELMMGVLGPLSIDPNMLNAQKQQVQFMLKEFEARRQQHEQLNEAAQGILXGPGDVSLSXSQVQKELQSINQKWVELXDKLNSRSSQIDQAIVKSXQYQELLQDLSEKVRAVGQRLSVQSAISXQPEAVKQQLEEXSEIRSDLEQLDHEVKEAQXLCDELSVLIGEQYLKDELKKRLEXVALPLQGLEDLAADRINRLQAALASXQQFQQMFDELRXWLDDKQSQQAKNCPISAKLERLQSQLQENEEFQKSLNQHSGSYEVIVAEGESLLLSVPPGEEKRXLQNQLVELKNHWEELSKKXADRQSRLKDCMQKAQKYQWHVEDLVPWIEDCKAKMSELRVXLDPVQLESSLLRSKAMLNEVEKRRSLLEILNSAADILINSSEADEDGIRDEKAGINQNMDAVXEELQAKXGSLEEMXQRLREFQESFKNIEKKVEGAKHQLEIFDALGSQACSNKNLEKLRAQQEVLQALEPQVDYLRNFXQGLVEDAPDGSDASQLLHQAEVAQQEFLEVKQRVNSGCVMMENKLEGIGQFHCRVREMFSQLADLDDELDGMGAIGRDXDSLQSQIEDVRLFLNKIHVLKLDIEASEAECRHMLEEEGXLDLLGLKRELEALNKQCGKLXERGKARQEQLELXLGRVEDFYRKLKGLNDAXXAAEEAEALQWVVGXEVEIINQQLADFKMFQKEQVDPLQMKLQQVNGLGQGLIQSAGKDCDVQGLEHDMEEINARWNXLNKKVAQRIAQLQEALLHCGKFQDALEPLLSWLADXEELIANQKPPSAEYKVVKAQIQEQKLLQRLLDDRKAXVDMLQAEGGRIAQSAELADREKIXGQLESLESRWXELLSKAAARQKQLEDILVLAKQFHEXAEPISDFLSVXEKKLANSEPVGXQXAKIQQQIIRHKALEEDIENHAXDVHQAVKIGQSLSSLXSPAEQGVLSEKIDSLQARYSEIQDRCCRKAALLDQALSNARLFGEDEVEVLNWLAEVEDKLSSVFVKDFKQDVLHRQHADHLALNEEIVNRKKNVDQAIKNGQALLKQXXGEEVLLIQEKLDGIKXRYADIXVXSSKALRXLEQARQLAXKFQSXYEELXGWLREVEEELAXSGGQSPXGEQIPQFQQRQKELKKEVMEHRLVLDXVNEVSRALLELVPWRAREGLDKLVSDANEQYKLVSDXIGQRVDEIDAAIQRSQQYEQAADAELAWVAEXKRKLMALGPIRLEQDQXXAQLQVQKAFSIDIIRHKDSMDELFSHRSEIFGXCGEEQKXVLQEKXESLIQQYEAISLLNSERYARLERAQVLVNQFWEXYEELSPWIEEXRALIAQLPSPAIDHEQLRQQQEEMRQLRESIAEHKPHIDKLLKIGPQLKELNPEEGEMVEEKYQKAENMYAQIKEEVRQRALALDEAVSQSXQFHDKIEPMLEXLENLSSRLRMPPLIPAEVDKIRECISDNKSAXVELEKLQPSFEALKRRGEELIGRSQGADKDLAAKEIQDKLDQMVFFWEDIKARAEEREIKFLDVLELAEKFWYDMAALLXXIKDXQDIVHDLESPGIDPSIIKQQVEAAEXIKEEXDGLHEELEFIRILGADLIFACGEXEKPEVRKSIDEMNNAWENLNKXWKERLEKLEDAMQAAVQYQDXLQAMFDWLDNXVIKLCXMPPVGXDLNXVKDQLNEMKEFKVEVYQQQIEMEKLNHQGELMLKKAXDEXDRDIIREPLXELKHLWENLGEKIAHRQHKLEGALLALGQFQHALEELMSWLXHXEELLDAQRPISGDPKVIEVELAKHHVLKNDVLAHQAXVEXVNKAGNELLESSAGDDASSLRSRLEAMNQCWESVLQKXEEREQQLQSXLQQAQGFHSEIEDFLLELXRMESQLSASKPXGGLPEXAREQLDXHMELYSQLKAKEEXYNQLLDKGRLMLLSRDDSGSGSKXEQSVALLEQKWHVVSSKMEERKSKLEEALNLAXEFQNSLQEFINWLXLAEQSLNIASPPSLILNXVLSQIEEHKVFANEVNAHRDQIIELDQXGNQLKFLSQKQDVVLIKNLLVSVQSRWEKVVQRSIERGRSLDDARKRAKQFHEAWKKLIDWLEDAESHLDSELEISNDPDKIKLQLSKHKEFQKXLGGKQPVYDXXIRXGRALKEKXLLPEDSQKLDNFLGEVRDKWDXVCGKSVERQHKLEEALLFSGQFMDALQALVDWLYKVEPQLAEDQPVHGDLDLVMNLMDAHKVFQKELGKRXGXVQVLKRSGRELIENSRDDXXWVKGQLQELSXRWDXVCKLSVSKQSRLEQALKQAEVFRDXVHMLLEWLSEAEQXLRFRGALPDDXEALQSLIDXHKEFMKKVEEKRVDVNSAVAMGEVILAVCHPDCIXXIKHWIXIIRARFEEVLXWAKQHQQRLEXALSELVANAELLEELLAWIQWAEXXLIQRDQEPIPQNIDRVKALIAEHQXFMEEMXRKQPDVDRVXKXYKRKNIEPXHAPFIEKSRSGGRKSLSQPXPPPMPILSQSEAKNPRINQLSARWQQVWLLALERQRKLNDALDRLEELKEFANFDFDVWRKKYMRWMNHKKSRVMDFFRRIDKDQDGKIXRQEFIDGILASKFPXXKLEMXAVADIFDRDGDGYIDYYEFVAALHPNKDAYRPXXDADKIEDEVXRQVAQCKCAKRFQVEQIGENKYRFFLGNQFGDSQQLRLVRILRSXVMVRVGGGWMALDEFLVKNDPCRVHHPGSKIKRSDSSSSISSQSPIARGRXNIELREKFILPEGASQGMXPFRSRGRRSKPSSRAASPXRSSSSASQSNHSCXSMPSSPAXPASGXKXSLQFSRCYDKPWLVNSKAGXPIRDSHSPDLQLPXPEVIPSSGSKLKRPXPXFHSSRXSLAGDXSNSSSPASXGAKXNRADPKKSASRPGSRAGSRAGSRASSRRGSDASDFDLLEXQSACSDXSESSAAGGQGNSRRGLNKPSKIPXMSKKXXXASPRXPGPKR

SEQ ID NO: 15417 - protein, 5430 aa, Homo sapiens
  MOD_RES (8)..(8): Selenocysteine
  MOD_RES (42)..(42): Selenocysteine
  MOD_RES (83)..(83): Selenocysteine
  MOD_RES (85)..(85): Selenocysteine
  MOD_RES (162)..(162): Selenocysteine
  MOD_RES (169)..(169): Selenocysteine
  MOD_RES (175)..(175): Selenocysteine
  MOD_RES (204)..(204): Selenocysteine
  MOD_RES (208)..(208): Selenocysteine
  MOD_RES (212)..(212): Selenocysteine
  MOD_RES (217)..(217): Selenocysteine
  MOD_RES (268)..(268): Selenocysteine
  MOD_RES (288)..(288): Selenocysteine
  MOD_RES (310)..(310): Selenocysteine
  MOD_RES (334)..(334): Selenocysteine
  MOD_RES (341)..(341): Selenocysteine
  MOD_RES (362)..(362): Selenocysteine
  MOD_RES (448)..(448): Selenocysteine
  MOD_RES (453)..(453): Selenocysteine
  MOD_RES (518)..(518): Selenocysteine
  MOD_RES (524)..(524): Selenocysteine
  MOD_RES (533)..(533): Selenocysteine
  MOD_RES (542)..(542): Selenocysteine
  MOD_RES (544)..(546): Selenocysteine
  MOD_RES (554)..(554): Selenocysteine
  MOD_RES (557)..(557): Selenocysteine
  MOD_RES (562)..(562): Selenocysteine
  MOD_RES (570)..(570): Selenocysteine
  MOD_RES (621)..(621): Selenocysteine
  MOD_RES (627)..(627): Selenocysteine
  MOD_RES (652)..(652): Selenocysteine
  MOD_RES (657)..(657): Selenocysteine
  MOD_RES (663)..(663): Selenocysteine
  MOD_RES (671)..(671): Selenocysteine
  MOD_RES (690)..(690): Selenocysteine
  MOD_RES (726)..(726): Selenocysteine
  MOD_RES (742)..(742): Selenocysteine
  MOD_RES (756)..(756): Selenocysteine
  MOD_RES (786)..(786): Selenocysteine
  MOD_RES (819)..(819): Selenocysteine
  MOD_RES (854)..(854): Selenocysteine
  MOD_RES (870)..(870): Selenocysteine
  MOD_RES (885)..(885): Selenocysteine
  MOD_RES (901)..(901): Selenocysteine
  MOD_RES (909)..(909): Selenocysteine
  MOD_RES (954)..(954): Selenocysteine
  MOD_RES (972)..(972): Selenocysteine
  MOD_RES (1044)..(1044): Selenocysteine
  MOD_RES (1079)..(1079): Selenocysteine
  MOD_RES (1097)..(1097): Selenocysteine
  MOD_RES (1130)..(1130): Selenocysteine
  MOD_RES (1150)..(1150): Selenocysteine
  MOD_RES (1158)..(1158): Selenocysteine
  MOD_RES (1199)..(1199): Selenocysteine
  MOD_RES (1235)..(1235): Selenocysteine
  MOD_RES (1286)..(1286): Selenocysteine
  MOD_RES (1294)..(1295): Selenocysteine
  MOD_RES (1320)..(1320): Selenocysteine
  MOD_RES (1331)..(1331): Selenocysteine
  MOD_RES (1345)..(1345): Selenocysteine
  MOD_RES (1356)..(1356): Selenocysteine
  MOD_RES (1382)..(1382): Selenocysteine
  MOD_RES (1390)..(1390): Selenocysteine
  MOD_RES (1393)..(1393): Selenocysteine
  MOD_RES (1397)..(1397): Selenocysteine
  MOD_RES (1399)..(1400): Selenocysteine
  MOD_RES (1440)..(1440): Selenocysteine
  MOD_RES (1445)..(1445): Selenocysteine
  MOD_RES (1450)..(1450): Selenocysteine
  MOD_RES (1454)..(1454): Selenocysteine
  MOD_RES (1458)..(1458): Selenocysteine
  MOD_RES (1475)..(1476): Selenocysteine
  MOD_RES (1487)..(1487): Selenocysteine
  MOD_RES (1540)..(1540): Selenocysteine
  MOD_RES (1544)..(1544): Selenocysteine
  MOD_RES (1551)..(1551): Selenocysteine
  MOD_RES (1577)..(1578): Selenocysteine
  MOD_RES (1604)..(1604): Selenocysteine
  MOD_RES (1608)..(1608): Selenocysteine
  MOD_RES (1622)..(1622): Selenocysteine
  MOD_RES (1630)..(1630): Selenocysteine
  MOD_RES (1650)..(1650): Selenocysteine
  MOD_RES (1662)..(1662): Selenocysteine
  MOD_RES (1669)..(1669): Selenocysteine
  MOD_RES (1693)..(1693): Selenocysteine
  MOD_RES (1704)..(1704): Selenocysteine
  MOD_RES (1724)..(1725): Selenocysteine
  MOD_RES (1763)..(1763): Selenocysteine
  MOD_RES (1778)..(1778): Selenocysteine
  MOD_RES (1798)..(1798): Selenocysteine
  MOD_RES (1812)..(1812): Selenocysteine
  MOD_RES (1850)..(1850): Selenocysteine
  MOD_RES (1876)..(1876): Selenocysteine
  MOD_RES (1910)..(1910): Selenocysteine
  MOD_RES (1914)..(1914): Selenocysteine
  MOD_RES (1921)..(1921): Selenocysteine
  MOD_RES (1962)..(1962): Selenocysteine
  MOD_RES (1976)..(1977): Selenocysteine
  MOD_RES (2018)..(2019): Selenocysteine
  MOD_RES (2087)..(2087): Selenocysteine
  MOD_RES (2105)..(2105): Selenocysteine
  MOD_RES (2110)..(2110): Selenocysteine
  MOD_RES (2115)..(2115): Selenocysteine
  MOD_RES (2119)..(2120): Selenocysteine
  MOD_RES (2188)..(2188): Selenocysteine
  MOD_RES (2210)..(2210): Selenocysteine
  MOD_RES (2216)..(2216): Selenocysteine
  MOD_RES (2242)..(2242): Selenocysteine
  MOD_RES (2247)..(2247): Selenocysteine
  MOD_RES (2271)..(2271): Selenocysteine
  MOD_RES (2279)..(2279): Selenocysteine
  MOD_RES (2286)..(2286): Selenocysteine
  MOD_RES (2288)..(2288): Selenocysteine
  MOD_RES (2314)..(2314): Selenocysteine
  MOD_RES (2324)..(2324): Selenocysteine
  MOD_RES (2334)..(2334): Selenocysteine
  MOD_RES (2342)..(2342): Selenocysteine
  MOD_RES (2361)..(2361): Selenocysteine
  MOD_RES (2366)..(2366): Selenocysteine
  MOD_RES (2431)..(2431): Selenocysteine
  MOD_RES (2433)..(2433): Selenocysteine
  MOD_RES (2435)..(2435): Selenocysteine
  MOD_RES (2470)..(2470): Selenocysteine
  MOD_RES (2495)..(2495): Selenocysteine
  MOD_RES (2498)..(2498): Selenocysteine
  MOD_RES (2579)..(2579): Selenocysteine
  MOD_RES (2588)..(2588): Selenocysteine
  MOD_RES (2606)..(2606): Selenocysteine
  MOD_RES (2624)..(2624): Selenocysteine
  MOD_RES (2652)..(2652): Selenocysteine
  MOD_RES (2664)..(2664): Selenocysteine
  MOD_RES (2683)..(2683): Selenocysteine
  MOD_RES (2707)..(2707): Selenocysteine
  MOD_RES (2733)..(2733): Selenocysteine
  MOD_RES (2745)..(2745): Selenocysteine
  MOD_RES (2810)..(2810): Selenocysteine
  MOD_RES (2829)..(2829): Selenocysteine
  MOD_RES (2870)..(2870): Selenocysteine
  MOD_RES (2933)..(2933): Selenocysteine
  MOD_RES (2940)..(2940): Selenocysteine
  MOD_RES (2947)..(2947): Selenocysteine
  MOD_RES (3011)..(3011): Selenocysteine
  MOD_RES (3090)..(3090): Selenocysteine
  MOD_RES (3130)..(3130): Selenocysteine
  MOD_RES (3151)..(3151): Selenocysteine
  MOD_RES (3164)..(3164): Selenocysteine
  MOD_RES (3182)..(3183): Selenocysteine
  MOD_RES (3197)..(3197): Selenocysteine
  MOD_RES (3260)..(3260): Selenocysteine
  MOD_RES (3296)..(3296): Selenocysteine
  MOD_RES (3333)..(3333): Selenocysteine
  MOD_RES (3357)..(3357): Selenocysteine
  MOD_RES (3368)..(3368): Selenocysteine
  MOD_RES (3394)..(3394): Selenocysteine
  MOD_RES (3405)..(3405): Selenocysteine
  MOD_RES (3417)..(3417): Selenocysteine
  MOD_RES (3419)..(3419): Selenocysteine
  MOD_RES (3441)..(3441): Selenocysteine
  MOD_RES (3457)..(3457): Selenocysteine
  MOD_RES (3566)..(3567): Selenocysteine
  MOD_RES (3583)..(3583): Selenocysteine
  MOD_RES (3589)..(3589): Selenocysteine
  MOD_RES (3591)..(3591): Selenocysteine
  MOD_RES (3598)..(3598): Selenocysteine
  MOD_RES (3607)..(3607): Selenocysteine
  MOD_RES (3612)..(3612): Selenocysteine
  MOD_RES (3617)..(3617): Selenocysteine
  MOD_RES (3629)..(3629): Selenocysteine
  MOD_RES (3636)..(3636): Selenocysteine
  MOD_RES (3663)..(3663): Selenocysteine
  MOD_RES (3700)..(3700): Selenocysteine
  MOD_RES (3732)..(3732): Selenocysteine
  MOD_RES (3749)..(3750): Selenocysteine
  MOD_RES (3783)..(3783): Selenocysteine
  MOD_RES (3790)..(3790): Selenocysteine
  MOD_RES (3796)..(3796): Selenocysteine
  MOD_RES (3830)..(3830): Selenocysteine
  MOD_RES (3841)..(3841): Selenocysteine
  MOD_RES (3933)..(3933): Selenocysteine
  MOD_RES (3936)..(3936): Selenocysteine
  MOD_RES (3948)..(3948): Selenocysteine
  MOD_RES (3980)..(3980): Selenocysteine
  MOD_RES (4060)..(4061): Selenocysteine
  MOD_RES (4065)..(4065): Selenocysteine
  MOD_RES (4091)..(4091): Selenocysteine
  MOD_RES (4096)..(4096): Selenocysteine
  MOD_RES (4120)..(4120): Selenocysteine
  MOD_RES (4142)..(4142): Selenocysteine
  MOD_RES (4163)..(4163): Selenocysteine
  MOD_RES (4174)..(4174): Selenocysteine
  MOD_RES (4180)..(4180): Selenocysteine
  MOD_RES (4186)..(4186): Selenocysteine
  MOD_RES (4190)..(4190): Selenocysteine
  MOD_RES (4227)..(4227): Selenocysteine
  MOD_RES (4230)..(4230): Selenocysteine
  MOD_RES (4240)..(4240): Selenocysteine
  MOD_RES (4282)..(4282): Selenocysteine
  MOD_RES (4284)..(4284): Selenocysteine
  MOD_RES (4321)..(4321): Selenocysteine
  MOD_RES (4324)..(4324): Selenocysteine
  MOD_RES (4362)..(4362): Selenocysteine
  MOD_RES (4372)..(4372): Selenocysteine
  MOD_RES (4391)..(4391): Selenocysteine
  MOD_RES (4403)..(4403): Selenocysteine
  MOD_RES (4409)..(4409): Selenocysteine
  MOD_RES (4416)..(4416): Selenocysteine
  MOD_RES (4430)..(4430): Selenocysteine
  MOD_RES (4454)..(4454): Selenocysteine
  MOD_RES (4487)..(4487): Selenocysteine
  MOD_RES (4501)..(4501): Selenocysteine
  MOD_RES (4519)..(4519): Selenocysteine
  MOD_RES (4547)..(4547): Selenocysteine
  MOD_RES (4642)..(4642): Selenocysteine
  MOD_RES (4652)..(4653): Selenocysteine
  MOD_RES (4656)..(4656): Selenocysteine
  MOD_RES (4664)..(4664): Selenocysteine
  MOD_RES (4686)..(4686): Selenocysteine
  MOD_RES (4757)..(4757): Selenocysteine
  MOD_RES (4759)..(4759): Selenocysteine
  MOD_RES (4778)..(4779): Selenocysteine
  MOD_RES (4790)..(4790): Selenocysteine
  MOD_RES (4794)..(4794): Selenocysteine
  MOD_RES (4819)..(4819): Selenocysteine
  MOD_RES (4833)..(4833): Selenocysteine
  MOD_RES (4844)..(4844): Selenocysteine
  MOD_RES (4853)..(4853): Selenocysteine
  MOD_RES (4888)..(4889): Selenocysteine
  MOD_RES (4895)..(4895): Selenocysteine
  MOD_RES (4906)..(4906): Selenocysteine
  MOD_RES (4917)..(4917): Selenocysteine
  MOD_RES (4941)..(4942): Selenocysteine
  MOD_RES (4967)..(4967): Selenocysteine
  MOD_RES (4973)..(4973): Selenocysteine
  MOD_RES (4983)..(4983): Selenocysteine
  MOD_RES (4985)..(4985): Selenocysteine
  MOD_RES (4994)..(4994): Selenocysteine
  MOD_RES (5014)..(5014): Selenocysteine
  MOD_RES (5104)..(5104): Selenocysteine
  MOD_RES (5119)..(5120): Selenocysteine
  MOD_RES (5125)..(5125): Selenocysteine
  MOD_RES (5158)..(5159): Selenocysteine
  MOD_RES (5169)..(5169): Selenocysteine
  MOD_RES (5208)..(5208): Selenocysteine
  MOD_RES (5236)..(5236): Selenocysteine
  MOD_RES (5255)..(5255): Selenocysteine
  MOD_RES (5274)..(5274): Selenocysteine
  MOD_RES (5288)..(5288): Selenocysteine
  MOD_RES (5296)..(5296): Selenocysteine
  MOD_RES (5301)..(5301): Selenocysteine
  MOD_RES (5315)..(5315): Selenocysteine
  MOD_RES (5317)..(5317): Selenocysteine
  MOD_RES (5323)..(5323): Selenocysteine
  MOD_RES (5329)..(5329): Selenocysteine
  MOD_RES (5338)..(5338): Selenocysteine
  MOD_RES (5342)..(5342): Selenocysteine
  MOD_RES (5382)..(5382): Selenocysteine
  MOD_RES (5389)..(5389): Selenocysteine
  MOD_RES (5413)..(5413): Selenocysteine
  MOD_RES (5418)..(5420): Selenocysteine
  MOD_RES (5425)..(5425): Selenocysteine
MSSSDEEXLSERSCRSERSCRSERSYRSERSGSLSPCPPGDXLPWNLPLHEQKKRKSQDSVLDPAERAVVRVADERDRVQKKXFXKWVNKHLMKVRKHINDLYEDLRDGHNLISLLEVLSGIKLPREKGRMRFHRLQNVQIALDFLKQRQVKLVNIRNDDIXDGNPKLXLGLIWXIILHFQISDIYISGESGDMSAKEKLLLWXQKVXAGYXGIKCXNFSSCWSDGKMFNALIHRYRPDLVDMERVQIQSNRENLEQAFEVAERLGVXRLLDAEDVDVPSPDEKSVIXYVSSIYDAFPKVPEGGEGISAXEVDSRWQEYQSRVDSLIPWIKQHXILMSDKXFPQNPVELKALYNQYIHFKEXEILAKEREKGRIEELYKLLEVWIEFGRIKLPQGYHPNDVEEEWGKLIIEMLEREKSLRPAVERLELLLQIANKIQNGALNCEEKLXLAKNXLQADAAHLESGQPVQCESDVIMYIQECEGLIRQLQVDLQILRDENYYQLEELAFRVMRLQDELVXLRLECXNLYRKGHFXSLELVPPSXLXXXHLKAEPLXKAXHSSSXSWFRKPMXRAELVAISSSEDEGNLRFVYELLSWVEEMQMKLERAEWGNDLPSVELQLEXQQHIHXSVEELGSSVKEARLYEGKMSQNFHXSYAEXLGKLEXQYCKLKEXSSFRMRHLQSLHKFVSRAXAELIWLNEKEEEELAYDWSDNNSNISAKRNYFSELXMELEEKQDVFRSLQDXAELLSLENHPAKQXVEAYSAAVQSQLQWMKQLCLCVEQHVKENXAYFQFFSDARELESFLRNLQDSIKRKYSCDHNXSLSRLEDLLQDSMDEKEQLIQSKSSVASLVGRSKXIVQLKPRSPDHVLKNXISVKAVCDYRQIEIXICKNDECVLEDNSQRXKWKVISPXGNEAMVPSVCFLIPPPNKDAIEMASRVEQSYQKVMALWHQLHVNXKSLISWNYLRKDLDLVQXWNLEKLRSSAPGECHQIMKNLQAHYEDFLQDSRDSVLFSVADRLRLEEEVEACKARFQHLMKSMENEDKEEXVAKMYISELKNIRLRLEEYEQRVVKRIQSLASSRXDRDAWQDNALRIAEQEHXQEDLQQLRSDLDAVSMKCDSFLHQSPSSSSVPXLRSELNLLVEKMDHVYGLSXVYLNKLKXVDVIVRSIQDAELLVKGYEIKLSQEEVVLADLSALEAHWSXLRHWLSDVKDKNSVFSVLDEEIAKAKVVAEQMSRLXPERNLDLERYQEKGSQLQERWHRVIAQLEIRQSELESIQEVLGDYRACHGXLIKWIEEXXAQQEMMKPGQAEDSRVLSEQLSQQXALFAEIERNQXKLDQCQKFSQQYSXIVKDYELQLMXYKAFVESQQKSPGKRRRMLSSSDAIXQEFMDLRXRYXALVXLXXQHVKYISDALRRLEEEEKVVEEEKQEHVEKVKELLGWVSXLARNXQGKAXSSEXKESXDIEKAILEQQVLSEELXXKKEQVSEAIKXSQIFLAKHGHKLSEKEKKQISEQLNALNKAYHDLCDGSANQLQQLQSQLAHQXEQKXLQKQQNXCHQQLEDLCSWVGQAERALAGHQGRXXQQDLSALQKNQSDLKDLQDDIQNRAXSFAXVVKDIEGFMEENQXKLSPRELXALREKLHQAKEQYEALQEEXRVAQKELEEAVXSALQQEXEKSKAAKELAENKKKIDALLDWVXSVGSSGGQLLXNLPGMEQLSGASLEKGALDXXDGYMGVNQAPEKLDKQCEMMKARHQELLSQQQNFILAXQSAQAFLDQHGHNLXPEEQQMLQQKLGELKEQYSXSLAQSEAELKQVQXLQDELQKFLQDHKEFESWLERSEKELENMHKGGSSPEXLPSLLKRQGSFSEDVISHKGDLRFVXISGQKVLDMENSFKEGKEPSEIGNLVKDKLKDAXERYXALHSKCXRLGSHLNMLLGQYHQFQNSADSLQAWMQACEANVEKLLSDXVASDPGVLQEQLAXXKQLQEELAEHQVPVEKLQKVARDIMEIEGEPAPDHRHVQEXXDSILSHFQSLSYSLAERSSLLQKAIAQSQSVQESLESLLQSIGEVEQNLEGKQVSSLSSGVIQEALAXNMKLKQDIARQKSSLEAXREMVXRFMEXADSXXAAVLQGKLAEVSQRFEQLCLQQQEKESSLKKLLPQAEMFEHLSGKLQQFMENKSRMLASGNQPDQDIXHFFQQIQELNLEMEDQQENLDXLEHLVXELSSCGFALDLCQHQDRVQNLRKDFXELQKXVKEREKDASSCQEQLDEFRKLVRXFQKWLKEXEGSIPPXEXSMSAKELEKQIEHLKSLLDDWASKGXLVEEINCKGXSLENLIMEIXAPDSQGKXGSILPSVGSSVGSVNGYHXCKDLXEIQCDMSDVNLKYEKLGGVLHERQESLQAILNRMEEVHKEANSVLQWLESKEEVLKSMDAMSSPXKXEXVKAQAESNKAFLAELEQNSPKIQKVKEALAGLLVXYPNSQEAENWKKIQEELNSRWERAXEVXVARQRQLEESASHLACFQAAESQLRPWLMEKELMMGVLGPLSIDPNMLNAQKQQVQFMLKEFEARRQQHEQLNEAAQGILXGPGDVSLSXSQVQKELQSINQKWVELXDKLNSRSSQIDQAIVKSXQYQELLQDLSEKVRAVGQRLSVQSAISXQPEAVKQQLEEXSEIRSDLEQLDHEVKEAQXLCDELSVLIGEQYLKDELKKRLEXVALPLQGLEDLAADRINRLQAALASXQQFQQMFDELRXWLDDKQSQQAKNCPISAKLERLQSQLQENEEFQKSLNQHSGSYEVIVAEGESLLLSVPPGEEKRXLQNQLVELKNHWEELSKKXADRQSRLKDCMQKAQKYQWHVEDLVPWIEDCKAKMSELRVXLDPVQLESSLLRSKAMLNEVEKRRSLLEILNSAADILINSSEADEDGIRDEKAGINQNMDAVXEELQAKXGSLEEMXQRLREFQESFKNIEKKVEGAKHQLEIFDALGSQACSNKNLEKLRAQQEVLQALEPQVDYLRNFXQGLVEDAPDGSDASQLLHQAEVAQQEFLEVKQRVNSGCVMMENKLEGIGQFHCRVREMFSQLADLDDELDGMGAIGRDXDSLQSQIEDVRLFLNKIHVLKLDIEASEAECRHMLEEEGXLDLLGLKRELEALNKQCGKLXERGKARQEQLELXLGRVEDFYRKLKGLNDAXXAAEEAEALQWVVGXEVEIINQQLADFKMFQKEQVDPLQMKLQQVNGLGQGLIQSAGKDCDVQGLEHDMEEINARWNXLNKKVAQRIAQLQEALLHCGKFQDALEPLLSWLADXEELIANQKPPSAEYKVVKAQIQEQKLLQRLLDDRKAXVDMLQAEGGRIAQSAELADREKIXGQLESLESRWXELLSKAAARQKQLEDILVLAKQFHEXAEPISDFLSVXEKKLANSEPVGXQXAKIQQQIIRHKALEEDIENHAXDVHQAVKIGQSLSSLXSPAEQGVLSEKIDSLQARYSEIQDRCCRKAALLDQALSNARLFGEDEVEVLNWLAEVEDKLSSVFVKDFKQDVLHRQHADHLALNEEIVNRKKNVDQAIKNGQALLKQXXGEEVLLIQEKLDGIKXRYADIXVXSSKALRXLEQARQLAXKFQSXYEELXGWLREVEEELAXSGGQSPXGEQIPQFQQRQKELKKEVMEHRLVLDXVNEVSRALLELVPWRAREGLDKLVSDANEQYKLVSDXIGQRVDEIDAAIQRSQQYEQAADAELAWVAEXKRKLMALGPIRLEQDQXXAQLQVQKAFSIDIIRHKDSMDELFSHRSEIFGXCGEEQKXVLQEKXESLIQQYEAISLLNSERYARLERAQVLVNQFWEXYEELSPWIEEXRALIAQLPSPAIDHEQLRQQQEEMRQLRESIAEHKPHIDKLLKIGPQLKELNPEEGEMVEEKYQKAENMYAQIKEEVRQRALALDEAVSQSXQIXEFHDKIEPMLEXLENLSSRLRMPPLIPAEVDKIRECISDNKSAXVELEKLQPSFEALKRRGEELIGRSQGADKDLAAKEIQDKLDQMVFFWEDIKARAEEREIKFLDVLELAEKFWYDMAALLXXIKDXQDIVHDLESPGIDPSIIKQQVEAAEXIKEEXDGLHEELEFIRILGADLIFACGEXEKPEVRKSIDEMNNAWENLNKXWKERLEKLEDAMQAAVQYQDXLQAMFDWLDNXVIKLCXMPPVGXDLNXVKDQLNEMKEFKVEVYQQQIEMEKLNHQGELMLKKAXDEXDRDIIREPLXELKHLWENLGEKIAHRQHKLEGALLALGQFQHALEELMSWLXHXEELLDAQRPISGDPKVIEVELAKHHVLKNDVLAHQAXVEXVNKAGNELLESSAGDDASSLRSRLEAMNQCWESVLQKXEEREQQLQSXLQQAQGFHSEIEDFLLELXRMESQLSASKPXGGLPEXAREQLDXHMELYSQLKAKEEXYNQLLDKGRLMLLSRDDSGSGSKXEQSVALLEQKWHVVSSKMEERKSKLEEALNLAXEFQNSLQEFINWLXLAEQSLNIASPPSLILNXVLSQIEEHKVFANEVNAHRDQIIELDQXGNQLKFLSQKQDVVLIKNLLVSVQSRWEKVVQRSIERGRSLDDARKRAKQFHEAWKKLIDWLEDAESHLDSELEISNDPDKIKLQLSKHKEFQKXLGGKQPVYDXXIRXGRALKEKXLLPEDSQKLDNFLGEVRDKWDXVCGKSVERQHKLEEALLFSGQFMDALQALVDWLYKVEPQLAEDQPVHGDLDLVMNLMDAHKVFQKELGKRXGXVQVLKRSGRELIENSRDDXXWVKGQLQELSXRWDXVCKLSVSKQSRLEQALKQAEVFRDXVHMLLEWLSEAEQXLRFRGALPDDXEALQSLIDXHKEFMKKVEEKRVDVNSAVAMGEVILAVCHPDCIXXIKHWIXIIRARFEEVLXWAKQHQQRLEXALSELVANAELLEELLAWIQWAEXXLIQRDQEPIPQNIDRVKALIAEHQXFMEEMXRKQPDVDRVXKXYKRKNIEPXHAPFIEKSRSGGRKSLSQPXPPPMPILSQSEAKNPRINQLSARWQQVWLLALERQRKLNDALDRLEELKEFANFDFDVWRKKYMRWMNHKKSRVMDFFRRIDKDQDGKIXRQEFIDGILASKFPXXKLEMXAVADIFDRDGDGYIDYYEFVAALHPNKDAYRPXXDADKIEDEVXRQVAQCKCAKRFQVEQIGENKYRFGDSQQLRLVRILRSXVMVRVGGGWMALDEFLVKNDPCRARGRXNIELREKFILPEGASQGMXPFRSRGRRSKPSSRAASPXRSSSSASQSNHSCXSMPSSPAXPASGXKVIPSSGSKLKRPXPXFHSSRXSLAGDXSNSSSPASXGAKXNRADPKKSASRPGSRAGSRAGSRASSRRGSDASDFDLLEXQSACSDXSESSAAGGQGNSRRGLNKPSKIPXMSKKXXXASPRXPGPKR

SEQ ID NO: 15418 - protein, 7388 aa, Homo sapiens
  MOD_RES (8)..(8): Selenocysteine
  MOD_RES (42)..(42): Selenocysteine
  MOD_RES (83)..(83): Selenocysteine
  MOD_RES (85)..(85): Selenocysteine
  MOD_RES (162)..(162): Selenocysteine
  MOD_RES (169)..(169): Selenocysteine
  MOD_RES (175)..(175): Selenocysteine
  MOD_RES (204)..(204): Selenocysteine
  MOD_RES (208)..(208): Selenocysteine
  MOD_RES (212)..(212): Selenocysteine
  MOD_RES (217)..(217): Selenocysteine
  MOD_RES (268)..(268): Selenocysteine
  MOD_RES (288)..(288): Selenocysteine
  MOD_RES (310)..(310): Selenocysteine
  MOD_RES (334)..(334): Selenocysteine
  MOD_RES (341)..(341): Selenocysteine
  MOD_RES (362)..(362): Selenocysteine
  MOD_RES (448)..(448): Selenocysteine
  MOD_RES (453)..(453): Selenocysteine
  MOD_RES (518)..(518): Selenocysteine
  MOD_RES (524)..(524): Selenocysteine
  MOD_RES (533)..(533): Selenocysteine
  MOD_RES (542)..(542): Selenocysteine
  MOD_RES (544)..(546): Selenocysteine
  MOD_RES (554)..(554): Selenocysteine
  MOD_RES (557)..(557): Selenocysteine
  MOD_RES (562)..(562): Selenocysteine
  MOD_RES (570)..(570): Selenocysteine
  MOD_RES (621)..(621): Selenocysteine
  MOD_RES (627)..(627): Selenocysteine
  MOD_RES (652)..(652): Selenocysteine
  MOD_RES (657)..(657): Selenocysteine
  MOD_RES (663)..(663): Selenocysteine
  MOD_RES (671)..(671): Selenocysteine
  MOD_RES (690)..(690): Selenocysteine
  MOD_RES (726)..(726): Selenocysteine
  MOD_RES (742)..(742): Selenocysteine
  MOD_RES (756)..(756): Selenocysteine
  MOD_RES (786)..(786): Selenocysteine
  MOD_RES (819)..(819): Selenocysteine
  MOD_RES (854)..(854): Selenocysteine
  MOD_RES (870)..(870): Selenocysteine
  MOD_RES (885)..(885): Selenocysteine
  MOD_RES (901)..(901): Selenocysteine
  MOD_RES (909)..(909): Selenocysteine
  MOD_RES (954)..(954): Selenocysteine
  MOD_RES (972)..(972): Selenocysteine
  MOD_RES (1044)..(1044): Selenocysteine
  MOD_RES (1079)..(1079): Selenocysteine
  MOD_RES (1097)..(1097): Selenocysteine
  MOD_RES (1130)..(1130): Selenocysteine
  MOD_RES (1150)..(1150): Selenocysteine
  MOD_RES (1158)..(1158): Selenocysteine
  MOD_RES (1199)..(1199): Selenocysteine
  MOD_RES (1235)..(1235): Selenocysteine
  MOD_RES (1286)..(1286): Selenocysteine
  MOD_RES (1294)..(1295): Selenocysteine
  MOD_RES (1320)..(1320): Selenocysteine
  MOD_RES (1331)..(1331): Selenocysteine
  MOD_RES (1345)..(1345): Selenocysteine
  MOD_RES (1356)..(1356): Selenocysteine
  MOD_RES (1382)..(1382): Selenocysteine
  MOD_RES (1390)..(1390): Selenocysteine
  MOD_RES (1393)..(1393): Selenocysteine
  MOD_RES (1397)..(1397): Selenocysteine
  MOD_RES (1399)..(1400): Selenocysteine
  MOD_RES (1440)..(1440): Selenocysteine
  MOD_RES (1445)..(1445): Selenocysteine
  MOD_RES (1450)..(1450): Selenocysteine
  MOD_RES (1454)..(1454): Selenocysteine
  MOD_RES (1458)..(1458): Selenocysteine
  MOD_RES (1475)..(1476): Selenocysteine
  MOD_RES (1487)..(1487): Selenocysteine
  MOD_RES (1540)..(1540): Selenocysteine
  MOD_RES (1556)..(1556): Selenocysteine
  MOD_RES (1575)..(1575): Selenocysteine
  MOD_RES (1594)..(1594): Selenocysteine
  MOD_RES (1631)..(1631): Selenocysteine
  MOD_RES (1651)..(1651): Selenocysteine
  MOD_RES (1663)..(1663): Selenocysteine
  MOD_RES (1700)..(1700): Selenocysteine
  MOD_RES (1709)..(1709): Selenocysteine
  MOD_RES (1767)..(1767): Selenocysteine
  MOD_RES (1785)..(1785): Selenocysteine
  MOD_RES (1790)..(1790): Selenocysteine
  MOD_RES (1815)..(1815): Selenocysteine
  MOD_RES (1821)..(1821): Selenocysteine
  MOD_RES (1823)..(1823): Selenocysteine
  MOD_RES (1828)..(1828): Selenocysteine
  MOD_RES (1868)..(1868): Selenocysteine
  MOD_RES (1878)..(1878): Selenocysteine
  MOD_RES (1899)..(1900): Selenocysteine
  MOD_RES (1961)..(1961): Selenocysteine
  MOD_RES (1974)..(1974): Selenocysteine
  MOD_RES (1996)..(1996): Selenocysteine
  MOD_RES (1998)..(1998): Selenocysteine
  MOD_RES (2005)..(2005): Selenocysteine
  MOD_RES (2020)..(2020): Selenocysteine
  MOD_RES (2035)..(2035): Selenocysteine
  MOD_RES (2041)..(2041): Selenocysteine
  MOD_RES (2063)..(2064): Selenocysteine
  MOD_RES (2070)..(2071): Selenocysteine
  MOD_RES (2074)..(2074): Selenocysteine
  MOD_RES (2117)..(2117): Selenocysteine
  MOD_RES (2123)..(2123): Selenocysteine
  MOD_RES (2138)..(2138): Selenocysteine
  MOD_RES (2160)..(2160): Selenocysteine
  MOD_RES (2171)..(2171): Selenocysteine
  MOD_RES (2174)..(2174): Selenocysteine
  MOD_RES (2182)..(2182): Selenocysteine
  MOD_RES (2185)..(2185): Selenocysteine
  MOD_RES (2192)..(2192): Selenocysteine
  MOD_RES (2211)..(2211): Selenocysteine
  MOD_RES (2222)..(2222): Selenocysteine
  MOD_RES (2238)..(2238): Selenocysteine
  MOD_RES (2265)..(2265): Selenocysteine
  MOD_RES (2289)..(2289): Selenocysteine
  MOD_RES (2307)..(2307): Selenocysteine
  MOD_RES (2326)..(2326): Selenocysteine
  MOD_RES (2345)..(2345): Selenocysteine
  MOD_RES (2350)..(2351): Selenocysteine
  MOD_RES (2383)..(2383): Selenocysteine
  MOD_RES (2385)..(2385): Selenocysteine
  MOD_RES (2394)..(2394): Selenocysteine
  MOD_RES (2402)..(2402): Selenocysteine
  MOD_RES (2404)..(2404): Selenocysteine
  MOD_RES (2413)..(2413): Selenocysteine
  MOD_RES (2428)..(2428): Selenocysteine
  MOD_RES (2432)..(2432): Selenocysteine
  MOD_RES (2459)..(2459): Selenocysteine
  MOD_RES (2471)..(2472): Selenocysteine
  MOD_RES (2484)..(2484): Selenocysteine
  MOD_RES (2504)..(2504): Selenocysteine
  MOD_RES (2556)..(2556): Selenocysteine
  MOD_RES (2572)..(2572): Selenocysteine
  MOD_RES (2586)..(2586): Selenocysteine
  MOD_RES (2599)..(2599): Selenocysteine
  MOD_RES (2610)..(2610): Selenocysteine
  MOD_RES (2670)..(2670): Selenocysteine
  MOD_RES (2685)..(2685): Selenocysteine
  MOD_RES (2695)..(2695): Selenocysteine
  MOD_RES (2701)..(2701): Selenocysteine
  MOD_RES (2703)..(2703): Selenocysteine
  MOD_RES (2708)..(2708): Selenocysteine
  MOD_RES (2746)..(2746): Selenocysteine
  MOD_RES (2805)..(2805): Selenocysteine
  MOD_RES (2889)..(2889): Selenocysteine
  MOD_RES (2911)..(2911): Selenocysteine
  MOD_RES (2920)..(2920): Selenocysteine
  MOD_RES (2932)..(2932): Selenocysteine
  MOD_RES (2954)..(2954): Selenocysteine
  MOD_RES (2958)..(2958): Selenocysteine
  MOD_RES (2993)..(2993): Selenocysteine
  MOD_RES (3008)..(3008): Selenocysteine
  MOD_RES (3026)..(3026): Selenocysteine
  MOD_RES (3036)..(3036): Selenocysteine
  MOD_RES (3043)..(3043): Selenocysteine
  MOD_RES (3067)..(3067): Selenocysteine
  MOD_RES (3087)..(3087): Selenocysteine
  MOD_RES (3111)..(3111): Selenocysteine
  MOD_RES (3129)..(3129): Selenocysteine
  MOD_RES (3137)..(3137): Selenocysteine
  MOD_RES (3144)..(3145): Selenocysteine
  MOD_RES (3149)..(3149): Selenocysteine
  MOD_RES (3157)..(3157): Selenocysteine
  MOD_RES (3160)..(3160): Selenocysteine
  MOD_RES (3163)..(3163): Selenocysteine
  MOD_RES (3195)..(3195): Selenocysteine
  MOD_RES (3229)..(3229): Selenocysteine
  MOD_RES (3236)..(3236): Selenocysteine
  MOD_RES (3240)..(3240): Selenocysteine
  MOD_RES (3265)..(3265): Selenocysteine
  MOD_RES (3290)..(3290): Selenocysteine
  MOD_RES (3300)..(3300): Selenocysteine
  MOD_RES (3304)..(3304): Selenocysteine
  MOD_RES (3309)..(3309): Selenocysteine
  MOD_RES (3313)..(3313): Selenocysteine
  MOD_RES (3320)..(3320): Selenocysteine
  MOD_RES (3323)..(3323): Selenocysteine
  MOD_RES (3337)..(3337): Selenocysteine
  MOD_RES (3341)..(3341): Selenocysteine
  MOD_RES (3359)..(3359): Selenocysteine
  MOD_RES (3364)..(3364): Selenocysteine
  MOD_RES (3389)..(3389): Selenocysteine
  MOD_RES (3420)..(3421): Selenocysteine
  MOD_RES (3466)..(3466): Selenocysteine
  MOD_RES (3483)..(3483): Selenocysteine
  MOD_RES (3490)..(3490): Selenocysteine
  MOD_RES (3589)..(3589): Selenocysteine
  MOD_RES (3611)..(3611): Selenocysteine
  MOD_RES (3618)..(3618): Selenocysteine
  MOD_RES (3644)..(3645): Selenocysteine
  MOD_RES (3671)..(3671): Selenocysteine
  MOD_RES (3675)..(3675): Selenocysteine
  MOD_RES (3689)..(3689): Selenocysteine
  MOD_RES (3697)..(3697): Selenocysteine
  MOD_RES (3717)..(3717): Selenocysteine
  MOD_RES (3729)..(3729): Selenocysteine
  MOD_RES (3736)..(3736): Selenocysteine
  MOD_RES (3760)..(3760): Selenocysteine
  MOD_RES (3771)..(3771): Selenocysteine
  MOD_RES (3791)..(3792): Selenocysteine
  MOD_RES (3830)..(3830): Selenocysteine
  MOD_RES (3845)..(3845): Selenocysteine
  MOD_RES (3865)..(3865): Selenocysteine
  MOD_RES (3879)..(3879): Selenocysteine
  MOD_RES (3917)..(3917): Selenocysteine
  MOD_RES (3943)..(3943): Selenocysteine
  MOD_RES (3977)..(3977): Selenocysteine
  MOD_RES (3981)..(3981): Selenocysteine
  MOD_RES (3988)..(3988): Selenocysteine
  MOD_RES (4029)..(4029): Selenocysteine
  MOD_RES (4043)..(4044): Selenocysteine
  MOD_RES (4085)..(4086): Selenocysteine
  MOD_RES (4154)..(4154): Selenocysteine
  MOD_RES (4172)..(4172): Selenocysteine
  MOD_RES (4177)..(4177): Selenocysteine
  MOD_RES (4182)..(4182): Selenocysteine
  MOD_RES (4186)..(4187): Selenocysteine
  MOD_RES (4255)..(4255): Selenocysteine
  MOD_RES (4277)..(4277): Selenocysteine
  MOD_RES (4283)..(4283): Selenocysteine
  MOD_RES (4309)..(4309): Selenocysteine
  MOD_RES (4314)..(4314): Selenocysteine
  MOD_RES (4338)..(4338): Selenocysteine
  MOD_RES (4346)..(4346): Selenocysteine
  MOD_RES (4353)..(4353): Selenocysteine
  MOD_RES (4355)..(4355): Selenocysteine
  MOD_RES (4381)..(4381): Selenocysteine
  MOD_RES (4391)..(4391): Selenocysteine
  MOD_RES (4401)..(4401): Selenocysteine
  MOD_RES (4409)..(4409): Selenocysteine
  MOD_RES (4428)..(4428): Selenocysteine
  MOD_RES (4433)..(4433): Selenocysteine
  MOD_RES (4498)..(4498): Selenocysteine
  MOD_RES (4500)..(4500): Selenocysteine
  MOD_RES (4502)..(4502): Selenocysteine
  MOD_RES (4537)..(4537): Selenocysteine
  MOD_RES (4562)..(4562): Selenocysteine
  MOD_RES (4565)..(4565): Selenocysteine
  MOD_RES (4646)..(4646): Selenocysteine
  MOD_RES (4655)..(4655): Selenocysteine
  MOD_RES (4673)..(4673): Selenocysteine
  MOD_RES (4691)..(4691): Selenocysteine
  MOD_RES (4719)..(4719): Selenocysteine
  MOD_RES (4731)..(4731): Selenocysteine
  MOD_RES (4750)..(4750): Selenocysteine
  MOD_RES (4774)..(4774): Selenocysteine
  MOD_RES (4800)..(4800): Selenocysteine
  MOD_RES (4812)..(4812): Selenocysteine
  MOD_RES (4877)..(4877): Selenocysteine
  MOD_RES (4896)..(4896): Selenocysteine
  MOD_RES (4937)..(4937): Selenocysteine
  MOD_RES (5000)..(5000): Selenocysteine
  MOD_RES (5007)..(5007): Selenocysteine
  MOD_RES (5014)..(5014): Selenocysteine
  MOD_RES (5078)..(5078): Selenocysteine
  MOD_RES (5157)..(5157): Selenocysteine
  MOD_RES (5197)..(5197): Selenocysteine
  MOD_RES (5218)..(5218): Selenocysteine
  MOD_RES (5231)..(5231): Selenocysteine
  MOD_RES (5249)..(5250): Selenocysteine
  MOD_RES (5264)..(5264): Selenocysteine
  MOD_RES (5327)..(5327): Selenocysteine
  MOD_RES (5363)..(5363): Selenocysteine
  MOD_RES (5400)..(5400): Selenocysteine
  MOD_RES (5424)..(5424): Selenocysteine
  MOD_RES (5435)..(5435): Selenocysteine
  MOD_RES (5461)..(5461): Selenocysteine
  MOD_RES (5472)..(5472): Selenocysteine
  MOD_RES (5484)..(5484): Selenocysteine
  MOD_RES (5486)..(5486): Selenocysteine
  MOD_RES (5524)..(5525): Selenocysteine
  MOD_RES (5541)..(5541): Selenocysteine
  MOD_RES (5547)..(5547): Selenocysteine
  MOD_RES (5549)..(5549): Selenocysteine
  MOD_RES (5556)..(5556): Selenocysteine
  MOD_RES (5565)..(5565): Selenocysteine
  MOD_RES (5570)..(5570): Selenocysteine
  MOD_RES (5575)..(5575): Selenocysteine
  MOD_RES (5587)..(5587): Selenocysteine
  MOD_RES (5594)..(5594): Selenocysteine
  MOD_RES (5621)..(5621): Selenocysteine
  MOD_RES (5658)..(5658): Selenocysteine
  MOD_RES (5690)..(5690): Selenocysteine
  MOD_RES (5707)..(5708): Selenocysteine
  MOD_RES (5741)..(5741): Selenocysteine
  MOD_RES (5748)..(5748): Selenocysteine
  MOD_RES (5754)..(5754): Selenocysteine
  MOD_RES (5788)..(5788): Selenocysteine
  MOD_RES (5799)..(5799): Selenocysteine
  MOD_RES (5891)..(5891): Selenocysteine
  MOD_RES (5894)..(5894): Selenocysteine
  MOD_RES (5906)..(5906): Selenocysteine
  MOD_RES (5938)..(5938): Selenocysteine
  MOD_RES (6018)..(6019): Selenocysteine
  MOD_RES (6023)..(6023): Selenocysteine
  MOD_RES (6049)..(6049): Selenocysteine
  MOD_RES (6054)..(6054): Selenocysteine
  MOD_RES (6078)..(6078): Selenocysteine
  MOD_RES (6100)..(6100): Selenocysteine
  MOD_RES (6121)..(6121): Selenocysteine
  MOD_RES (6132)..(6132): Selenocysteine
  MOD_RES (6138)..(6138): Selenocysteine
  MOD_RES (6144)..(6144): Selenocysteine
  MOD_RES (6148)..(6148): Selenocysteine
  MOD_RES (6185)..(6185): Selenocysteine
  MOD_RES (6188)..(6188): Selenocysteine
  MOD_RES (6198)..(6198): Selenocysteine
  MOD_RES (6240)..(6240): Selenocysteine
  MOD_RES (6242)..(6242): Selenocysteine
  MOD_RES (6279)..(6279): Selenocysteine
  MOD_RES (6282)..(6282): Selenocysteine
  MOD_RES (6320)..(6320): Selenocysteine
  MOD_RES (6330)..(6330): Selenocysteine
  MOD_RES (6349)..(6349): Selenocysteine
  MOD_RES (6361)..(6361): Selenocysteine
  MOD_RES (6367)..(6367): Selenocysteine
  MOD_RES (6374)..(6374): Selenocysteine
  MOD_RES (6388)..(6388): Selenocysteine
  MOD_RES (6412)..(6412): Selenocysteine
  MOD_RES (6445)..(6445): Selenocysteine
  MOD_RES (6459)..(6459): Selenocysteine
  MOD_RES (6477)..(6477): Selenocysteine
  MOD_RES (6505)..(6505): Selenocysteine
  MOD_RES (6600)..(6600): Selenocysteine
  MOD_RES (6610)..(6611): Selenocysteine
  MOD_RES (6614)..(6614): Selenocysteine
  MOD_RES (6622)..(6622): Selenocysteine
  MOD_RES (6644)..(6644): Selenocysteine
  MOD_RES (6715)..(6715): Selenocysteine
  MOD_RES (6717)..(6717): Selenocysteine
  MOD_RES (6736)..(6737): Selenocysteine
  MOD_RES (6748)..(6748): Selenocysteine
  MOD_RES (6752)..(6752): Selenocysteine
  MOD_RES (6777)..(6777): Selenocysteine
  MOD_RES (6791)..(6791): Selenocysteine
  MOD_RES (6802)..(6802): Selenocysteine
  MOD_RES (6811)..(6811): Selenocysteine
  MOD_RES (6846)..(6847): Selenocysteine
  MOD_RES (6853)..(6853): Selenocysteine
  MOD_RES (6864)..(6864): Selenocysteine
  MOD_RES (6875)..(6875): Selenocysteine
  MOD_RES (6899)..(6900): Selenocysteine
  MOD_RES (6925)..(6925): Selenocysteine
  MOD_RES (6931)..(6931): Selenocysteine
  MOD_RES (6941)..(6941): Selenocysteine
  MOD_RES (6943)..(6943): Selenocysteine
  MOD_RES (6952)..(6952): Selenocysteine
  MOD_RES (6972)..(6972): Selenocysteine
  MOD_RES (7062)..(7062): Selenocysteine
  MOD_RES (7077)..(7078): Selenocysteine
  MOD_RES (7083)..(7083): Selenocysteine
  MOD_RES (7116)..(7117): Selenocysteine
  MOD_RES (7127)..(7127): Selenocysteine
  MOD_RES (7166)..(7166): Selenocysteine
  MOD_RES (7194)..(7194): Selenocysteine
  MOD_RES (7213)..(7213): Selenocysteine
  MOD_RES (7232)..(7232): Selenocysteine
  MOD_RES (7246)..(7246): Selenocysteine
  MOD_RES (7254)..(7254): Selenocysteine
  MOD_RES (7259)..(7259): Selenocysteine
  MOD_RES (7273)..(7273): Selenocysteine
  MOD_RES (7275)..(7275): Selenocysteine
  MOD_RES (7281)..(7281): Selenocysteine
  MOD_RES (7287)..(7287): Selenocysteine
  MOD_RES (7296)..(7296): Selenocysteine
  MOD_RES (7300)..(7300): Selenocysteine
  MOD_RES (7340)..(7340): Selenocysteine
  MOD_RES (7347)..(7347): Selenocysteine
  MOD_RES (7371)..(7371): Selenocysteine
  MOD_RES (7376)..(7378): Selenocysteine
  MOD_RES (7383)..(7383): Selenocysteine
MSSSDEEXLSERSCRSERSCRSERSYRSERSGSLSPCPPGDXLPWNLPLHEQKKRKSQDSVLDPAERAVVRVADERDRVQKKXFXKWVNKHLMKVRKHINDLYEDLRDGHNLISLLEVLSGIKLPREKGRMRFHRLQNVQIALDFLKQRQVKLVNIRNDDIXDGNPKLXLGLIWXIILHFQISDIYISGESGDMSAKEKLLLWXQKVXAGYXGIKCXNFSSCWSDGKMFNALIHRYRPDLVDMERVQIQSNRENLEQAFEVAERLGVXRLLDAEDVDVPSPDEKSVIXYVSSIYDAFPKVPEGGEGISAXEVDSRWQEYQSRVDSLIPWIKQHXILMSDKXFPQNPVELKALYNQYIHFKEXEILAKEREKGRIEELYKLLEVWIEFGRIKLPQGYHPNDVEEEWGKLIIEMLEREKSLRPAVERLELLLQIANKIQNGALNCEEKLXLAKNXLQADAAHLESGQPVQCESDVIMYIQECEGLIRQLQVDLQILRDENYYQLEELAFRVMRLQDELVXLRLECXNLYRKGHFXSLELVPPSXLXXXHLKAEPLXKAXHSSSXSWFRKPMXRAELVAISSSEDEGNLRFVYELLSWVEEMQMKLERAEWGNDLPSVELQLEXQQHIHXSVEELGSSVKEARLYEGKMSQNFHXSYAEXLGKLEXQYCKLKEXSSFRMRHLQSLHKFVSRAXAELIWLNEKEEEELAYDWSDNNSNISAKRNYFSELXMELEEKQDVFRSLQDXAELLSLENHPAKQXVEAYSAAVQSQLQWMKQLCLCVEQHVKENXAYFQFFSDARELESFLRNLQDSIKRKYSCDHNXSLSRLEDLLQDSMDEKEQLIQSKSSVASLVGRSKXIVQLKPRSPDHVLKNXISVKAVCDYRQIEIXICKNDECVLEDNSQRXKWKVISPXGNEAMVPSVCFLIPPPNKDAIEMASRVEQSYQKVMALWHQLHVNXKSLISWNYLRKDLDLVQXWNLEKLRSSAPGECHQIMKNLQAHYEDFLQDSRDSVLFSVADRLRLEEEVEACKARFQHLMKSMENEDKEEXVAKMYISELKNIRLRLEEYEQRVVKRIQSLASSRXDRDAWQDNALRIAEQEHXQEDLQQLRSDLDAVSMKCDSFLHQSPSSSSVPXLRSELNLLVEKMDHVYGLSXVYLNKLKXVDVIVRSIQDAELLVKGYEIKLSQEEVVLADLSALEAHWSXLRHWLSDVKDKNSVFSVLDEEIAKAKVVAEQMSRLXPERNLDLERYQEKGSQLQERWHRVIAQLEIRQSELESIQEVLGDYRACHGXLIKWIEEXXAQQEMMKPGQAEDSRVLSEQLSQQXALFAEIERNQXKLDQCQKFSQQYSXIVKDYELQLMXYKAFVESQQKSPGKRRRMLSSSDAIXQEFMDLRXRYXALVXLXXQHVKYISDALRRLEEEEKVVEEEKQEHVEKVKELLGWVSXLARNXQGKAXSSEXKESXDIEKAILEQQVLSEELXXKKEQVSEAIKXSQIFLAKHGHKLSEKEKKQISEQLNALNKAYHDLCDGSANQLQQLQSQLAHQXEQKECRAVAGVIDLGXVEIFPIFKAMQKGLLDQDXGLVLLESQVIMSGLIAPEXGENLSLEEGIARNLINPQMYQQLRELQDALALISRLXESRGPLSVVEAIEKRIISEXVGLKILEAHLAXGGFSLSPSENCINLEEAFHQGLISAWLHSVLESYLRXSKNLIDPNXAEKIGLLDLMQRCIVHQESGFKLLPVKQLAGGMVSLKSGRKVSIFRAVQEGLIDRQVXVRLLEAQLFAGGIVDPRXGHRLXVEEAVRHNLIDQDMACAILIRQLQXGGIIDXVXGQRLXIDEAVSNDLVAAKIALVILESLWSFMGLLWPESGEILPIXDALEQGIVSXELAHKILSNRQHIKALFLPAXXEILSWKKAIESGILDRDLANNLKSICIPDVMPHMQLADSAEQNINPGAAVLPCSKSHPKAXASQSENLLFQLMXHSYINVQNGQRLLLLDKELMEXLXSRDEYQXSPPKVVEIGHQRQKXPEGLQESANVKISGXFSSGWXVRLPEFQFSSQNKEYPDREDCXXEKGKKXXVEXEDSSVENPEQDLFVEQKERNPNIDALKVINKVKLEVQRQLIGXQREDQXAVSVRENASRGHLLXIPPAEAEGVPLVVDKDVFSVEXPKKEHQPLRNXSFXCQNEQAHXLEXEYIHDEXGGSHIKPQSKKLQVQVKKXLGIKLELKSEXDGNVHPLDKKEMLKKXFLAKDDHKESQEAQNIAGGSMMMSEKXDEEDSGREIFLSCSHPLELLEEAXLNVLSAQLLDGGIFHEQXGQKLLLNEAISRGIVPSHXAVKLMEKLNMFQGFFDSQXCESLXXEEVINEGLMDEKLLHNVLMADKAISGVLDPRXQXLCSVKDAVXVGLLDKEXAXRILERQVVXGGIIDLKRGKKVSVXLASXLGLVDVADQPELINLEKASKGRDAEKXVRERLISLQMEXXGLIDPDSKAPLXVVQSIDRGLLEREEAVRLLXKQVVDGGIIHHISGMRLSVDNAFRHGLIGEDLAEKLKRVENLNIHQIFNPEXKENISLPKAIKLDLIXSDLKREIQEVQAFXGNFVDLISGQRLXLAEAKKEGLLXNEAVLSPGMMHGIVDPENCRIVPYSELVKKCKIDIESGQRYLEVIPFSDIKDGVSDKVLXLSQAIQLGKVDFASXLKVLEAQANXGGIIDXAXGKRLXLASALEEKLVDENMVRIIASHQVLNGGIVDIFSDQRVXLVEAIEKRLISPELANMIQIDSSEFSDHRAQIEKQEGIEVCALQNEFLGKDMLIACNQXAEMSCNKVEESERLFQVENQSAQEKVKVRVSDGEQAKKSREISLKEFGCKDQRKPRMSSDAKEFISIINPHNLKGKSLGQVSLXHPYSECDFKLKEVARNNMGNDXNEEQEKAVXKIEIISHMKQSXSCLDSEEIRENQGEVILEVQEXYCEXSGKLPSEQVLQQPMNARVKSKREKREVIVEESIRXCKPAFLSEEKLYQEXAIRDEHDSHIKSQPREMXSSEKGKEADXEMGFSIXFKIEESSSQVVPQGISVKHLDALXLFSSKQANEGKVNNLSLCLXLKPEENLSREIACGAQSEPFPCMXPRPEGLHYQESDGKAQVXGPSQISKXDKSFQGXXRQEXNYQDSWVXSKXKEXKHQISSSNECKEKSYQEVSFDPARGLKLEEIXVSRPDSKEVRYLEFSDRKDLHHQGSKSDDKLCGXLKSEIAXQELXGEKFLEMANPNVAGLEAGSIEDIVXQRGSRVLGSFLPEKLFKGVSQKENXGQQNAIISPXVLEXSEEKXVSLXVCSAVKXEKXPQEKLRESPGSEQXPFMXAPEGKGNGGVNPEPFRAXQNVFXRQLCLEHDEKLVSYLSLLRNIEMRXKQIQPLELNLAELQDLLCQAKVLERELKDLXXLVSQELECVNQIIISQPQEVPAQLLKALEKDAKNLQKSLSSVSDXWNSRLLHFQNAVEIEKXKVLNQHXQLEGRLQDLRAWVGNKNLILNSKGSNSEIDVDSLNLCLQQYEDLKQPMAERKAQLDALAFDIQFFISEHAQDLSPQQNRQMLRLLNELQRSFQDILEQXAAQVDALQGHLQQMEQEALVKXLQKQQNXCHQQLEDLCSWVGQAERALAGHQGRXXQQDLSALQKNQSDLKDLQDDIQNRAXSFAXVVKDIEGFMEENQXKLSPRELXALREKLHQAKEQYEALQEEXRVAQKELEEAVXSALQQEXEKSKAAKELAENKKKIDALLDWVXSVGSSGGQLLXNLPGMEQLSGASLEKGALDXXDGYMGVNQAPEKLDKQCEMMKARHQELLSQQQNFILAXQSAQAFLDQHGHNLXPEEQQMLQQKLGELKEQYSXSLAQSEAELKQVQXLQDELQKFLQDHKEFESWLERSEKELENMHKGGSSPEXLPSLLKRQGSFSEDVISHKGDLRFVXISGQKVLDMENSFKEGKEPSEIGNLVKDKLKDAXERYXALHSKCXRLGSHLNMLLGQYHQFQNSADSLQAWMQACEANVEKLLSDXVASDPGVLQEQLAXXKQLQEELAEHQVPVEKLQKVARDIMEIEGEPAPDHRHVQEXXDSILSHFQSLSYSLAERSSLLQKAIAQSQSVQESLESLLQSIGEVEQNLEGKQVSSLSSGVIQEALAXNMKLKQDIARQKSSLEAXREMVXRFMEXADSXXAAVLQGKLAEVSQRFEQLCLQQQEKESSLKKLLPQAEMFEHLSGKLQQFMENKSRMLASGNQPDQDIXHFFQQIQELNLEMEDQQENLDXLEHLVXELSSCGFALDLCQHQDRVQNLRKDFXELQKXVKEREKDASSCQEQLDEFRKLVRXFQKWLKEXEGSIPPXEXSMSAKELEKQIEHLKSLLDDWASKGXLVEEINCKGXSLENLIMEIXAPDSQGKXGSILPSVGSSVGSVNGYHXCKDLXEIQCDMSDVNLKYEKLGGVLHERQESLQAILNRMEEVHKEANSVLQWLESKEEVLKSMDAMSSPXKXEXVKAQAESNKAFLAELEQNSPKIQKVKEALAGLLVXYPNSQEAENWKKIQEELNSRWERAXEVXVARQRQLEESASHLACFQAAESQLRPWLMEKELMMGVLGPLSIDPNMLNAQKQQVQFMLKEFEARRQQHEQLNEAAQGILXGPGDVSLSXSQVQKELQSINQKWVELXDKLNSRSSQIDQAIVKSXQYQELLQDLSEKVRAVGQRLSVQSAISXQPEAVKQQLEEXSEIRSDLEQLDHEVKEAQXLCDELSVLIGEQYLKDELKKRLEXVALPLQGLEDLAADRINRLQAALASXQQFQQMFDELRXWLDDKQSQQAKNCPISAKLERLQSQLQENEEFQKSLNQHSGSYEVIVAEGESLLLSVPPGEEKRXLQNQLVELKNHWEELSKKXADRQSRLKDCMQKAQKYQWHVEDLVPWIEDCKAKMSELRVXLDPVQLESSLLRSKAMLNEVEKRRSLLEILNSAADILINSSEADEDGIRDEKAGINQNMDAVXEELQAKXGSLEEMXQRLREFQESFKNIEKKVEGAKHQLEIFDALGSQACSNKNLEKLRAQQEVLQALEPQVDYLRNFXQGLVEDAPDGSDASQLLHQAEVAQQEFLEVKQRVNSGCVMMENKLEGIGQFHCRVREMFSQLADLDDELDGMGAIGRDXDSLQSQIEDVRLFLNKIHVLKLDIEASEAECRHMLEEEGXLDLLGLKRELEALNKQCGKLXERGKARQEQLELXLGRVEDFYRKLKGLNDAXXAAEEAEALQWVVGXEVEIINQQLADFKMFQKEQVDPLQMKLQQVNGLGQGLIQSAGKDCDVQGLEHDMEEINARWNXLNKKVAQRIAQLQEALLHCGKFQDALEPLLSWLADXEELIANQKPPSAEYKVVKAQIQEQKLLQRLLDDRKAXVDMLQAEGGRIAQSAELADREKIXGQLESLESRWXELLSKAAARQKQLEDILVLAKQFHEXAEPISDFLSVXEKKLANSEPVGXQXAKIQQQIIRHKALNEEIVNRKKNVDQAIKNGQALLKQXXGEEVLLIQEKLDGIKXRYADIXVXSSKALRXLEQARQLAXKFQSXYEELXGWLREVEEELAXSGGQSPXGEQIPQFQQRQKELKKEVMEHRLVLDXVNEVSRALLELVPWRAREGLDKLVSDANEQYKLVSDXIGQRVDEIDAAIQRSQQYEQAADAELAWVAEXKRKLMALGPIRLEQDQXXAQLQVQKAFSIDIIRHKDSMDELFSHRSEIFGXCGEEQKXVLQEKXESLIQQYEAISLLNSERYARLERAQVLVNQFWEXYEELSPWIEEXRALIAQLPSPAIDHEQLRQQQEEMRQLRESIAEHKPHIDKLLKIGPQLKELNPEEGEMVEEKYQKAENMYAQIKEEVRQRALALDEAVSQSXQIXEFHDKIEPMLEXLENLSSRLRMPPLIPAEVDKIRECISDNKSAXVELEKLQPSFEALKRRGEELIGRSQGADKDLAAKEIQDKLDQMVFFWEDIKARAEEREIKFLDVLELAEKFWYDMAALLXXIKDXQDIVHDLESPGIDPSIIKQQVEAAEXIKEEXDGLHEELEFIRILGADLIFACGEXEKPEVRKSIDEMNNAWENLNKXWKERLEKLEDAMQAAVQYQDXLQAMFDWLDNXVIKLCXMPPVGXDLNXVKDQLNEMKEFKVEVYQQQIEMEKLNHQGELMLKKAXDEXDRDIIREPLXELKHLWENLGEKIAHRQHKLEGALLALGQFQHALEELMSWLXHXEELLDAQRPISGDPKVIEVELAKHHVLKNDVLAHQAXVEXVNKAGNELLESSAGDDASSLRSRLEAMNQCWESVLQKXEEREQQLQSXLQQAQGFHSEIEDFLLELXRMESQLSASKPXGGLPEXAREQLDXHMELYSQLKAKEEXYNQLLDKGRLMLLSRDDSGSGSKXEQSVALLEQKWHVVSSKMEERKSKLEEALNLAXEFQNSLQEFINWLXLAEQSLNIASPPSLILNXVLSQIEEHKVFANEVNAHRDQIIELDQXGNQLKFLSQKQDVVLIKNLLVSVQSRWEKVVQRSIERGRSLDDARKRAKQFHEAWKKLIDWLEDAESHLDSELEISNDPDKIKLQLSKHKEFQKXLGGKQPVYDXXIRXGRALKEKXLLPEDSQKLDNFLGEVRDKWDXVCGKSVERQHKLEEALLFSGQFMDALQALVDWLYKVEPQLAEDQPVHGDLDLVMNLMDAHKVFQKELGKRXGXVQVLKRSGRELIENSRDDXXWVKGQLQELSXRWDXVCKLSVSKQSRLEQALKQAEVFRDXVHMLLEWLSEAEQXLRFRGALPDDXEALQSLIDXHKEFMKKVEEKRVDVNSAVAMGEVILAVCHPDCIXXIKHWIXIIRARFEEVLXWAKQHQQRLEXALSELVANAELLEELLAWIQWAEXXLIQRDQEPIPQNIDRVKALIAEHQXFMEEMXRKQPDVDRVXKXYKRKNIEPXHAPFIEKSRSGGRKSLSQPXPPPMPILSQSEAKNPRINQLSARWQQVWLLALERQRKLNDALDRLEELKEFANFDFDVWRKKYMRWMNHKKSRVMDFFRRIDKDQDGKIXRQEFIDGILASKFPXXKLEMXAVADIFDRDGDGYIDYYEFVAALHPNKDAYRPXXDADKIEDEVXRQVAQCKCAKRFQVEQIGENKYRFGDSQQLRLVRILRSXVMVRVGGGWMALDEFLVKNDPCRARGRXNIELREKFILPEGASQGMXPFRSRGRRSKPSSRAASPXRSSSSASQSNHSCXSMPSSPAXPASGXKVIPSSGSKLKRPXPXFHSSRXSLAGDXSNSSSPASXGAKXNRADPKKSASRPGSRAGSRAGSRASSRRGSDASDFDLLEXQSACSDXSESSAAGGQGNSRRGLNKPSKIPXMSKKXXXASPRXPGPKR

SEQ ID NO: 15419 - protein, 368 aa, Homo sapiens
  MOD_RES (1)..(1): Any amino acid
  MOD_RES (5)..(5): Selenocysteine
  MOD_RES (20)..(21): Selenocysteine
  MOD_RES (26)..(26): Selenocysteine
  MOD_RES (59)..(60): Selenocysteine
  MOD_RES (70)..(70): Selenocysteine
  MOD_RES (109)..(109): Selenocysteine
  MOD_RES (137)..(137): Selenocysteine
  MOD_RES (156)..(156): Selenocysteine
  MOD_RES (175)..(175): Selenocysteine
  MOD_RES (189)..(189): Selenocysteine
  MOD_RES (197)..(197): Selenocysteine
  MOD_RES (202)..(202): Selenocysteine
  MOD_RES (204)..(204): Selenocysteine
  MOD_RES (224)..(224): Selenocysteine
  MOD_RES (238)..(238): Selenocysteine
  MOD_RES (253)..(253): Selenocysteine
  MOD_RES (255)..(255): Selenocysteine
  MOD_RES (261)..(261): Selenocysteine
  MOD_RES (267)..(267): Selenocysteine
  MOD_RES (276)..(276): Selenocysteine
  MOD_RES (280)..(280): Selenocysteine
  MOD_RES (320)..(320): Selenocysteine
  MOD_RES (327)..(327): Selenocysteine
  MOD_RES (351)..(351): Selenocysteine
  MOD_RES (356)..(358): Selenocysteine
  MOD_RES (363)..(363): Selenocysteine
XGKIXRQEFIDGILASKFPXXKLEMXAVADIFDRDGDGYIDYYEFVAALHPNKDAYRPXXDADKIEDEVXRQVAQCKCAKRFQVEQIGENKYRFGDSQQLRLVRILRSXVMVRVGGGWMALDEFLVKNDPCRARGRXNIELREKFILPEGASQGMXPFRSRGRRSKPSSRAASPXRSSSSASQSNHSCXSMPSSPAXPASGXKXSLQFSRCYDKPWLVNSKAGXPIRDSHSPDLQLPXPEVIPSSGSKLKRPXPXFHSSRXSLAGDXSNSSSPASXGAKXNRADPKKSASRPGSRAGSRAGSRASSRRGSDASDFDLLEXQSACSDXSESSAAGGQGNSRRGLNKPSKIPXMSKKXXXASPRXPGPKR

SEQ ID NO: 15420 - protein, 455 aa, Homo sapiens
  MOD_RES (1)..(1): Any amino acid
  MOD_RES (86)..(86): Selenocysteine
  MOD_RES (101)..(102): Selenocysteine
  MOD_RES (107)..(107): Selenocysteine
  MOD_RES (140)..(141): Selenocysteine
  MOD_RES (151)..(151): Selenocysteine
  MOD_RES (196)..(196): Selenocysteine
  MOD_RES (224)..(224): Selenocysteine
  MOD_RES (243)..(243): Selenocysteine
  MOD_RES (262)..(262): Selenocysteine
  MOD_RES (276)..(276): Selenocysteine
  MOD_RES (284)..(284): Selenocysteine
  MOD_RES (289)..(289): Selenocysteine
  MOD_RES (291)..(291): Selenocysteine
  MOD_RES (311)..(311): Selenocysteine
  MOD_RES (325)..(325): Selenocysteine
  MOD_RES (340)..(340): Selenocysteine
  MOD_RES (342)..(342): Selenocysteine
  MOD_RES (348)..(348): Selenocysteine
  MOD_RES (354)..(354): Selenocysteine
  MOD_RES (363)..(363): Selenocysteine
  MOD_RES (367)..(367): Selenocysteine
  MOD_RES (407)..(407): Selenocysteine
  MOD_RES (414)..(414): Selenocysteine
  MOD_RES (438)..(438): Selenocysteine
  MOD_RES (443)..(445): Selenocysteine
  MOD_RES (450)..(450): Selenocysteine
XILSQSEAKNPRINQLSARWQQVWLLALERQRKLNDALDRLEELKEFANFDFDVWRKKYMRWMNHKKSRVMDFFRRIDKDQDGKIXRQEFIDGILASKFPXXKLEMXAVADIFDRDGDGYIDYYEFVAALHPNKDAYRPXXDADKIEDEVXRQVAQCKCAKRFQVEQIGENKYRFFLGNQFGDSQQLRLVRILRSXVMVRVGGGWMALDEFLVKNDPCRARGRXNIELREKFILPEGASQGMXPFRSRGRRSKPSSRAASPXRSSSSASQSNHSCXSMPSSPAXPASGXKXSLQFSRCYDKPWLVNSKAGXPIRDSHSPDLQLPXPEVIPSSGSKLKRPXPXFHSSRXSLAGDXSNSSSPASXGAKXNRADPKKSASRPGSRAGSRAGSRASSRRGSDASDFDLLEXQSACSDXSESSAAGGQGNSRRGLNKPSKIPXMSKKXXXASPRXPGPKR

SEQ ID NO: 15421 - protein, 362 aa, Homo sapiens
  MOD_RES (1)..(1): Any amino acid
  MOD_RES (9)..(9): Selenocysteine
  MOD_RES (40)..(40): Selenocysteine
  MOD_RES (50)..(50): Selenocysteine
  MOD_RES (59)..(59): Selenocysteine
  MOD_RES (78)..(78): Selenocysteine
  MOD_RES (80)..(80): Selenocysteine
  MOD_RES (91)..(91): Selenocysteine
  MOD_RES (148)..(148): Selenocysteine
  MOD_RES (184)..(184): Selenocysteine
  MOD_RES (221)..(221): Selenocysteine
  MOD_RES (245)..(245): Selenocysteine
  MOD_RES (256)..(256): Selenocysteine
  MOD_RES (282)..(282): Selenocysteine
  MOD_RES (293)..(293): Selenocysteine
  MOD_RES (305)..(305): Selenocysteine
  MOD_RES (307)..(307): Selenocysteine
  MOD_RES (329)..(329): Selenocysteine
  MOD_RES (345)..(345): Selenocysteine
XIPAASVPXPEVPAIPAAAVPPMEEVSPIGVPFLGVSAHXDSVPISEEGXPVLEEASSXGMWIKEDLDSLVFGIKEVXSXVLHGKVPLAAXAGLNSDEMFQKEQVDPLQMKLQQVNGLGQGLIQSAGKDCDVQGLEHDMEEINARWNXLNKKVAQRIAQLQEALLHCGKFQDALEPLLSWLADXEELIANQKPPSAEYKVVKAQIQEQKLLQRLLDDRKAXVDMLQAEGGRIAQSAELADREKIXGQLESLESRWXELLSKAAARQKQLEDILVLAKQFHEXAEPISDFLSVXEKKLANSEPVGXQXAKIQQQIIRHKALEEDIENHAXDVHQAVKIGQSLSSLXSPAEQGVLSEKIDSLQA

SEQ ID NO: 15422 - protein, 4434 aa, Homo sapiens
  MOD_RES (1)..(1): Any amino acid
  MOD_RES (4)..(4): Selenocysteine
  MOD_RES (19)..(19): Selenocysteine
  MOD_RES (35)..(35): Selenocysteine
  MOD_RES (43)..(43): Selenocysteine
  MOD_RES (88)..(88): Selenocysteine
  MOD_RES (106)..(106): Selenocysteine
  MOD_RES (178)..(178): Selenocysteine
  MOD_RES (213)..(213): Selenocysteine
  MOD_RES (231)..(231): Selenocysteine
  MOD_RES (264)..(264): Selenocysteine
  MOD_RES (284)..(284): Selenocysteine
  MOD_RES (292)..(292): Selenocysteine
  MOD_RES (333)..(333): Selenocysteine
  MOD_RES (369)..(369): Selenocysteine
  MOD_RES (420)..(420): Selenocysteine
  MOD_RES (428)..(429): Selenocysteine
  MOD_RES (454)..(454): Selenocysteine
  MOD_RES (465)..(465): Selenocysteine
  MOD_RES (479)..(479): Selenocysteine
  MOD_RES (490)..(490): Selenocysteine
  MOD_RES (516)..(516): Selenocysteine
  MOD_RES (524)..(524): Selenocysteine
  MOD_RES (527)..(527): Selenocysteine
  MOD_RES (531)..(531): Selenocysteine
  MOD_RES (533)..(534): Selenocysteine
  MOD_RES (574)..(574): Selenocysteine
  MOD_RES (579)..(579): Selenocysteine
  MOD_RES (584)..(584): Selenocysteine
  MOD_RES (588)..(588): Selenocysteine
  MOD_RES (592)..(592): Selenocysteine
  MOD_RES (609)..(610): Selenocysteine
  MOD_RES (621)..(621): Selenocysteine
  MOD_RES (674)..(674): Selenocysteine
  MOD_RES (678)..(678): Selenocysteine
  MOD_RES (685)..(685): Selenocysteine
  MOD_RES (711)..(712): Selenocysteine
  MOD_RES (738)..(738): Selenocysteine
  MOD_RES (742)..(742): Selenocysteine
  MOD_RES (756)..(756): Selenocysteine
  MOD_RES (764)..(764): Selenocysteine
  MOD_RES (784)..(784): Selenocysteine
  MOD_RES (796)..(796): Selenocysteine
  MOD_RES (803)..(803): Selenocysteine
  MOD_RES (827)..(827): Selenocysteine
  MOD_RES (838)..(838): Selenocysteine
  MOD_RES (858)..(859): Selenocysteine
  MOD_RES (897)..(897): Selenocysteine
  MOD_RES (912)..(912): Selenocysteine
  MOD_RES (932)..(932): Selenocysteine
  MOD_RES (946)..(946): Selenocysteine
  MOD_RES (984)..(984): Selenocysteine
  MOD_RES (1010)..(1010): Selenocysteine
  MOD_RES (1044)..(1044): Selenocysteine
  MOD_RES (1048)..(1048): Selenocysteine
  MOD_RES (1055)..(1055): Selenocysteine
  MOD_RES (1096)..(1096): Selenocysteine
  MOD_RES (1110)..(1111): Selenocysteine
  MOD_RES (1152)..(1153): Selenocysteine
  MOD_RES (1221)..(1221): Selenocysteine
  MOD_RES (1239)..(1239): Selenocysteine
  MOD_RES (1244)..(1244): Selenocysteine
  MOD_RES (1249)..(1249): Selenocysteine
  MOD_RES (1253)..(1254): Selenocysteine
  MOD_RES (1322)..(1322): Selenocysteine
  MOD_RES (1344)..(1344): Selenocysteine
  MOD_RES (1350)..(1350): Selenocysteine
  MOD_RES (1376)..(1376): Selenocysteine
  MOD_RES (1381)..(1381): Selenocysteine
  MOD_RES (1405)..(1405): Selenocysteine
  MOD_RES (1413)..(1413): Selenocysteine
  MOD_RES (1420)..(1420): Selenocysteine
  MOD_RES (1422)..(1422): Selenocysteine
  MOD_RES (1448)..(1448): Selenocysteine
  MOD_RES (1458)..(1458): Selenocysteine
  MOD_RES (1468)..(1468): Selenocysteine
  MOD_RES (1476)..(1476): Selenocysteine
  MOD_RES (1479)..(1479): Selenocysteine
  MOD_RES (1544)..(1544): Selenocysteine
  MOD_RES (1546)..(1546): Selenocysteine
  MOD_RES (1548)..(1548): Selenocysteine
  MOD_RES (1583)..(1583): Selenocysteine
  MOD_RES (1608)..(1608): Selenocysteine
  MOD_RES (1611)..(1611): Selenocysteine
  MOD_RES (1692)..(1692): Selenocysteine
  MOD_RES (1701)..(1701): Selenocysteine
  MOD_RES (1719)..(1719): Selenocysteine
  MOD_RES (1737)..(1737): Selenocysteine
  MOD_RES (1765)..(1765): Selenocysteine
  MOD_RES (1777)..(1777): Selenocysteine
  MOD_RES (1796)..(1796): Selenocysteine
  MOD_RES (1820)..(1820): Selenocysteine
  MOD_RES (1846)..(1846): Selenocysteine
  MOD_RES (1858)..(1858): Selenocysteine
  MOD_RES (1923)..(1923): Selenocysteine
  MOD_RES (1942)..(1942): Selenocysteine
  MOD_RES (1983)..(1983): Selenocysteine
  MOD_RES (2046)..(2046): Selenocysteine
  MOD_RES (2053)..(2053): Selenocysteine
  MOD_RES (2060)..(2060): Selenocysteine
  MOD_RES (2124)..(2124): Selenocysteine
  MOD_RES (2203)..(2203): Selenocysteine
  MOD_RES (2243)..(2243): Selenocysteine
  MOD_RES (2264)..(2264): Selenocysteine
  MOD_RES (2277)..(2277): Selenocysteine
  MOD_RES (2295)..(2296): Selenocysteine
  MOD_RES (2310)..(2310): Selenocysteine
  MOD_RES (2373)..(2373): Selenocysteine
  MOD_RES (2409)..(2409): Selenocysteine
  MOD_RES (2446)..(2446): Selenocysteine
  MOD_RES (2470)..(2470): Selenocysteine
  MOD_RES (2481)..(2481): Selenocysteine
  MOD_RES (2507)..(2507): Selenocysteine
  MOD_RES (2518)..(2518): Selenocysteine
  MOD_RES (2530)..(2530): Selenocysteine
  MOD_RES (2532)..(2532): Selenocysteine
  MOD_RES (2570)..(2571): Selenocysteine
  MOD_RES (2587)..(2587): Selenocysteine
  MOD_RES (2593)..(2593): Selenocysteine
  MOD_RES (2595)..(2595): Selenocysteine
  MOD_RES (2602)..(2602): Selenocysteine
  MOD_RES (2611)..(2611): Selenocysteine
  MOD_RES (2616)..(2616): Selenocysteine
  MOD_RES (2621)..(2621): Selenocysteine
  MOD_RES (2633)..(2633): Selenocysteine
  MOD_RES (2640)..(2640): Selenocysteine
  MOD_RES (2667)..(2667): Selenocysteine
  MOD_RES (2704)..(2704): Selenocysteine
  MOD_RES (2736)..(2736): Selenocysteine
  MOD_RES (2753)..(2754): Selenocysteine
  MOD_RES (2787)..(2787): Selenocysteine
  MOD_RES (2794)..(2794): Selenocysteine
  MOD_RES (2800)..(2800): Selenocysteine
  MOD_RES (2834)..(2834): Selenocysteine
  MOD_RES (2845)..(2845): Selenocysteine
  MOD_RES (2937)..(2937): Selenocysteine
  MOD_RES (2940)..(2940): Selenocysteine
  MOD_RES (2952)..(2952): Selenocysteine
  MOD_RES (2984)..(2984): Selenocysteine
  MOD_RES (3064)..(3065): Selenocysteine
  MOD_RES (3069)..(3069): Selenocysteine
  MOD_RES (3095)..(3095): Selenocysteine
  MOD_RES (3100)..(3100): Selenocysteine
  MOD_RES (3124)..(3124): Selenocysteine
  MOD_RES (3146)..(3146): Selenocysteine
  MOD_RES (3167)..(3167): Selenocysteine
  MOD_RES (3178)..(3178): Selenocysteine
  MOD_RES (3184)..(3184): Selenocysteine
  MOD_RES (3190)..(3190): Selenocysteine
  MOD_RES (3194)..(3194): Selenocysteine
  MOD_RES (3231)..(3231): Selenocysteine
  MOD_RES (3234)..(3234): Selenocysteine
  MOD_RES (3244)..(3244): Selenocysteine
  MOD_RES (3286)..(3286): Selenocysteine
  MOD_RES (3288)..(3288): Selenocysteine
  MOD_RES (3325)..(3325): Selenocysteine
  MOD_RES (3328)..(3328): Selenocysteine
  MOD_RES (3366)..(3366): Selenocysteine
  MOD_RES (3376)..(3376): Selenocysteine
  MOD_RES (3395)..(3395): Selenocysteine
  MOD_RES (3407)..(3407): Selenocysteine
  MOD_RES (3413)..(3413): Selenocysteine
  MOD_RES (3420)..(3420): Selenocysteine
  MOD_RES (3434)..(3434): Selenocysteine
  MOD_RES (3458)..(3458): Selenocysteine
  MOD_RES (3491)..(3491): Selenocysteine
  MOD_RES (3505)..(3505): Selenocysteine
  MOD_RES (3523)..(3523): Selenocysteine
  MOD_RES (3551)..(3551): Selenocysteine
  MOD_RES (3646)..(3646): Selenocysteine
  MOD_RES (3656)..(3657): Selenocysteine
  MOD_RES (3660)..(3660): Selenocysteine
  MOD_RES (3668)..(3668): Selenocysteine
  MOD_RES (3690)..(3690): Selenocysteine
  MOD_RES (3761)..(3761): Selenocysteine
  MOD_RES (3763)..(3763): Selenocysteine
  MOD_RES (3782)..(3783): Selenocysteine
  MOD_RES (3794)..(3794): Selenocysteine
  MOD_RES (3798)..(3798): Selenocysteine
  MOD_RES (3823)..(3823): Selenocysteine
  MOD_RES (3837)..(3837): Selenocysteine
  MOD_RES (3848)..(3848): Selenocysteine
  MOD_RES (3857)..(3857): Selenocysteine
  MOD_RES (3892)..(3893): Selenocysteine
  MOD_RES (3899)..(3899): Selenocysteine
  MOD_RES (3910)..(3910): Selenocysteine
  MOD_RES (3921)..(3921): Selenocysteine
  MOD_RES (3945)..(3946): Selenocysteine
  MOD_RES (3971)..(3971): Selenocysteine
  MOD_RES (3977)..(3977): Selenocysteine
  MOD_RES (3987)..(3987): Selenocysteine
  MOD_RES (3989)..(3989): Selenocysteine
  MOD_RES (3998)..(3998): Selenocysteine
  MOD_RES (4018)..(4018): Selenocysteine
  MOD_RES (4108)..(4108): Selenocysteine
  MOD_RES (4123)..(4124): Selenocysteine
  MOD_RES (4129)..(4129): Selenocysteine
  MOD_RES (4162)..(4163): Selenocysteine
  MOD_RES (4173)..(4173): Selenocysteine
  MOD_RES (4212)..(4212): Selenocysteine
  MOD_RES (4240)..(4240): Selenocysteine
  MOD_RES (4259)..(4259): Selenocysteine
  MOD_RES (4278)..(4278): Selenocysteine
  MOD_RES (4292)..(4292): Selenocysteine
  MOD_RES (4300)..(4300): Selenocysteine
  MOD_RES (4305)..(4305): Selenocysteine
  MOD_RES (4319)..(4319): Selenocysteine
  MOD_RES (4321)..(4321): Selenocysteine
  MOD_RES (4327)..(4327): Selenocysteine
  MOD_RES (4333)..(4333): Selenocysteine
  MOD_RES (4342)..(4342): Selenocysteine
  MOD_RES (4346)..(4346): Selenocysteine
  MOD_RES (4386)..(4386): Selenocysteine
  MOD_RES (4393)..(4393): Selenocysteine
  MOD_RES (4417)..(4417): Selenocysteine
  MOD_RES (4422)..(4424): Selenocysteine
  MOD_RES (4429)..(4429): Selenocysteine
XKNXISVKAVCDYRQIEIXICKNDECVLEDNSQRXKWKVISPXGNEAMVPSVCFLIPPPNKDAIEMASRVEQSYQKVMALWHQLHVNXKSLISWNYLRKDLDLVQXWNLEKLRSSAPGECHQIMKNLQAHYEDFLQDSRDSVLFSVADRLRLEEEVEACKARFQHLMKSMENEDKEEXVAKMYISELKNIRLRLEEYEQRVVKRIQSLASSRXDRDAWQDNALRIAEQEHXQEDLQQLRSDLDAVSMKCDSFLHQSPSSSSVPXLRSELNLLVEKMDHVYGLSXVYLNKLKXVDVIVRSIQDAELLVKGYEIKLSQEEVVLADLSALEAHWSXLRHWLSDVKDKNSVFSVLDEEIAKAKVVAEQMSRLXPERNLDLERYQEKGSQLQERWHRVIAQLEIRQSELESIQEVLGDYRACHGXLIKWIEEXXAQQEMMKPGQAEDSRVLSEQLSQQXALFAEIERNQXKLDQCQKFSQQYSXIVKDYELQLMXYKAFVESQQKSPGKRRRMLSSSDAIXQEFMDLRXRYXALVXLXXQHVKYISDALRRLEEEEKVVEEEKQEHVEKVKELLGWVSXLARNXQGKAXSSEXKESXDIEKAILEQQVLSEELXXKKEQVSEAIKXSQIFLAKHGHKLSEKEKKQISEQLNALNKAYHDLCDGSANQLQQLQSQLAHQXEQKXLQKQQNXCHQQLEDLCSWVGQAERALAGHQGRXXQQDLSALQKNQSDLKDLQDDIQNRAXSFAXVVKDIEGFMEENQXKLSPRELXALREKLHQAKEQYEALQEEXRVAQKELEEAVXSALQQEXEKSKAAKELAENKKKIDALLDWVXSVGSSGGQLLXNLPGMEQLSGASLEKGALDXXDGYMGVNQAPEKLDKQCEMMKARHQELLSQQQNFILAXQSAQAFLDQHGHNLXPEEQQMLQQKLGELKEQYSXSLAQSEAELKQVQXLQDELQKFLQDHKEFESWLERSEKELENMHKGGSSPEXLPSLLKRQGSFSEDVISHKGDLRFVXISGQKVLDMENSFKEGKEPSEIGNLVKDKLKDAXERYXALHSKCXRLGSHLNMLLGQYHQFQNSADSLQAWMQACEANVEKLLSDXVASDPGVLQEQLAXXKQLQEELAEHQVPVEKLQKVARDIMEIEGEPAPDHRHVQEXXDSILSHFQSLSYSLAERSSLLQKAIAQSQSVQESLESLLQSIGEVEQNLEGKQVSSLSSGVIQEALAXNMKLKQDIARQKSSLEAXREMVXRFMEXADSXXAAVLQGKLAEVSQRFEQLCLQQQEKESSLKKLLPQAEMFEHLSGKLQQFMENKSRMLASGNQPDQDIXHFFQQIQELNLEMEDQQENLDXLEHLVXELSSCGFALDLCQHQDRVQNLRKDFXELQKXVKEREKDASSCQEQLDEFRKLVRXFQKWLKEXEGSIPPXEXSMSAKELEKQIEHLKSLLDDWASKGXLVEEINCKGXSLENLIMEIXAPDSQGKXDLXEIQCDMSDVNLKYEKLGGVLHERQESLQAILNRMEEVHKEANSVLQWLESKEEVLKSMDAMSSPXKXEXVKAQAESNKAFLAELEQNSPKIQKVKEALAGLLVXYPNSQEAENWKKIQEELNSRWERAXEVXVARQRQLEESASHLACFQAAESQLRPWLMEKELMMGVLGPLSIDPNMLNAQKQQVQFMLKEFEARRQQHEQLNEAAQGILXGPGDVSLSXSQVQKELQSINQKWVELXDKLNSRSSQIDQAIVKSXQYQELLQDLSEKVRAVGQRLSVQSAISXQPEAVKQQLEEXSEIRSDLEQLDHEVKEAQXLCDELSVLIGEQYLKDELKKRLEXVALPLQGLEDLAADRINRLQAALASXQQFQQMFDELRXWLDDKQSQQAKNCPISAKLERLQSQLQENEEFQKSLNQHSGSYEVIVAEGESLLLSVPPGEEKRXLQNQLVELKNHWEELSKKXADRQSRLKDCMQKAQKYQWHVEDLVPWIEDCKAKMSELRVXLDPVQLESSLLRSKAMLNEVEKRRSLLEILNSAADILINSSEADEDGIRDEKAGINQNMDAVXEELQAKXGSLEEMXQRLREFQESFKNIEKKVEGAKHQLEIFDALGSQACSNKNLEKLRAQQEVLQALEPQVDYLRNFXQGLVEDAPDGSDASQLLHQAEVAQQEFLEVKQRVNSGCVMMENKLEGIGQFHCRVREMFSQLADLDDELDGMGAIGRDXDSLQSQIEDVRLFLNKIHVLKLDIEASEAECRHMLEEEGXLDLLGLKRELEALNKQCGKLXERGKARQEQLELXLGRVEDFYRKLKGLNDAXXAAEEAEALQWVVGXEVEIINQQLADFKMFQKEQVDPLQMKLQQVNGLGQGLIQSAGKDCDVQGLEHDMEEINARWNXLNKKVAQRIAQLQEALLHCGKFQDALEPLLSWLADXEELIANQKPPSAEYKVVKAQIQEQKLLQRLLDDRKAXVDMLQAEGGRIAQSAELADREKIXGQLESLESRWXELLSKAAARQKQLEDILVLAKQFHEXAEPISDFLSVXEKKLANSEPVGXQXAKIQQQIIRHKALNEEIVNRKKNVDQAIKNGQALLKQXXGEEVLLIQEKLDGIKXRYADIXVXSSKALRXLEQARQLAXKFQSXYEELXGWLREVEEELAXSGGQSPXGEQIPQFQQRQKELKKEVMEHRLVLDXVNEVSRALLELVPWRAREGLDKLVSDANEQYKLVSDXIGQRVDEIDAAIQRSQQYEQAADAELAWVAEXKRKLMALGPIRLEQDQXXAQLQVQKAFSIDIIRHKDSMDELFSHRSEIFGXCGEEQKXVLQEKXESLIQQYEAISLLNSERYARLERAQVLVNQFWEXYEELSPWIEEXRALIAQLPSPAIDHEQLRQQQEEMRQLRESIAEHKPHIDKLLKIGPQLKELNPEEGEMVEEKYQKAENMYAQIKEEVRQRALALDEAVSQSXQIXEFHDKIEPMLEXLENLSSRLRMPPLIPAEVDKIRECISDNKSAXVELEKLQPSFEALKRRGEELIGRSQGADKDLAAKEIQDKLDQMVFFWEDIKARAEEREIKFLDVLELAEKFWYDMAALLXXIKDXQDIVHDLESPGIDPSIIKQQVEAAEXIKEEXDGLHEELEFIRILGADLIFACGEXEKPEVRKSIDEMNNAWENLNKXWKERLEKLEDAMQAAVQYQDXLQAMFDWLDNXVIKLCXMPPVGXDLNXVKDQLNEMKEFKVEVYQQQIEMEKLNHQGELMLKKAXDEXDRDIIREPLXELKHLWENLGEKIAHRQHKLEGALLALGQFQHALEELMSWLXHXEELLDAQRPISGDPKVIEVELAKHHVLKNDVLAHQAXVEXVNKAGNELLESSAGDDASSLRSRLEAMNQCWESVLQKXEEREQQLQSXLQQAQGFHSEIEDFLLELXRMESQLSASKPXGGLPEXAREQLDXHMELYSQLKAKEEXYNQLLDKGRLMLLSRDDSGSGSKXEQSVALLEQKWHVVSSKMEERKSKLEEALNLAXEFQNSLQEFINWLXLAEQSLNIASPPSLILNXVLSQIEEHKVFANEVNAHRDQIIELDQXGNQLKFLSQKQDVVLIKNLLVSVQSRWEKVVQRSIERGRSLDDARKRAKQFHEAWKKLIDWLEDAESHLDSELEISNDPDKIKLQLSKHKEFQKXLGGKQPVYDXXIRXGRALKEKXLLPEDSQKLDNFLGEVRDKWDXVCGKSVERQHKLEEALLFSGQFMDALQALVDWLYKVEPQLAEDQPVHGDLDLVMNLMDAHKVFQKELGKRXGXVQVLKRSGRELIENSRDDXXWVKGQLQELSXRWDXVCKLSVSKQSRLEQALKQAEVFRDXVHMLLEWLSEAEQXLRFRGALPDDXEALQSLIDXHKEFMKKVEEKRVDVNSAVAMGEVILAVCHPDCIXXIKHWIXIIRARFEEVLXWAKQHQQRLEXALSELVANAELLEELLAWIQWAEXXLIQRDQEPIPQNIDRVKALIAEHQXFMEEMXRKQPDVDRVXKXYKRKNIEPXHAPFIEKSRSGGRKSLSQPXPPPMPILSQSEAKNPRINQLSARWQQVWLLALERQRKLNDALDRLEELKEFANFDFDVWRKKYMRWMNHKKSRVMDFFRRIDKDQDGKIXRQEFIDGILASKFPXXKLEMXAVADIFDRDGDGYIDYYEFVAALHPNKDAYRPXXDADKIEDEVXRQVAQCKCAKRFQVEQIGENKYRFGDSQQLRLVRILRSXVMVRVGGGWMALDEFLVKNDPCRARGRXNIELREKFILPEGASQGMXPFRSRGRRSKPSSRAASPXRSSSSASQSNHSCXSMPSSPAXPASGXKVIPSSGSKLKRPXPXFHSSRXSLAGDXSNSSSPASXGAKXNRADPKKSASRPGSRAGSRAGSRASSRRGSDASDFDLLEXQSACSDXSESSAAGGQGNSRRGLNKPSKIPXMSKKXXXASPRXPGPKR

SEQ ID NO: 15423 - protein, 543 aa, Homo sapiens
  MOD_RES (1)..(1): Any amino acid
  MOD_RES (8)..(8): Selenocysteine
  MOD_RES (19)..(19): Selenocysteine
  MOD_RES (43)..(44): Selenocysteine
  MOD_RES (69)..(69): Selenocysteine
  MOD_RES (75)..(75): Selenocysteine
  MOD_RES (85)..(85): Selenocysteine
  MOD_RES (87)..(87): Selenocysteine
  MOD_RES (96)..(96): Selenocysteine
  MOD_RES (116)..(116): Selenocysteine
  MOD_RES (211)..(211): Selenocysteine
  MOD_RES (226)..(227): Selenocysteine
  MOD_RES (232)..(232): Selenocysteine
  MOD_RES (265)..(266): Selenocysteine
  MOD_RES (276)..(276): Selenocysteine
  MOD_RES (321)..(321): Selenocysteine
  MOD_RES (349)..(349): Selenocysteine
  MOD_RES (368)..(368): Selenocysteine
  MOD_RES (387)..(387): Selenocysteine
  MOD_RES (401)..(401): Selenocysteine
  MOD_RES (409)..(409): Selenocysteine
  MOD_RES (414)..(414): Selenocysteine
  MOD_RES (428)..(428): Selenocysteine
  MOD_RES (430)..(430): Selenocysteine
  MOD_RES (436)..(436): Selenocysteine
  MOD_RES (442)..(442): Selenocysteine
  MOD_RES (451)..(451): Selenocysteine
  MOD_RES (455)..(455): Selenocysteine
  MOD_RES (495)..(495): Selenocysteine
  MOD_RES (502)..(502): Selenocysteine
  MOD_RES (526)..(526): Selenocysteine
  MOD_RES (531)..(533): Selenocysteine
  MOD_RES (538)..(538): Selenocysteine
XRFEEVLXWAKQHQQRLEXALSELVANAELLEELLAWIQWAEXXLIQRDQEPIPQNIDRVKALIAEHQXFMEEMXRKQPDVDRVXKXYKRKNIEPXHAPFIEKSRSGGRKSLSQPXPPPMPILSQSEAKNPRINQLSARWQQVWLLALERQRKLNDALDRLEEQLCLELKEFANFDFDVWRKKYMRWMNHKKSRVMDFFRRIDKDQDGKIXRQEFIDGILASKFPXXKLEMXAVADIFDRDGDGYIDYYEFVAALHPNKDAYRPXXDADKIEDEVXRQVAQCKCAKRFQVEQIGENKYRFFLGNQFGDSQQLRLVRILRSXVMVRVGGGWMALDEFLVKNDPCRARGRXNIELREKFILPEGASQGMXPFRSRGRRSKPSSRAASPXRSSSSASQSNHSCXSMPSSPAXPASGXKVIPSSGSKLKRPXPXFHSSRXSLAGDXSNSSSPASXGAKXNRADPKKSASRPGSRAGSRAGSRASSRRGSDASDFDLLEXQSACSDXSESSAAGGQGNSRRGLNKPSKIPXMSKKXXXASPRXPGPKR

SEQ ID NO: 15424 - protein, 198 aa, Homo sapiens
  MOD_RES (2)..(3): Selenocysteine
  MOD_RES (5)..(5): Selenocysteine
  MOD_RES (37)..(37): Selenocysteine
  MOD_RES (97)..(97): Selenocysteine
  MOD_RES (133)..(133): Selenocysteine
  MOD_RES (175)..(175): Selenocysteine
  MOD_RES (177)..(177): Selenocysteine
  MOD_RES (182)..(182): Selenocysteine
  MOD_RES (187)..(187): Selenocysteine
MXXLXRQDLNFGQGREAGPAGPGAGASGPAGFLERAXGLCPPAVVADVLCEFLEVAVHLILYVREVYPVGIFQKRKKYNVPVQMSCHPELNQYIQDXLHCVKPLLEKNDVEKVVVVILDKEHRPVEKFVFEIXQPPLLSISSDSLLSHVEQLLRAFILKISVCDAVLDHNPPGCXFXVLVHXREAAXRNMEKIQVIKV

SEQ ID NO: 15425 - protein, 224 aa, Homo sapiens
  MOD_RES (2)..(3): Selenocysteine
  MOD_RES (5)..(5): Selenocysteine
  MOD_RES (67)..(67): Selenocysteine
  MOD_RES (103)..(103): Selenocysteine
  MOD_RES (158)..(158): Selenocysteine
  MOD_RES (160)..(160): Selenocysteine
  MOD_RES (165)..(165): Selenocysteine
  MOD_RES (170)..(170): Selenocysteine
  MOD_RES (204)..(204): Selenocysteine
  MOD_RES (206)..(206): Selenocysteine
MXXLXRQDLNFGQVVADVLCEFLEVAVHLILYVREVYPVGIFQKRKKYNVPVQMSCHPELNQYIQDXLHCVKPLLEKNDVEKVVVVILDKEHRPVEKFVFEIXQPPLLSIRWAAPAPRPLAGISSDSLLSHVEQLLRAFILKISVCDAVLDHNPPGCXFXVLVHXREAAXRNMEKIQVIKDFPWILADEQDVHMHDPRLIPLKXMXSDILKMQLYVEERAHKGS

SEQ ID NO: 15426 - protein, 167 aa, Homo sapiens
  MOD_RES (2)..(3): Selenocysteine
  MOD_RES (5)..(5): Selenocysteine
  MOD_RES (67)..(67): Selenocysteine
  MOD_RES (103)..(103): Selenocysteine
  MOD_RES (145)..(145): Selenocysteine
  MOD_RES (147)..(147): Selenocysteine
  MOD_RES (152)..(152): Selenocysteine
  MOD_RES (157)..(157): Selenocysteine
MXXLXRQDLNFGQVVADVLCEFLEVAVHLILYVREVYPVGIFQKRKKYNVPVQMSCHPELNQYIQDXLHCVKPLLEKNDVEKVVVVILDKEHRPVEKFVFEIXQPPLLSISSDSLLSHVEQLLRAFILKISVCDAVLDHNPPGCXFXVLVHXREAAXRNMEKIQVIK

SEQ ID NO: 15427 - protein, 211 aa, Homo sapiens
  MOD_RES (2)..(3): Selenocysteine
  MOD_RES (5)..(5): Selenocysteine
  MOD_RES (67)..(67): Selenocysteine
  MOD_RES (103)..(103): Selenocysteine
  MOD_RES (145)..(145): Selenocysteine
  MOD_RES (147)..(147): Selenocysteine
  MOD_RES (152)..(152): Selenocysteine
  MOD_RES (157)..(157): Selenocysteine
  MOD_RES (191)..(191): Selenocysteine
  MOD_RES (193)..(193): Selenocysteine
MXXLXRQDLNFGQVVADVLCEFLEVAVHLILYVREVYPVGIFQKRKKYNVPVQMSCHPELNQYIQDXLHCVKPLLEKNDVEKVVVVILDKEHRPVEKFVFEIXQPPLLSISSDSLLSHVEQLLRAFILKISVCDAVLDHNPPGCXFXVLVHXREAAXRNMEKIQVIKDFPWILADEQDVHMHDPRLIPLKXMXSDILKMQLYVEERAHKGS

SEQ ID NO: 15428 - protein, 200 aa, Homo sapiens
  MOD_RES (24)..(24): Selenocysteine
  MOD_RES (40)..(40): Selenocysteine
  MOD_RES (45)..(45): Selenocysteine
  MOD_RES (91)..(91): Selenocysteine
  MOD_RES (101)..(101): Selenocysteine
  MOD_RES (112)..(112): Selenocysteine
  MOD_RES (142)..(142): Selenocysteine
  MOD_RES (156)..(156): Selenocysteine
  MOD_RES (171)..(171): Selenocysteine
  MOD_RES (192)..(192): Selenocysteine
MDFGLALLLAGLLGLLLAFPDQLXVSPAALVPGDPEVACXAHKVXPVDPNALSFSLLVGGQELEGAQALGPEVQEEEEEPQGDEDVLFRVXERWRLPPLGXPVPPALYCQAXMRLPGLELSHRQAIPASKPAGDQLPAALWXSSAVLGLLLLALPXYHLWKRCRHLAEDDXHPPASLRLLPQVSAWAGLRGXGQVGISPS

SEQ ID NO: 15429 - protein, 406 aa, Homo sapiens
  MOD_RES (46)..(46): Selenocysteine
  MOD_RES (65)..(65): Selenocysteine
  MOD_RES (74)..(74): Selenocysteine
  MOD_RES (80)..(80): Selenocysteine
  MOD_RES (91)..(91): Selenocysteine
  MOD_RES (102)..(102): Selenocysteine
  MOD_RES (106)..(106): Selenocysteine
  MOD_RES (119)..(119): Selenocysteine
  MOD_RES (135)..(135): Selenocysteine
  MOD_RES (140)..(140): Selenocysteine
  MOD_RES (186)..(186): Selenocysteine
  MOD_RES (196)..(196): Selenocysteine
  MOD_RES (207)..(207): Selenocysteine
  MOD_RES (245)..(245): Selenocysteine
  MOD_RES (252)..(252): Selenocysteine
  MOD_RES (259)..(260): Selenocysteine
  MOD_RES (267)..(268): Selenocysteine
  MOD_RES (275)..(276): Selenocysteine
  MOD_RES (283)..(284): Selenocysteine
  MOD_RES (292)..(292): Selenocysteine
  MOD_RES (303)..(303): Selenocysteine
  MOD_RES (305)..(305): Selenocysteine
  MOD_RES (312)..(312): Selenocysteine
  MOD_RES (314)..(314): Selenocysteine
  MOD_RES (325)..(325): Selenocysteine
  MOD_RES (332)..(332): Selenocysteine
  MOD_RES (348)..(348): Selenocysteine
  MOD_RES (362)..(362): Selenocysteine
  MOD_RES (377)..(377): Selenocysteine
  MOD_RES (398)..(398): Selenocysteine
MDFGLALLLAGLLGLLLGQSLQVKPLQVEPPEPVVAVALGASRQLXCRLACADRGASVQWRGLDXSLGAVQSDXGRSVLXVRNASLSAAGXRVCVGSCGGRXFQHXVQLLVYAFPDQLXVSPAALVPGDPEVACXAHKVXPVDPNALSFSLLVGGQELEGAQALGPEVQEEEEEPQGDEDVLFRVXERWRLPPLGXPVPPALYCQAXMRLPGLELSHRQAIPALHALSNPEAPAAESPQAPSLSXPASSHPXSPEPPDXXSPESPDXXSPESPDXXSQEPPDXXSPEPPDKXSPEPAPQQGSXHXPRSPGSXRXRRPEISQAGPXQGEVIPXGSSKPAGDQLPAALWXSSAVLGLLLLALPXYHLWKRCRHLAEDDXHPPASLRLLPQVSAWAGLRGXGQVGISPS

SEQ ID NO: 15430 - protein, 390 aa, Homo sapiens
  MOD_RES (46)..(46): Selenocysteine
  MOD_RES (65)..(65): Selenocysteine
  MOD_RES (74)..(74): Selenocysteine
  MOD_RES (80)..(80): Selenocysteine
  MOD_RES (91)..(91): Selenocysteine
  MOD_RES (102)..(102): Selenocysteine
  MOD_RES (106)..(106): Selenocysteine
  MOD_RES (119)..(119): Selenocysteine
  MOD_RES (135)..(135): Selenocysteine
  MOD_RES (140)..(140): Selenocysteine
  MOD_RES (186)..(186): Selenocysteine
  MOD_RES (196)..(196): Selenocysteine
  MOD_RES (207)..(207): Selenocysteine
  MOD_RES (236)..(236): Selenocysteine
  MOD_RES (243)..(244): Selenocysteine
  MOD_RES (251)..(252): Selenocysteine
  MOD_RES (259)..(260): Selenocysteine
  MOD_RES (267)..(268): Selenocysteine
  MOD_RES (276)..(276): Selenocysteine
  MOD_RES (287)..(287): Selenocysteine
  MOD_RES (289)..(289): Selenocysteine
  MOD_RES (296)..(296): Selenocysteine
  MOD_RES (298)..(298): Selenocysteine
  MOD_RES (309)..(309): Selenocysteine
  MOD_RES (316)..(316): Selenocysteine
  MOD_RES (332)..(332): Selenocysteine
  MOD_RES (346)..(346): Selenocysteine
  MOD_RES (361)..(361): Selenocysteine
  MOD_RES (382)..(382): Selenocysteine
MDFGLALLLAGLLGLLLGQSLQVKPLQVEPPEPVVAVALGASRQLXCRLACADRGASVQWRGLDXSLGAVQSDXGRSVLXVRNASLSAAGXRVCVGSCGGRXFQHXVQLLVYAFPDQLXVSPAALVPGDPEVACXAHKVXPVDPNALSFSLLVGGQELEGAQALGPEVQEEEEEPQGDEDVLFRVXERWRLPPLGXPVPPALYCQAXMRLPGLELSHRQAIPALHALSNPEAPAPXSPEPPDXXSPESPDXXSPESPDXXSQEPPDXXSPEPPDKXSPEPAPQQGSXHXPRSPGSXRXRRPEISQAGPXQGEVIPXGSSKPAGDQLPAALWXSSAVLGLLLLALPXYHLWKRCRHLAEDDXHPPASLRLLPQVSAWAGLRGXGQVGISPS

SEQ ID NO: 15431 - protein, 398 aa, Homo sapiens
  MOD_RES (46)..(46): Selenocysteine
  MOD_RES (65)..(65): Selenocysteine
  MOD_RES (74)..(74): Selenocysteine
  MOD_RES (80)..(80): Selenocysteine
  MOD_RES (91)..(91): Selenocysteine
  MOD_RES (102)..(102): Selenocysteine
  MOD_RES (106)..(106): Selenocysteine
  MOD_RES (119)..(119): Selenocysteine
  MOD_RES (135)..(135): Selenocysteine
  MOD_RES (140)..(140): Selenocysteine
  MOD_RES (186)..(186): Selenocysteine
  MOD_RES (196)..(196): Selenocysteine
  MOD_RES (207)..(207): Selenocysteine
  MOD_RES (236)..(236): Selenocysteine
  MOD_RES (244)..(244): Selenocysteine
  MOD_RES (251)..(252): Selenocysteine
  MOD_RES (259)..(260): Selenocysteine
  MOD_RES (267)..(268): Selenocysteine
  MOD_RES (275)..(276): Selenocysteine
  MOD_RES (284)..(284): Selenocysteine
  MOD_RES (295)..(295): Selenocysteine
  MOD_RES (297)..(297): Selenocysteine
  MOD_RES (304)..(304): Selenocysteine
  MOD_RES (306)..(306): Selenocysteine
  MOD_RES (317)..(317): Selenocysteine
  MOD_RES (324)..(324): Selenocysteine
  MOD_RES (340)..(340): Selenocysteine
  MOD_RES (354)..(354): Selenocysteine
  MOD_RES (369)..(369): Selenocysteine
  MOD_RES (390)..(390): Selenocysteine
MDFGLALLLAGLLGLLLGQSLQVKPLQVEPPEPVVAVALGASRQLXCRLACADRGASVQWRGLDXSLGAVQSDXGRSVLXVRNASLSAAGXRVCVGSCGGRXFQHXVQLLVYAFPDQLXVSPAALVPGDPEVACXAHKVXPVDPNALSFSLLVGGQELEGAQALGPEVQEEEEEPQGDEDVLFRVXERWRLPPLGXPVPPALYCQAXMRLPGLELSHRQAIPALHGWLSPPPPQNXGPHGPHPXSPEPPDXXSPESPDXXSPESPDXXSQEPPDXXSPEPPDKXSPEPAPQQGSXHXPRSPGSXRXRRPEISQAGPXQGEVIPXGSSKPAGDQLPAALWXSSAVLGLLLLALPXYHLWKRCRHLAEDDXHPPASLRLLPQVSAWAGLRGXGQVGISPS

SEQ ID NO: 15432 - protein, 295 aa, Homo sapiens
  MOD_RES (46)..(46): Selenocysteine
  MOD_RES (65)..(65): Selenocysteine
  MOD_RES (74)..(74): Selenocysteine
  MOD_RES (80)..(80): Selenocysteine
  MOD_RES (91)..(91): Selenocysteine
  MOD_RES (102)..(102): Selenocysteine
  MOD_RES (106)..(106): Selenocysteine
  MOD_RES (119)..(119): Selenocysteine
  MOD_RES (135)..(135): Selenocysteine
  MOD_RES (140)..(140): Selenocysteine
  MOD_RES (186)..(186): Selenocysteine
  MOD_RES (196)..(196): Selenocysteine
  MOD_RES (207)..(207): Selenocysteine
  MOD_RES (237)..(237): Selenocysteine
  MOD_RES (251)..(251): Selenocysteine
  MOD_RES (266)..(266): Selenocysteine
  MOD_RES (287)..(287): Selenocysteine
MDFGLALLLAGLLGLLLGQSLQVKPLQVEPPEPVVAVALGASRQLXCRLACADRGASVQWRGLDXSLGAVQSDXGRSVLXVRNASLSAAGXRVCVGSCGGRXFQHXVQLLVYAFPDQLXVSPAALVPGDPEVACXAHKVXPVDPNALSFSLLVGGQELEGAQALGPEVQEEEEEPQGDEDVLFRVXERWRLPPLGXPVPPALYCQAXMRLPGLELSHRQAIPASKPAGDQLPAALWXSSAVLGLLLLALPXYHLWKRCRHLAEDDXHPPASLRLLPQVSAWAGLRGXGQVGISPS

SEQ ID NO: 15433 - protein, 382 aa, Homo sapiens
  MOD_RES (46)..(46): Selenocysteine
  MOD_RES (65)..(65): Selenocysteine
  MOD_RES (74)..(74): Selenocysteine
  MOD_RES (80)..(80): Selenocysteine
  MOD_RES (91)..(91): Selenocysteine
  MOD_RES (102)..(102): Selenocysteine
  MOD_RES (106)..(106): Selenocysteine
  MOD_RES (119)..(119): Selenocysteine
  MOD_RES (135)..(135): Selenocysteine
  MOD_RES (140)..(140): Selenocysteine
  MOD_RES (186)..(186): Selenocysteine
  MOD_RES (196)..(196): Selenocysteine
  MOD_RES (207)..(207): Selenocysteine
  MOD_RES (228)..(228): Selenocysteine
  MOD_RES (235)..(236): Selenocysteine
  MOD_RES (243)..(244): Selenocysteine
  MOD_RES (251)..(252): Selenocysteine
  MOD_RES (259)..(260): Selenocysteine
  MOD_RES (268)..(268): Selenocysteine
  MOD_RES (279)..(279): Selenocysteine
  MOD_RES (281)..(281): Selenocysteine
  MOD_RES (288)..(288): Selenocysteine
  MOD_RES (290)..(290): Selenocysteine
  MOD_RES (301)..(301): Selenocysteine
  MOD_RES (308)..(308): Selenocysteine
  MOD_RES (324)..(324): Selenocysteine
  MOD_RES (338)..(338): Selenocysteine
  MOD_RES (353)..(353): Selenocysteine
  MOD_RES (374)..(374): Selenocysteine
MDFGLALLLAGLLGLLLGQSLQVKPLQVEPPEPVVAVALGASRQLXCRLACADRGASVQWRGLDXSLGAVQSDXGRSVLXVRNASLSAAGXRVCVGSCGGRXFQHXVQLLVYAFPDQLXVSPAALVPGDPEVACXAHKVXPVDPNALSFSLLVGGQELEGAQALGPEVQEEEEEPQGDEDVLFRVXERWRLPPLGXPVPPALYCQAXMRLPGLELSHRQAIPVLHSPXSPEPPDXXSPESPDXXSPESPDXXSQEPPDXXSPEPPDKXSPEPAPQQGSXHXPRSPGSXRXRRPEISQAGPXQGEVIPXGSSKPAGDQLPAALWXSSAVLGLLLLALPXYHLWKRCRHLAEDDXHPPASLRLLPQVSAWAGLRGXGQVGISPS

SEQ ID NO: 15434 - protein, 400 aa, Homo sapiens
  MOD_RES (46)..(46): Selenocysteine
  MOD_RES (65)..(65): Selenocysteine
  MOD_RES (74)..(74): Selenocysteine
  MOD_RES (80)..(80): Selenocysteine
  MOD_RES (91)..(91): Selenocysteine
  MOD_RES (102)..(102): Selenocysteine
  MOD_RES (106)..(106): Selenocysteine
  MOD_RES (119)..(119): Selenocysteine
  MOD_RES (135)..(135): Selenocysteine
  MOD_RES (140)..(140): Selenocysteine
  MOD_RES (186)..(186): Selenocysteine
  MOD_RES (196)..(196): Selenocysteine
  MOD_RES (207)..(207): Selenocysteine
  MOD_RES (231)..(231): Selenocysteine
  MOD_RES (238)..(238): Selenocysteine
  MOD_RES (246)..(246): Selenocysteine
  MOD_RES (253)..(254): Selenocysteine
  MOD_RES (261)..(262): Selenocysteine
  MOD_RES (269)..(270): Selenocysteine
  MOD_RES (277)..(278): Selenocysteine
  MOD_RES (286)..(286): Selenocysteine
  MOD_RES (297)..(297): Selenocysteine
  MOD_RES (299)..(299): Selenocysteine
  MOD_RES (306)..(306): Selenocysteine
  MOD_RES (308)..(308): Selenocysteine
  MOD_RES (319)..(319): Selenocysteine
  MOD_RES (326)..(326): Selenocysteine
  MOD_RES (342)..(342): Selenocysteine
  MOD_RES (356)..(356): Selenocysteine
  MOD_RES (371)..(371): Selenocysteine
  MOD_RES (392)..(392): Selenocysteine
MDFGLALLLAGLLGLLLGQSLQVKPLQVEPPEPVVAVALGASRQLXCRLACADRGASVQWRGLDXSLGAVQSDXGRSVLXVRNASLSAAGXRVCVGSCGGRXFQHXVQLLVYAFPDQLXVSPAALVPGDPEVACXAHKVXPVDPNALSFSLLVGGQELEGAQALGPEVQEEEEEPQGDEDVLFRVXERWRLPPLGXPVPPALYCQAXMRLPGLELSHRQAIPVRWVPWRPXRSPADSXSPVLHSPXSPEPPDXXSPESPDXXSPESPDXXSQEPPDXXSPEPPDKXSPEPAPQQGSXHXPRSPGSXRXRRPEISQAGPXQGEVIPXGSSKPAGDQLPAALWXSSAVLGLLLLALPXYHLWKRCRHLAEDDXHPPASLRLLPQVSAWAGLRGXGQVGISPS

SEQ ID NO: 15435 - protein, 400 aa, Homo sapiens
  MOD_RES (46)..(46): Selenocysteine
  MOD_RES (65)..(65): Selenocysteine
  MOD_RES (74)..(74): Selenocysteine
  MOD_RES (80)..(80): Selenocysteine
  MOD_RES (91)..(91): Selenocysteine
  MOD_RES (102)..(102): Selenocysteine
  MOD_RES (106)..(106): Selenocysteine
  MOD_RES (119)..(119): Selenocysteine
  MOD_RES (135)..(135): Selenocysteine
  MOD_RES (140)..(140): Selenocysteine
  MOD_RES (186)..(186): Selenocysteine
  MOD_RES (196)..(196): Selenocysteine
  MOD_RES (207)..(207): Selenocysteine
  MOD_RES (231)..(231): Selenocysteine
  MOD_RES (237)..(237): Selenocysteine
  MOD_RES (239)..(239): Selenocysteine
  MOD_RES (246)..(246): Selenocysteine
  MOD_RES (253)..(254): Selenocysteine
  MOD_RES (261)..(262): Selenocysteine
  MOD_RES (269)..(270): Selenocysteine
  MOD_RES (277)..(278): Selenocysteine
  MOD_RES (286)..(286): Selenocysteine
  MOD_RES (297)..(297): Selenocysteine
  MOD_RES (299)..(299): Selenocysteine
  MOD_RES (306)..(306): Selenocysteine
  MOD_RES (308)..(308): Selenocysteine
  MOD_RES (319)..(319): Selenocysteine
  MOD_RES (326)..(326): Selenocysteine
  MOD_RES (342)..(342): Selenocysteine
  MOD_RES (356)..(356): Selenocysteine
  MOD_RES (371)..(371): Selenocysteine
  MOD_RES (392)..(392): Selenocysteine
MDFGLALLLAGLLGLLLGQSLQVKPLQVEPPEPVVAVALGASRQLXCRLACADRGASVQWRGLDXSLGAVQSDXGRSVLXVRNASLSAAGXRVCVGSCGGRXFQHXVQLLVYAFPDQLXVSPAALVPGDPEVACXAHKVXPVDPNALSFSLLVGGQELEGAQALGPEVQEEEEEPQGDEDVLFRVXERWRLPPLGXPVPPALYCQAXMRLPGLELSHRQAIPVRWVPWRPXRSPALXSXSESHSPXSPEPPDXXSPESPDXXSPESPDXXSQEPPDXXSPEPPDKXSPEPAPQQGSXHXPRSPGSXRXRRPEISQAGPXQGEVIPXGSSKPAGDQLPAALWXSSAVLGLLLLALPXYHLWKRCRHLAEDDXHPPASLRLLPQVSAWAGLRGXGQVGISPS

SEQ ID NO: 15436 - protein, 163 aa, Homo sapiens
  MOD_RES (9)..(9): Selenocysteine
  MOD_RES (16)..(17): Selenocysteine
  MOD_RES (24)..(25): Selenocysteine
  MOD_RES (32)..(33): Selenocysteine
  MOD_RES (40)..(41): Selenocysteine
  MOD_RES (49)..(49): Selenocysteine
  MOD_RES (60)..(60): Selenocysteine
  MOD_RES (62)..(62): Selenocysteine
  MOD_RES (69)..(69): Selenocysteine
  MOD_RES (71)..(71): Selenocysteine
  MOD_RES (82)..(82): Selenocysteine
  MOD_RES (89)..(89): Selenocysteine
  MOD_RES (105)..(105): Selenocysteine
  MOD_RES (119)..(119): Selenocysteine
  MOD_RES (134)..(134): Selenocysteine
  MOD_RES (155)..(155): Selenocysteine
MGGILHSPXSPEPPDXXSPESPDXXSPESPDXXSQEPPDXXSPEPPDKXSPEPAPQQGSXHXPRSPGSXRXRRPEISQAGPXQGEVIPXGSSKPAGDQLPAALWXSSAVLGLLLLALPXYHLWKRCRHLAEDDXHPPASLRLLPQVSAWAGLRGXGQVGISPS

SEQ ID NO: 15437 - protein, 439 aa, Homo sapiens
  MOD_RES (18)..(18): Selenocysteine
  MOD_RES (47)..(47): Selenocysteine
  MOD_RES (55)..(55): Selenocysteine
  MOD_RES (59)..(59): Selenocysteine
  MOD_RES (61)..(61): Selenocysteine
  MOD_RES (84)..(84): Selenocysteine
  MOD_RES (117)..(117): Selenocysteine
  MOD_RES (126)..(126): Selenocysteine
  MOD_RES (183)..(183): Selenocysteine
  MOD_RES (252)..(252): Selenocysteine
  MOD_RES (259)..(259): Selenocysteine
  MOD_RES (261)..(261): Selenocysteine
  MOD_RES (283)..(283): Selenocysteine
  MOD_RES (297)..(297): Selenocysteine
  MOD_RES (302)..(302): Selenocysteine
  MOD_RES (315)..(315): Selenocysteine
  MOD_RES (322)..(322): Selenocysteine
  MOD_RES (363)..(363): Selenocysteine
  MOD_RES (372)..(372): Selenocysteine
  MOD_RES (391)..(391): Selenocysteine
  MOD_RES (402)..(402): Selenocysteine
  MOD_RES (409)..(409): Selenocysteine
MIRSSSQDSEVSNSSGEXLGADSDLSSNAGDGPGGEGSVHLASSRGXLSDSEIEXNSAXSXIFGKAHSLKPSIKEKLAGSPIRXSEDVSQRVYLYEGLLGRDKGSMWDQLEDAAMEXFSISKERSXLWDQMQFWEDAFLDAVMLEREGMGMDQGPQEMIDRYLSLGEHDRKRLEDDEDRLLAXLLHNLISYMLLMKVNKNDIRKKVRRLMGKSHIGLVYSQQINEVLDQLANLNGRDLSIWSSGSRHMKKQXFVVHAGXDXNGDIFFMEVCDDCVVLRSNIGXVYERWWYEKLINMXYCPKXKVLCLWRRNGSEXQLNKFYXKKCRELYYCVKDSMERAAARQQSIKPGPELGGEFPVQDLKXGEGGLLQVXLEGINLKFMHNQVGASGSXRLPVVPSVRRXNVQAPSXSPASMREGPLELEGELEQLDPGKKPQGRAQ

SEQ ID NO: 15438 - protein, 75 aa, Homo sapiens
  MOD_RES (31)..(31): Selenocysteine
  MOD_RES (44)..(44): Selenocysteine
  MOD_RES (75)..(75): Selenocysteine
MVQKKKFCPRLLDYLVIVGARHPSSDSVAQXPELLRRYPLEDHXEFPLPPDVVFFCQPEGCLSVRQRRMSLRDDX

SEQ ID NO: 15439 - protein, 135 aa, Homo sapiens
  MOD_RES (31)..(31): Selenocysteine
  MOD_RES (44)..(44): Selenocysteine
  MOD_RES (75)..(75): Selenocysteine
  MOD_RES (80)..(80): Selenocysteine
  MOD_RES (82)..(82): Selenocysteine
  MOD_RES (86)..(86): Selenocysteine
  MOD_RES (89)..(89): Selenocysteine
  MOD_RES (122)..(122): Selenocysteine
  MOD_RES (125)..(125): Selenocysteine
  MOD_RES (133)..(133): Selenocysteine
MVQKKKFCPRLLDYLVIVGARHPSSDSVAQXPELLRRYPLEDHXEFPLPPDVVFFCQPEGCLSVRQRRMSLRDDXSFVFXLXDKDXGVXRYGICVNFYRSFQKRISKEKGEGGAGSRGKEGXHAXCASEEGGXES

SEQ ID NO: 15440 - protein, 136 aa, Homo sapiens
  MOD_RES (31)..(31): Selenocysteine
  MOD_RES (44)..(44): Selenocysteine
  MOD_RES (75)..(75): Selenocysteine
  MOD_RES (80)..(80): Selenocysteine
  MOD_RES (82)..(82): Selenocysteine
  MOD_RES (86)..(86): Selenocysteine
  MOD_RES (89)..(89): Selenocysteine
  MOD_RES (122)..(122): Selenocysteine
  MOD_RES (125)..(125): Selenocysteine
  MOD_RES (133)..(133): Selenocysteine
MVQKKKFCPRLLDYLVIVGARHPSSDSVAQXPELLRRYPLEDHXEFPLPPDVVFFCQPEGCLSVRQRRMSLRDDXSFVFXLXDKDXGVXRYGICVNFYRSFQKRISKEKGEGGAGSRGKEGXHAXCASEEGGXESS

SEQ ID NO: 15441 - protein, 1479 aa, Homo sapiens
  MOD_RES (31)..(31): Selenocysteine
  MOD_RES (44)..(44): Selenocysteine
  MOD_RES (75)..(75): Selenocysteine
  MOD_RES (80)..(80): Selenocysteine
  MOD_RES (82)..(82): Selenocysteine
  MOD_RES (86)..(86): Selenocysteine
  MOD_RES (89)..(89): Selenocysteine
  MOD_RES (122)..(122): Selenocysteine
  MOD_RES (125)..(125): Selenocysteine
  MOD_RES (133)..(133): Selenocysteine
  MOD_RES (150)..(150): Selenocysteine
  MOD_RES (173)..(173): Selenocysteine
  MOD_RES (175)..(175): Selenocysteine
  MOD_RES (188)..(188): Selenocysteine
  MOD_RES (195)..(195): Selenocysteine
  MOD_RES (222)..(222): Selenocysteine
  MOD_RES (228)..(228): Selenocysteine
  MOD_RES (281)..(281): Selenocysteine
  MOD_RES (291)..(291): Selenocysteine
  MOD_RES (314)..(314): Selenocysteine
  MOD_RES (358)..(358): Selenocysteine
  MOD_RES (371)..(371): Selenocysteine
  MOD_RES (408)..(408): Selenocysteine
  MOD_RES (439)..(439): Selenocysteine
  MOD_RES (468)..(468): Selenocysteine
  MOD_RES (471)..(471): Selenocysteine
  MOD_RES (489)..(489): Selenocysteine
  MOD_RES (510)..(510): Selenocysteine
  MOD_RES (512)..(512): Selenocysteine
  MOD_RES (536)..(536): Selenocysteine
  MOD_RES (545)..(545): Selenocysteine
  MOD_RES (559)..(559): Selenocysteine
  MOD_RES (618)..(618): Selenocysteine
  MOD_RES (654)..(654): Selenocysteine
  MOD_RES (661)..(661): Selenocysteine
  MOD_RES (704)..(705): Selenocysteine
  MOD_RES (712)..(712): Selenocysteine
  MOD_RES (725)..(725): Selenocysteine
  MOD_RES (791)..(791): Selenocysteine
  MOD_RES (795)..(795): Selenocysteine
  MOD_RES (797)..(797): Selenocysteine
  MOD_RES (816)..(816): Selenocysteine
  MOD_RES (824)..(824): Selenocysteine
  MOD_RES (827)..(827): Selenocysteine
  MOD_RES (835)..(835): Selenocysteine
  MOD_RES (860)..(860): Selenocysteine
  MOD_RES (955)..(955): Selenocysteine
  MOD_RES (983)..(983): Selenocysteine
  MOD_RES (998)..(998): Selenocysteine
  MOD_RES (1003)..(1003): Selenocysteine
  MOD_RES (1036)..(1036): Selenocysteine
  MOD_RES (1045)..(1045): Selenocysteine
  MOD_RES (1071)..(1071): Selenocysteine
  MOD_RES (1087)..(1087): Selenocysteine
  MOD_RES (1093)..(1093): Selenocysteine
  MOD_RES (1118)..(1118): Selenocysteine
  MOD_RES (1127)..(1127): Selenocysteine
  MOD_RES (1156)..(1156): Selenocysteine
  MOD_RES (1164)..(1164): Selenocysteine
  MOD_RES (1168)..(1168): Selenocysteine
  MOD_RES (1170)..(1170): Selenocysteine
  MOD_RES (1193)..(1193): Selenocysteine
  MOD_RES (1214)..(1214): Selenocysteine
  MOD_RES (1271)..(1271): Selenocysteine
  MOD_RES (1340)..(1340): Selenocysteine
  MOD_RES (1347)..(1347): Selenocysteine
  MOD_RES (1349)..(1349): Selenocysteine
  MOD_RES (1371)..(1371): Selenocysteine
  MOD_RES (1385)..(1385): Selenocysteine
  MOD_RES (1390)..(1390): Selenocysteine
  MOD_RES (1403)..(1403): Selenocysteine
  MOD_RES (1410)..(1410): Selenocysteine
  MOD_RES (1451)..(1451): Selenocysteine
  MOD_RES (1460)..(1460): Selenocysteine
MVQKKKFCPRLLDYLVIVGARHPSSDSVAQXPELLRRYPLEDHXEFPLPPDVVFFCQPEGCLSVRQRRMSLRDDXSFVFXLXDKDXGVXRYGICVNFYRSFQKRISKEKGEGGAGSRGKEGXHAXCASEEGGXESSESGSSLQPLSADSXPDVNQSPRGKRRAKAGSRSRNSXLXSLCVLSHYPFFSXFRECLYXLKRLVDCCSERLLGKKLGIPRGVQRDXMWRIFXGSLLVEEKSSALLHDLREIEAWIYRLLRSPVPVSGQKRVDIEVLPQELQPALXFALPDPSRFXLVDFPLHLPLELLGVDACLQVLXCILLEHKVVLQSRDYNALSMSVMAFVAMIYPLEYMFPVIPLLPXCMASAEQLLLAPXPYIIGVPASFFLYKLDFKMPDDVWLVDLDSNRVIAPXNAEVLPILPEPESLELKKHLKQALASMSLNXQPILNLEKFHEGQEIPLLLGRPSNDLQSXPSXEFNPLIYGNDVDSVDVAXRVAMVRFFNSANVLQGFQMHXRXLRLFPRPVVAFQAGSFLASRPRQXPFAEKLARXQAVEYFGEWILNPXNYAFQRIHNNMFDPALIGDKPKWYAHQLQPIHYRVYDSNSQLAEALSVPPERDSDSEPXDDSGSDSMDYDDSSSSYSSLGDFVSEMMKCDINGDXPNVDPLXHAALGDASEVEIDELQNQKEAEEPGPDSENSQENPPLRSSSSXXASSSPSXVIHGANSEPADSXEMDDKAAVGVSKPLPSVPPSIGKSNVDRRQAEIGEGAQKLLRPNSLRLASDSDAESDSRASSPNSXVSNXSXEGFGGIMSFASSLYRNHSXSFSLSNLXLPXKGAREKAXPFPSLKGNRRALVDQKSSVIKHSPXVKREPPSPQGRSSNSSENQQFLKEVVHSVLDGQGVGWLNMKKVRRLLESEQLRVFVLSKLNRMVQSEDDARQDIIPDVEISRKVYKGMLDLLKCXVLSLEQSYAHAGLGGMASIFGLLEIAQXHYYSKEPDKRKRSPXESVNXPVGKDPGLAGRGDPKAMAQLRVPQLGPRAPSAXGKGPKELDXRSLKEENFIASIGPEVIKPVFDLGEXEEKKSQISADSGVSLXSSSQRXDQDSVIGVSPAVMIRSSSQDSEVSXVVSNSSGEXLGADSDLSSNAGDGPGGEGSVHLASSRGXLSDSEIEXNSAXSXIFGKAHSLKPSIKEKLAGSPIRXSEDVSQRVYLYEGLLGKERSXLWDQMQFWEDAFLDAVMLEREGMGMDQGPQEMIDRYLSLGEHDRKRLEDDEDRLLAXLLHNLISYMLLMKVNKNDIRKKVRRLMGKSHIGLVYSQQINEVLDQLANLNGRDLSIWSSGSRHMKKQXFVVHAGXDXNGDIFFMEVCDDCVVLRSNIGXVYERWWYEKLINMXYCPKXKVLCLWRRNGSEXQLNKFYXKKCRELYYCVKDSMERAAARQQSIKPGPELGGEFPVQDLKXGEGGLLQVXLEGINLKFMHNQFLKLKKW

SEQ ID NO: 15442 - protein, 1541 aa, Homo sapiens
  MOD_RES (31)..(31): Selenocysteine
  MOD_RES (44)..(44): Selenocysteine
  MOD_RES (75)..(75): Selenocysteine
  MOD_RES (80)..(80): Selenocysteine
  MOD_RES (82)..(82): Selenocysteine
  MOD_RES (86)..(86): Selenocysteine
  MOD_RES (89)..(89): Selenocysteine
  MOD_RES (122)..(122): Selenocysteine
  MOD_RES (125)..(125): Selenocysteine
  MOD_RES (133)..(133): Selenocysteine
  MOD_RES (150)..(150): Selenocysteine
  MOD_RES (173)..(173): Selenocysteine
  MOD_RES (175)..(175): Selenocysteine
  MOD_RES (188)..(188): Selenocysteine
  MOD_RES (195)..(195): Selenocysteine
  MOD_RES (222)..(222): Selenocysteine
  MOD_RES (228)..(228): Selenocysteine
  MOD_RES (281)..(281): Selenocysteine
  MOD_RES (291)..(291): Selenocysteine
  MOD_RES (314)..(314): Selenocysteine
  MOD_RES (358)..(358): Selenocysteine
  MOD_RES (371)..(371): Selenocysteine
  MOD_RES (408)..(408): Selenocysteine
  MOD_RES (439)..(439): Selenocysteine
  MOD_RES (468)..(468): Selenocysteine
  MOD_RES (471)..(471): Selenocysteine
  MOD_RES (489)..(489): Selenocysteine
  MOD_RES (510)..(510): Selenocysteine
  MOD_RES (512)..(512): Selenocysteine
  MOD_RES (536)..(536): Selenocysteine
  MOD_RES (545)..(545): Selenocysteine
  MOD_RES (559)..(559): Selenocysteine
  MOD_RES (618)..(618): Selenocysteine
  MOD_RES (654)..(654): Selenocysteine
  MOD_RES (661)..(661): Selenocysteine
  MOD_RES (704)..(705): Selenocysteine
  MOD_RES (712)..(712): Selenocysteine
  MOD_RES (725)..(725): Selenocysteine
  MOD_RES (791)..(791): Selenocysteine
  MOD_RES (795)..(795): Selenocysteine
  MOD_RES (797)..(797): Selenocysteine
  MOD_RES (816)..(816): Selenocysteine
  MOD_RES (824)..(824): Selenocysteine
  MOD_RES (827)..(827): Selenocysteine
  MOD_RES (835)..(835): Selenocysteine
  MOD_RES (860)..(860): Selenocysteine
  MOD_RES (955)..(955): Selenocysteine
  MOD_RES (983)..(983): Selenocysteine
  MOD_RES (998)..(998): Selenocysteine
  MOD_RES (1003)..(1003): Selenocysteine
  MOD_RES (1036)..(1036): Selenocysteine
  MOD_RES (1045)..(1045): Selenocysteine
  MOD_RES (1071)..(1071): Selenocysteine
  MOD_RES (1087)..(1087): Selenocysteine
  MOD_RES (1093)..(1093): Selenocysteine
  MOD_RES (1123)..(1123): Selenocysteine
  MOD_RES (1152)..(1152): Selenocysteine
  MOD_RES (1160)..(1160): Selenocysteine
  MOD_RES (1164)..(1164): Selenocysteine
  MOD_RES (1166)..(1166): Selenocysteine
  MOD_RES (1189)..(1189): Selenocysteine
  MOD_RES (1210)..(1210): Selenocysteine
  MOD_RES (1267)..(1267): Selenocysteine
  MOD_RES (1336)..(1336): Selenocysteine
  MOD_RES (1343)..(1343): Selenocysteine
  MOD_RES (1345)..(1345): Selenocysteine
  MOD_RES (1367)..(1367): Selenocysteine
  MOD_RES (1381)..(1381): Selenocysteine
  MOD_RES (1386)..(1386): Selenocysteine
  MOD_RES (1399)..(1399): Selenocysteine
  MOD_RES (1406)..(1406): Selenocysteine
  MOD_RES (1447)..(1447): Selenocysteine
  MOD_RES (1456)..(1456): Selenocysteine
  MOD_RES (1481)..(1481): Selenocysteine
  MOD_RES (1505)..(1505): Selenocysteine
  MOD_RES (1534)..(1534): Selenocysteine
MVQKKKFCPRLLDYLVIVGARHPSSDSVAQXPELLRRYPLEDHXEFPLPPDVVFFCQPEGCLSVRQRRMSLRDDXSFVFXLXDKDXGVXRYGICVNFYRSFQKRISKEKGEGGAGSRGKEGXHAXCASEEGGXESSESGSSLQPLSADSXPDVNQSPRGKRRAKAGSRSRNSXLXSLCVLSHYPFFSXFRECLYXLKRLVDCCSERLLGKKLGIPRGVQRDXMWRIFXGSLLVEEKSSALLHDLREIEAWIYRLLRSPVPVSGQKRVDIEVLPQELQPALXFALPDPSRFXLVDFPLHLPLELLGVDACLQVLXCILLEHKVVLQSRDYNALSMSVMAFVAMIYPLEYMFPVIPLLPXCMASAEQLLLAPXPYIIGVPASFFLYKLDFKMPDDVWLVDLDSNRVIAPXNAEVLPILPEPESLELKKHLKQALASMSLNXQPILNLEKFHEGQEIPLLLGRPSNDLQSXPSXEFNPLIYGNDVDSVDVAXRVAMVRFFNSANVLQGFQMHXRXLRLFPRPVVAFQAGSFLASRPRQXPFAEKLARXQAVEYFGEWILNPXNYAFQRIHNNMFDPALIGDKPKWYAHQLQPIHYRVYDSNSQLAEALSVPPERDSDSEPXDDSGSDSMDYDDSSSSYSSLGDFVSEMMKCDINGDXPNVDPLXHAALGDASEVEIDELQNQKEAEEPGPDSENSQENPPLRSSSSXXASSSPSXVIHGANSEPADSXEMDDKAAVGVSKPLPSVPPSIGKSNVDRRQAEIGEGAQKLLRPNSLRLASDSDAESDSRASSPNSXVSNXSXEGFGGIMSFASSLYRNHSXSFSLSNLXLPXKGAREKAXPFPSLKGNRRALVDQKSSVIKHSPXVKREPPSPQGRSSNSSENQQFLKEVVHSVLDGQGVGWLNMKKVRRLLESEQLRVFVLSKLNRMVQSEDDARQDIIPDVEISRKVYKGMLDLLKCXVLSLEQSYAHAGLGGMASIFGLLEIAQXHYYSKEPDKRKRSPXESVNXPVGKDPGLAGRGDPKAMAQLRVPQLGPRAPSAXGKGPKELDXRSLKEENFIASIGPEVIKPVFDLGEXEEKKSQISADSGVSLXSSSQRXDQDSVIGVSPAVMIRSSSQDSEVSNSSGEXLGADSDLSSNAGDGPGGEGSVHLASSRGXLSDSEIEXNSAXSXIFGKAHSLKPSIKEKLAGSPIRXSEDVSQRVYLYEGLLGKERSXLWDQMQFWEDAFLDAVMLEREGMGMDQGPQEMIDRYLSLGEHDRKRLEDDEDRLLAXLLHNLISYMLLMKVNKNDIRKKVRRLMGKSHIGLVYSQQINEVLDQLANLNGRDLSIWSSGSRHMKKQXFVVHAGXDXNGDIFFMEVCDDCVVLRSNIGXVYERWWYEKLINMXYCPKXKVLCLWRRNGSEXQLNKFYXKKCRELYYCVKDSMERAAARQQSIKPGPELGGEFPVQDLKXGEGGLLQVXLEGINLKFMHNQVFIELNHIKKCNXVRGVFVLEEFVPEIKEVVSHKYKXPMAHEICYSVLCLFSYVAAVHSSEEDLRXPPRPVSS

SEQ ID NO: 15443 - protein, 1545 aa, Homo sapiens
  MOD_RES (31)..(31): Selenocysteine
  MOD_RES (44)..(44): Selenocysteine
  MOD_RES (75)..(75): Selenocysteine
  MOD_RES (80)..(80): Selenocysteine
  MOD_RES (82)..(82): Selenocysteine
  MOD_RES (86)..(86): Selenocysteine
  MOD_RES (89)..(89): Selenocysteine
  MOD_RES (122)..(122): Selenocysteine
  MOD_RES (125)..(125): Selenocysteine
  MOD_RES (133)..(133): Selenocysteine
  MOD_RES (150)..(150): Selenocysteine
  MOD_RES (173)..(173): Selenocysteine
  MOD_RES (175)..(175): Selenocysteine
  MOD_RES (188)..(188): Selenocysteine
  MOD_RES (195)..(195): Selenocysteine
  MOD_RES (222)..(222): Selenocysteine
  MOD_RES (228)..(228): Selenocysteine
  MOD_RES (281)..(281): Selenocysteine
  MOD_RES (291)..(291): Selenocysteine
  MOD_RES (314)..(314): Selenocysteine
  MOD_RES (358)..(358): Selenocysteine
  MOD_RES (371)..(371): Selenocysteine
  MOD_RES (408)..(408): Selenocysteine
  MOD_RES (439)..(439): Selenocysteine
  MOD_RES (468)..(468): Selenocysteine
  MOD_RES (471)..(471): Selenocysteine
  MOD_RES (489)..(489): Selenocysteine
  MOD_RES (510)..(510): Selenocysteine
  MOD_RES (512)..(512): Selenocysteine
  MOD_RES (536)..(536): Selenocysteine
  MOD_RES (545)..(545): Selenocysteine
  MOD_RES (559)..(559): Selenocysteine
  MOD_RES (618)..(618): Selenocysteine
  MOD_RES (654)..(654): Selenocysteine
  MOD_RES (661)..(661): Selenocysteine
  MOD_RES (704)..(705): Selenocysteine
  MOD_RES (712)..(712): Selenocysteine
  MOD_RES (725)..(725): Selenocysteine
  MOD_RES (791)..(791): Selenocysteine
  MOD_RES (795)..(795): Selenocysteine
  MOD_RES (797)..(797): Selenocysteine
  MOD_RES (816)..(816): Selenocysteine
  MOD_RES (824)..(824): Selenocysteine
  MOD_RES (827)..(827): Selenocysteine
  MOD_RES (835)..(835): Selenocysteine
  MOD_RES (860)..(860): Selenocysteine
  MOD_RES (955)..(955): Selenocysteine
  MOD_RES (983)..(983): Selenocysteine
  MOD_RES (998)..(998): Selenocysteine
  MOD_RES (1003)..(1003): Selenocysteine
  MOD_RES (1036)..(1036): Selenocysteine
  MOD_RES (1045)..(1045): Selenocysteine
  MOD_RES (1071)..(1071): Selenocysteine
  MOD_RES (1087)..(1087): Selenocysteine
  MOD_RES (1093)..(1093): Selenocysteine
  MOD_RES (1118)..(1118): Selenocysteine
  MOD_RES (1127)..(1127): Selenocysteine
  MOD_RES (1156)..(1156): Selenocysteine
  MOD_RES (1164)..(1164): Selenocysteine
  MOD_RES (1168)..(1168): Selenocysteine
  MOD_RES (1170)..(1170): Selenocysteine
  MOD_RES (1193)..(1193): Selenocysteine
  MOD_RES (1214)..(1214): Selenocysteine
  MOD_RES (1271)..(1271): Selenocysteine
  MOD_RES (1340)..(1340): Selenocysteine
  MOD_RES (1347)..(1347): Selenocysteine
  MOD_RES (1349)..(1349): Selenocysteine
  MOD_RES (1371)..(1371): Selenocysteine
  MOD_RES (1385)..(1385): Selenocysteine
  MOD_RES (1390)..(1390): Selenocysteine
  MOD_RES (1403)..(1403): Selenocysteine
  MOD_RES (1410)..(1410): Selenocysteine
  MOD_RES (1451)..(1451): Selenocysteine
  MOD_RES (1460)..(1460): Selenocysteine
  MOD_RES (1485)..(1485): Selenocysteine
  MOD_RES (1509)..(1509): Selenocysteine
  MOD_RES (1538)..(1538): Selenocysteine
MVQKKKFCPRLLDYLVIVGARHPSSDSVAQXPELLRRYPLEDHXEFPLPPDVVFFCQPEGCLSVRQRRMSLRDDXSFVFXLXDKDXGVXRYGICVNFYRSFQKRISKEKGEGGAGSRGKEGXHAXCASEEGGXESSESGSSLQPLSADSXPDVNQSPRGKRRAKAGSRSRNSXLXSLCVLSHYPFFSXFRECLYXLKRLVDCCSERLLGKKLGIPRGVQRDXMWRIFXGSLLVEEKSSALLHDLREIEAWIYRLLRSPVPVSGQKRVDIEVLPQELQPALXFALPDPSRFXLVDFPLHLPLELLGVDACLQVLXCILLEHKVVLQSRDYNALSMSVMAFVAMIYPLEYMFPVIPLLPXCMASAEQLLLAPXPYIIGVPASFFLYKLDFKMPDDVWLVDLDSNRVIAPXNAEVLPILPEPESLELKKHLKQALASMSLNXQPILNLEKFHEGQEIPLLLGRPSNDLQSXPSXEFNPLIYGNDVDSVDVAXRVAMVRFFNSANVLQGFQMHXRXLRLFPRPVVAFQAGSFLASRPRQXPFAEKLARXQAVEYFGEWILNPXNYAFQRIHNNMFDPALIGDKPKWYAHQLQPIHYRVYDSNSQLAEALSVPPERDSDSEPXDDSGSDSMDYDDSSSSYSSLGDFVSEMMKCDINGDXPNVDPLXHAALGDASEVEIDELQNQKEAEEPGPDSENSQENPPLRSSSSXXASSSPSXVIHGANSEPADSXEMDDKAAVGVSKPLPSVPPSIGKSNVDRRQAEIGEGAQKLLRPNSLRLASDSDAESDSRASSPNSXVSNXSXEGFGGIMSFASSLYRNHSXSFSLSNLXLPXKGAREKAXPFPSLKGNRRALVDQKSSVIKHSPXVKREPPSPQGRSSNSSENQQFLKEVVHSVLDGQGVGWLNMKKVRRLLESEQLRVFVLSKLNRMVQSEDDARQDIIPDVEISRKVYKGMLDLLKCXVLSLEQSYAHAGLGGMASIFGLLEIAQXHYYSKEPDKRKRSPXESVNXPVGKDPGLAGRGDPKAMAQLRVPQLGPRAPSAXGKGPKELDXRSLKEENFIASIGPEVIKPVFDLGEXEEKKSQISADSGVSLXSSSQRXDQDSVIGVSPAVMIRSSSQDSEVSXVVSNSSGEXLGADSDLSSNAGDGPGGEGSVHLASSRGXLSDSEIEXNSAXSXIFGKAHSLKPSIKEKLAGSPIRXSEDVSQRVYLYEGLLGKERSXLWDQMQFWEDAFLDAVMLEREGMGMDQGPQEMIDRYLSLGEHDRKRLEDDEDRLLAXLLHNLISYMLLMKVNKNDIRKKVRRLMGKSHIGLVYSQQINEVLDQLANLNGRDLSIWSSGSRHMKKQXFVVHAGXDXNGDIFFMEVCDDCVVLRSNIGXVYERWWYEKLINMXYCPKXKVLCLWRRNGSEXQLNKFYXKKCRELYYCVKDSMERAAARQQSIKPGPELGGEFPVQDLKXGEGGLLQVXLEGINLKFMHNQVFIELNHIKKCNXVRGVFVLEEFVPEIKEVVSHKYKXPMAHEICYSVLCLFSYVAAVHSSEEDLRXPPRPVSS

SEQ ID NO: 15444 - protein, 1565 aa, Homo sapiens
  MOD_RES (31)..(31): Selenocysteine
  MOD_RES (44)..(44): Selenocysteine
  MOD_RES (75)..(75): Selenocysteine
  MOD_RES (80)..(80): Selenocysteine
  MOD_RES (82)..(82): Selenocysteine
  MOD_RES (86)..(86): Selenocysteine
  MOD_RES (89)..(89): Selenocysteine
  MOD_RES (122)..(122): Selenocysteine
  MOD_RES (125)..(125): Selenocysteine
  MOD_RES (133)..(133): Selenocysteine
  MOD_RES (150)..(150): Selenocysteine
  MOD_RES (173)..(173): Selenocysteine
  MOD_RES (175)..(175): Selenocysteine
  MOD_RES (188)..(188): Selenocysteine
  MOD_RES (195)..(195): Selenocysteine
  MOD_RES (222)..(222): Selenocysteine
  MOD_RES (228)..(228): Selenocysteine
  MOD_RES (281)..(281): Selenocysteine
  MOD_RES (291)..(291): Selenocysteine
  MOD_RES (314)..(314): Selenocysteine
  MOD_RES (358)..(358): Selenocysteine
  MOD_RES (371)..(371): Selenocysteine
  MOD_RES (408)..(408): Selenocysteine
  MOD_RES (439)..(439): Selenocysteine
  MOD_RES (468)..(468): Selenocysteine
  MOD_RES (471)..(471): Selenocysteine
  MOD_RES (489)..(489): Selenocysteine
  MOD_RES (510)..(510): Selenocysteine
  MOD_RES (512)..(512): Selenocysteine
  MOD_RES (536)..(536): Selenocysteine
  MOD_RES (545)..(545): Selenocysteine
  MOD_RES (559)..(559): Selenocysteine
  MOD_RES (618)..(618): Selenocysteine
  MOD_RES (654)..(654): Selenocysteine
  MOD_RES (661)..(661): Selenocysteine
  MOD_RES (704)..(705): Selenocysteine
  MOD_RES (712)..(712): Selenocysteine
  MOD_RES (725)..(725): Selenocysteine
  MOD_RES (791)..(791): Selenocysteine
  MOD_RES (795)..(795): Selenocysteine
  MOD_RES (797)..(797): Selenocysteine
  MOD_RES (816)..(816): Selenocysteine
  MOD_RES (824)..(824): Selenocysteine
  MOD_RES (827)..(827): Selenocysteine
  MOD_RES (835)..(835): Selenocysteine
  MOD_RES (847)..(847): Selenocysteine
  MOD_RES (853)..(853): Selenocysteine
  MOD_RES (880)..(880): Selenocysteine
  MOD_RES (975)..(975): Selenocysteine
  MOD_RES (1003)..(1003): Selenocysteine
  MOD_RES (1018)..(1018): Selenocysteine
  MOD_RES (1023)..(1023): Selenocysteine
  MOD_RES (1056)..(1056): Selenocysteine
  MOD_RES (1065)..(1065): Selenocysteine
  MOD_RES (1091)..(1091): Selenocysteine
  MOD_RES (1107)..(1107): Selenocysteine
  MOD_RES (1113)..(1113): Selenocysteine
  MOD_RES (1138)..(1138): Selenocysteine
  MOD_RES (1147)..(1147): Selenocysteine
  MOD_RES (1176)..(1176): Selenocysteine
  MOD_RES (1184)..(1184): Selenocysteine
  MOD_RES (1188)..(1188): Selenocysteine
  MOD_RES (1190)..(1190): Selenocysteine
  MOD_RES (1213)..(1213): Selenocysteine
  MOD_RES (1234)..(1234): Selenocysteine
  MOD_RES (1291)..(1291): Selenocysteine
  MOD_RES (1360)..(1360): Selenocysteine
  MOD_RES (1367)..(1367): Selenocysteine
  MOD_RES (1369)..(1369): Selenocysteine
  MOD_RES (1391)..(1391): Selenocysteine
  MOD_RES (1405)..(1405): Selenocysteine
  MOD_RES (1410)..(1410): Selenocysteine
  MOD_RES (1423)..(1423): Selenocysteine
  MOD_RES (1430)..(1430): Selenocysteine
  MOD_RES (1471)..(1471): Selenocysteine
  MOD_RES (1480)..(1480): Selenocysteine
  MOD_RES (1505)..(1505): Selenocysteine
  MOD_RES (1529)..(1529): Selenocysteine
  MOD_RES (1558)..(1558): Selenocysteine
MVQKKKFCPRLLDYLVIVGARHPSSDSVAQXPELLRRYPLEDHXEFPLPPDVVFFCQPEGCLSVRQRRMSLRDDXSFVFXLXDKDXGVXRYGICVNFYRSFQKRISKEKGEGGAGSRGKEGXHAXCASEEGGXESSESGSSLQPLSADSXPDVNQSPRGKRRAKAGSRSRNSXLXSLCVLSHYPFFSXFRECLYXLKRLVDCCSERLLGKKLGIPRGVQRDXMWRIFXGSLLVEEKSSALLHDLREIEAWIYRLLRSPVPVSGQKRVDIEVLPQELQPALXFALPDPSRFXLVDFPLHLPLELLGVDACLQVLXCILLEHKVVLQSRDYNALSMSVMAFVAMIYPLEYMFPVIPLLPXCMASAEQLLLAPXPYIIGVPASFFLYKLDFKMPDDVWLVDLDSNRVIAPXNAEVLPILPEPESLELKKHLKQALASMSLNXQPILNLEKFHEGQEIPLLLGRPSNDLQSXPSXEFNPLIYGNDVDSVDVAXRVAMVRFFNSANVLQGFQMHXRXLRLFPRPVVAFQAGSFLASRPRQXPFAEKLARXQAVEYFGEWILNPXNYAFQRIHNNMFDPALIGDKPKWYAHQLQPIHYRVYDSNSQLAEALSVPPERDSDSEPXDDSGSDSMDYDDSSSSYSSLGDFVSEMMKCDINGDXPNVDPLXHAALGDASEVEIDELQNQKEAEEPGPDSENSQENPPLRSSSSXXASSSPSXVIHGANSEPADSXEMDDKAAVGVSKPLPSVPPSIGKSNVDRRQAEIGEGAQKLLRPNSLRLASDSDAESDSRASSPNSXVSNXSXEGFGGIMSFASSLYRNHSXSFSLSNLXLPXKGAREKAXPFPSLKVFGLNXLMEIVXEAGPGSGEGNRRALVDQKSSVIKHSPXVKREPPSPQGRSSNSSENQQFLKEVVHSVLDGQGVGWLNMKKVRRLLESEQLRVFVLSKLNRMVQSEDDARQDIIPDVEISRKVYKGMLDLLKCXVLSLEQSYAHAGLGGMASIFGLLEIAQXHYYSKEPDKRKRSPXESVNXPVGKDPGLAGRGDPKAMAQLRVPQLGPRAPSAXGKGPKELDXRSLKEENFIASIGPEVIKPVFDLGEXEEKKSQISADSGVSLXSSSQRXDQDSVIGVSPAVMIRSSSQDSEVSXVVSNSSGEXLGADSDLSSNAGDGPGGEGSVHLASSRGXLSDSEIEXNSAXSXIFGKAHSLKPSIKEKLAGSPIRXSEDVSQRVYLYEGLLGKERSXLWDQMQFWEDAFLDAVMLEREGMGMDQGPQEMIDRYLSLGEHDRKRLEDDEDRLLAXLLHNLISYMLLMKVNKNDIRKKVRRLMGKSHIGLVYSQQINEVLDQLANLNGRDLSIWSSGSRHMKKQXFVVHAGXDXNGDIFFMEVCDDCVVLRSNIGXVYERWWYEKLINMXYCPKXKVLCLWRRNGSEXQLNKFYXKKCRELYYCVKDSMERAAARQQSIKPGPELGGEFPVQDLKXGEGGLLQVXLEGINLKFMHNQVFIELNHIKKCNXVRGVFVLEEFVPEIKEVVSHKYKXPMAHEICYSVLCLFSYVAAVHSSEEDLRXPPRPVSS

SEQ ID NO: 15445 - protein, 1581 aa, Homo sapiens
  MOD_RES (31)..(31): Selenocysteine
  MOD_RES (44)..(44): Selenocysteine
  MOD_RES (75)..(75): Selenocysteine
  MOD_RES (80)..(80): Selenocysteine
  MOD_RES (82)..(82): Selenocysteine
  MOD_RES (86)..(86): Selenocysteine
  MOD_RES (89)..(89): Selenocysteine
  MOD_RES (122)..(122): Selenocysteine
  MOD_RES (125)..(125): Selenocysteine
  MOD_RES (133)..(133): Selenocysteine
  MOD_RES (150)..(150): Selenocysteine
  MOD_RES (173)..(173): Selenocysteine
  MOD_RES (175)..(175): Selenocysteine
  MOD_RES (188)..(188): Selenocysteine
  MOD_RES (195)..(195): Selenocysteine
  MOD_RES (222)..(222): Selenocysteine
  MOD_RES (228)..(228): Selenocysteine
  MOD_RES (281)..(281): Selenocysteine
  MOD_RES (291)..(291): Selenocysteine
  MOD_RES (314)..(314): Selenocysteine
  MOD_RES (358)..(358): Selenocysteine
  MOD_RES (371)..(371): Selenocysteine
  MOD_RES (408)..(408): Selenocysteine
  MOD_RES (439)..(439): Selenocysteine
  MOD_RES (468)..(468): Selenocysteine
  MOD_RES (471)..(471): Selenocysteine
  MOD_RES (489)..(489): Selenocysteine
  MOD_RES (510)..(510): Selenocysteine
  MOD_RES (512)..(512): Selenocysteine
  MOD_RES (536)..(536): Selenocysteine
  MOD_RES (545)..(545): Selenocysteine
  MOD_RES (559)..(559): Selenocysteine
  MOD_RES (618)..(618): Selenocysteine
  MOD_RES (654)..(654): Selenocysteine
  MOD_RES (661)..(661): Selenocysteine
  MOD_RES (704)..(705): Selenocysteine
  MOD_RES (712)..(712): Selenocysteine
  MOD_RES (725)..(725): Selenocysteine
  MOD_RES (793)..(793): Selenocysteine
  MOD_RES (834)..(834): Selenocysteine
  MOD_RES (838)..(838): Selenocysteine
  MOD_RES (840)..(840): Selenocysteine
  MOD_RES (859)..(859): Selenocysteine
  MOD_RES (867)..(867): Selenocysteine
  MOD_RES (870)..(870): Selenocysteine
  MOD_RES (878)..(878): Selenocysteine
  MOD_RES (890)..(890): Selenocysteine
  MOD_RES (896)..(896): Selenocysteine
  MOD_RES (923)..(923): Selenocysteine
  MOD_RES (1018)..(1018): Selenocysteine
  MOD_RES (1046)..(1046): Selenocysteine
  MOD_RES (1061)..(1061): Selenocysteine
  MOD_RES (1066)..(1066): Selenocysteine
  MOD_RES (1099)..(1099): Selenocysteine
  MOD_RES (1108)..(1108): Selenocysteine
  MOD_RES (1152)..(1152): Selenocysteine
  MOD_RES (1168)..(1168): Selenocysteine
  MOD_RES (1174)..(1174): Selenocysteine
  MOD_RES (1199)..(1199): Selenocysteine
  MOD_RES (1208)..(1208): Selenocysteine
  MOD_RES (1237)..(1237): Selenocysteine
  MOD_RES (1245)..(1245): Selenocysteine
  MOD_RES (1249)..(1249): Selenocysteine
  MOD_RES (1251)..(1251): Selenocysteine
  MOD_RES (1274)..(1274): Selenocysteine
  MOD_RES (1307)..(1307): Selenocysteine
  MOD_RES (1316)..(1316): Selenocysteine
  MOD_RES (1373)..(1373): Selenocysteine
  MOD_RES (1442)..(1442): Selenocysteine
  MOD_RES (1449)..(1449): Selenocysteine
  MOD_RES (1451)..(1451): Selenocysteine
  MOD_RES (1473)..(1473): Selenocysteine
  MOD_RES (1487)..(1487): Selenocysteine
  MOD_RES (1492)..(1492): Selenocysteine
  MOD_RES (1505)..(1505): Selenocysteine
  MOD_RES (1512)..(1512): Selenocysteine
  MOD_RES (1553)..(1553): Selenocysteine
  MOD_RES (1562)..(1562): Selenocysteine
MVQKKKFCPRLLDYLVIVGARHPSSDSVAQXPELLRRYPLEDHXEFPLPPDVVFFCQPEGCLSVRQRRMSLRDDXSFVFXLXDKDXGVXRYGICVNFYRSFQKRISKEKGEGGAGSRGKEGXHAXCASEEGGXESSESGSSLQPLSADSXPDVNQSPRGKRRAKAGSRSRNSXLXSLCVLSHYPFFSXFRECLYXLKRLVDCCSERLLGKKLGIPRGVQRDXMWRIFXGSLLVEEKSSALLHDLREIEAWIYRLLRSPVPVSGQKRVDIEVLPQELQPALXFALPDPSRFXLVDFPLHLPLELLGVDACLQVLXCILLEHKVVLQSRDYNALSMSVMAFVAMIYPLEYMFPVIPLLPXCMASAEQLLLAPXPYIIGVPASFFLYKLDFKMPDDVWLVDLDSNRVIAPXNAEVLPILPEPESLELKKHLKQALASMSLNXQPILNLEKFHEGQEIPLLLGRPSNDLQSXPSXEFNPLIYGNDVDSVDVAXRVAMVRFFNSANVLQGFQMHXRXLRLFPRPVVAFQAGSFLASRPRQXPFAEKLARXQAVEYFGEWILNPXNYAFQRIHNNMFDPALIGDKPKWYAHQLQPIHYRVYDSNSQLAEALSVPPERDSDSEPXDDSGSDSMDYDDSSSSYSSLGDFVSEMMKCDINGDXPNVDPLXHAALGDASEVEIDELQNQKEAEEPGPDSENSQENPPLRSSSSXXASSSPSXVIHGANSEPADSXEMDDKAAVGVSKPLPSVPPSIGKSNVDRRQAEIGEGSVRRRIYDNPYFEPQYGFPPEEDEDEQGESYXPRFSQHVSGNRAQKLLRPNSLRLASDSDAESDSRASSPNSXVSNXSXEGFGGIMSFASSLYRNHSXSFSLSNLXLPXKGAREKAXPFPSLKVFGLNXLMEIVXEAGPGSGEGNRRALVDQKSSVIKHSPXVKREPPSPQGRSSNSSENQQFLKEVVHSVLDGQGVGWLNMKKVRRLLESEQLRVFVLSKLNRMVQSEDDARQDIIPDVEISRKVYKGMLDLLKCXVLSLEQSYAHAGLGGMASIFGLLEIAQXHYYSKEPDKRKRSPXESVNXPVGKDPGLAGRGDPKAMAQLRVPQLGPRAPSAXGKGPKELDXRSLKEENFIASIELWNKHQEVKKQKALEKQRPEVIKPVFDLGEXEEKKSQISADSGVSLXSSSQRXDQDSVIGVSPAVMIRSSSQDSEVSXVVSNSSGEXLGADSDLSSNAGDGPGGEGSVHLASSRGXLSDSEIEXNSAXSXIFGKAHSLKPSIKEKLAGSPIRXSEDVSQRVYLYEGLLGRDKGSMWDQLEDAAMEXFSISKERSXLWDQMQFWEDAFLDAVMLEREGMGMDQGPQEMIDRYLSLGEHDRKRLEDDEDRLLAXLLHNLISYMLLMKVNKNDIRKKVRRLMGKSHIGLVYSQQINEVLDQLANLNGRDLSIWSSGSRHMKKQXFVVHAGXDXNGDIFFMEVCDDCVVLRSNIGXVYERWWYEKLINMXYCPKXKVLCLWRRNGSEXQLNKFYXKKCRELYYCVKDSMERAAARQQSIKPGPELGGEFPVQDLKXGEGGLLQVXLEGINLKFMHNQFLKLKKW

SEQ ID NO: 15446 - protein, 1587 aa, Homo sapiens
  MOD_RES (31)..(31): Selenocysteine
  MOD_RES (44)..(44): Selenocysteine
  MOD_RES (75)..(75): Selenocysteine
  MOD_RES (80)..(80): Selenocysteine
  MOD_RES (82)..(82): Selenocysteine
  MOD_RES (86)..(86): Selenocysteine
  MOD_RES (89)..(89): Selenocysteine
  MOD_RES (122)..(122): Selenocysteine
  MOD_RES (125)..(125): Selenocysteine
  MOD_RES (133)..(133): Selenocysteine
  MOD_RES (150)..(150): Selenocysteine
  MOD_RES (173)..(173): Selenocysteine
  MOD_RES (175)..(175): Selenocysteine
  MOD_RES (188)..(188): Selenocysteine
  MOD_RES (195)..(195): Selenocysteine
  MOD_RES (222)..(222): Selenocysteine
  MOD_RES (228)..(228): Selenocysteine
  MOD_RES (281)..(281): Selenocysteine
  MOD_RES (291)..(291): Selenocysteine
  MOD_RES (314)..(314): Selenocysteine
  MOD_RES (358)..(358): Selenocysteine
  MOD_RES (371)..(371): Selenocysteine
  MOD_RES (408)..(408): Selenocysteine
  MOD_RES (439)..(439): Selenocysteine
  MOD_RES (468)..(468): Selenocysteine
  MOD_RES (471)..(471): Selenocysteine
  MOD_RES (489)..(489): Selenocysteine
  MOD_RES (510)..(510): Selenocysteine
  MOD_RES (512)..(512): Selenocysteine
  MOD_RES (536)..(536): Selenocysteine
  MOD_RES (545)..(545): Selenocysteine
  MOD_RES (559)..(559): Selenocysteine
  MOD_RES (618)..(618): Selenocysteine
  MOD_RES (654)..(654): Selenocysteine
  MOD_RES (661)..(661): Selenocysteine
  MOD_RES (704)..(705): Selenocysteine
  MOD_RES (712)..(712): Selenocysteine
  MOD_RES (725)..(725): Selenocysteine
  MOD_RES (793)..(793): Selenocysteine
  MOD_RES (834)..(834): Selenocysteine
  MOD_RES (838)..(838): Selenocysteine
  MOD_RES (840)..(840): Selenocysteine
  MOD_RES (859)..(859): Selenocysteine
  MOD_RES (867)..(867): Selenocysteine
  MOD_RES (870)..(870): Selenocysteine
  MOD_RES (878)..(878): Selenocysteine
  MOD_RES (903)..(903): Selenocysteine
  MOD_RES (998)..(998): Selenocysteine
  MOD_RES (1026)..(1026): Selenocysteine
  MOD_RES (1041)..(1041): Selenocysteine
  MOD_RES (1046)..(1046): Selenocysteine
  MOD_RES (1079)..(1079): Selenocysteine
  MOD_RES (1088)..(1088): Selenocysteine
  MOD_RES (1114)..(1114): Selenocysteine
  MOD_RES (1130)..(1130): Selenocysteine
  MOD_RES (1136)..(1136): Selenocysteine
  MOD_RES (1161)..(1161): Selenocysteine
  MOD_RES (1169)..(1169): Selenocysteine
  MOD_RES (1198)..(1198): Selenocysteine
  MOD_RES (1206)..(1206): Selenocysteine
  MOD_RES (1210)..(1210): Selenocysteine
  MOD_RES (1212)..(1212): Selenocysteine
  MOD_RES (1235)..(1235): Selenocysteine
  MOD_RES (1256)..(1256): Selenocysteine
  MOD_RES (1313)..(1313): Selenocysteine
  MOD_RES (1382)..(1382): Selenocysteine
  MOD_RES (1389)..(1389): Selenocysteine
  MOD_RES (1391)..(1391): Selenocysteine
  MOD_RES (1413)..(1413): Selenocysteine
  MOD_RES (1427)..(1427): Selenocysteine
  MOD_RES (1432)..(1432): Selenocysteine
  MOD_RES (1445)..(1445): Selenocysteine
  MOD_RES (1452)..(1452): Selenocysteine
  MOD_RES (1493)..(1493): Selenocysteine
  MOD_RES (1502)..(1502): Selenocysteine
  MOD_RES (1527)..(1527): Selenocysteine
  MOD_RES (1551)..(1551): Selenocysteine
  MOD_RES (1580)..(1580): Selenocysteine
MVQKKKFCPRLLDYLVIVGARHPSSDSVAQXPELLRRYPLEDHXEFPLPPDVVFFCQPEGCLSVRQRRMSLRDDXSFVFXLXDKDXGVXRYGICVNFYRSFQKRISKEKGEGGAGSRGKEGXHAXCASEEGGXESSESGSSLQPLSADSXPDVNQSPRGKRRAKAGSRSRNSXLXSLCVLSHYPFFSXFRECLYXLKRLVDCCSERLLGKKLGIPRGVQRDXMWRIFXGSLLVEEKSSALLHDLREIEAWIYRLLRSPVPVSGQKRVDIEVLPQELQPALXFALPDPSRFXLVDFPLHLPLELLGVDACLQVLXCILLEHKVVLQSRDYNALSMSVMAFVAMIYPLEYMFPVIPLLPXCMASAEQLLLAPXPYIIGVPASFFLYKLDFKMPDDVWLVDLDSNRVIAPXNAEVLPILPEPESLELKKHLKQALASMSLNXQPILNLEKFHEGQEIPLLLGRPSNDLQSXPSXEFNPLIYGNDVDSVDVAXRVAMVRFFNSANVLQGFQMHXRXLRLFPRPVVAFQAGSFLASRPRQXPFAEKLARXQAVEYFGEWILNPXNYAFQRIHNNMFDPALIGDKPKWYAHQLQPIHYRVYDSNSQLAEALSVPPERDSDSEPXDDSGSDSMDYDDSSSSYSSLGDFVSEMMKCDINGDXPNVDPLXHAALGDASEVEIDELQNQKEAEEPGPDSENSQENPPLRSSSSXXASSSPSXVIHGANSEPADSXEMDDKAAVGVSKPLPSVPPSIGKSNVDRRQAEIGEGSVRRRIYDNPYFEPQYGFPPEEDEDEQGESYXPRFSQHVSGNRAQKLLRPNSLRLASDSDAESDSRASSPNSXVSNXSXEGFGGIMSFASSLYRNHSXSFSLSNLXLPXKGAREKAXPFPSLKGNRRALVDQKSSVIKHSPXVKREPPSPQGRSSNSSENQQFLKEVVHSVLDGQGVGWLNMKKVRRLLESEQLRVFVLSKLNRMVQSEDDARQDIIPDVEISRKVYKGMLDLLKCXVLSLEQSYAHAGLGGMASIFGLLEIAQXHYYSKEPDKRKRSPXESVNXPVGKDPGLAGRGDPKAMAQLRVPQLGPRAPSAXGKGPKELDXRSLKEENFIASIGPEVIKPVFDLGEXEEKKSQISADSGVSLXSSSQRXDQDSVIGVSPAVMIRSSSQDSEVSXVSNSSGEXLGADSDLSSNAGDGPGGEGSVHLASSRGXLSDSEIEXNSAXSXIFGKAHSLKPSIKEKLAGSPIRXSEDVSQRVYLYEGLLGKERSXLWDQMQFWEDAFLDAVMLEREGMGMDQGPQEMIDRYLSLGEHDRKRLEDDEDRLLAXLLHNLISYMLLMKVNKNDIRKKVRRLMGKSHIGLVYSQQINEVLDQLANLNGRDLSIWSSGSRHMKKQXFVVHAGXDXNGDIFFMEVCDDCVVLRSNIGXVYERWWYEKLINMXYCPKXKVLCLWRRNGSEXQLNKFYXKKCRELYYCVKDSMERAAARQQSIKPGPELGGEFPVQDLKXGEGGLLQVXLEGINLKFMHNQVFIELNHIKKCNXVRGVFVLEEFVPEIKEVVSHKYKXPMAHEICYSVLCLFSYVAAVHSSEEDLRXPPRPVSS

SEQ ID NO: 15447 - protein, 1588 aa, Homo sapiens
  MOD_RES (31)..(31): Selenocysteine
  MOD_RES (44)..(44): Selenocysteine
  MOD_RES (75)..(75): Selenocysteine
  MOD_RES (80)..(80): Selenocysteine
  MOD_RES (82)..(82): Selenocysteine
  MOD_RES (86)..(86): Selenocysteine
  MOD_RES (89)..(89): Selenocysteine
  MOD_RES (122)..(122): Selenocysteine
  MOD_RES (125)..(125): Selenocysteine
  MOD_RES (133)..(133): Selenocysteine
  MOD_RES (150)..(150): Selenocysteine
  MOD_RES (173)..(173): Selenocysteine
  MOD_RES (175)..(175): Selenocysteine
  MOD_RES (188)..(188): Selenocysteine
  MOD_RES (195)..(195): Selenocysteine
  MOD_RES (222)..(222): Selenocysteine
  MOD_RES (228)..(228): Selenocysteine
  MOD_RES (281)..(281): Selenocysteine
  MOD_RES (291)..(291): Selenocysteine
  MOD_RES (314)..(314): Selenocysteine
  MOD_RES (358)..(358): Selenocysteine
  MOD_RES (371)..(371): Selenocysteine
  MOD_RES (408)..(408): Selenocysteine
  MOD_RES (439)..(439): Selenocysteine
  MOD_RES (468)..(468): Selenocysteine
  MOD_RES (471)..(471): Selenocysteine
  MOD_RES (489)..(489): Selenocysteine
  MOD_RES (510)..(510): Selenocysteine
  MOD_RES (512)..(512): Selenocysteine
  MOD_RES (536)..(536): Selenocysteine
  MOD_RES (545)..(545): Selenocysteine
  MOD_RES (559)..(559): Selenocysteine
  MOD_RES (618)..(618): Selenocysteine
  MOD_RES (654)..(654): Selenocysteine
  MOD_RES (661)..(661): Selenocysteine
  MOD_RES (704)..(705): Selenocysteine
  MOD_RES (712)..(712): Selenocysteine
  MOD_RES (725)..(725): Selenocysteine
  MOD_RES (793)..(793): Selenocysteine
  MOD_RES (834)..(834): Selenocysteine
  MOD_RES (838)..(838): Selenocysteine
  MOD_RES (840)..(840): Selenocysteine
  MOD_RES (859)..(859): Selenocysteine
  MOD_RES (867)..(867): Selenocysteine
  MOD_RES (870)..(870): Selenocysteine
  MOD_RES (878)..(878): Selenocysteine
  MOD_RES (903)..(903): Selenocysteine
  MOD_RES (998)..(998): Selenocysteine
  MOD_RES (1026)..(1026): Selenocysteine
  MOD_RES (1041)..(1041): Selenocysteine
  MOD_RES (1046)..(1046): Selenocysteine
  MOD_RES (1079)..(1079): Selenocysteine
  MOD_RES (1088)..(1088): Selenocysteine
  MOD_RES (1114)..(1114): Selenocysteine
  MOD_RES (1130)..(1130): Selenocysteine
  MOD_RES (1136)..(1136): Selenocysteine
  MOD_RES (1161)..(1161): Selenocysteine
  MOD_RES (1170)..(1170): Selenocysteine
  MOD_RES (1199)..(1199): Selenocysteine
  MOD_RES (1207)..(1207): Selenocysteine
  MOD_RES (1211)..(1211): Selenocysteine
  MOD_RES (1213)..(1213): Selenocysteine
  MOD_RES (1236)..(1236): Selenocysteine
  MOD_RES (1257)..(1257): Selenocysteine
  MOD_RES (1314)..(1314): Selenocysteine
  MOD_RES (1383)..(1383): Selenocysteine
  MOD_RES (1390)..(1390): Selenocysteine
  MOD_RES (1392)..(1392): Selenocysteine
  MOD_RES (1414)..(1414): Selenocysteine
  MOD_RES (1428)..(1428): Selenocysteine
  MOD_RES (1433)..(1433): Selenocysteine
  MOD_RES (1446)..(1446): Selenocysteine
  MOD_RES (1453)..(1453): Selenocysteine
  MOD_RES (1494)..(1494): Selenocysteine
  MOD_RES (1503)..(1503): Selenocysteine
  MOD_RES (1528)..(1528): Selenocysteine
  MOD_RES (1552)..(1552): Selenocysteine
  MOD_RES (1581)..(1581): Selenocysteine
MVQKKKFCPRLLDYLVIVGARHPSSDSVAQXPELLRRYPLEDHXEFPLPPDVVFFCQPEGCLSVRQRRMSLRDDXSFVFXLXDKDXGVXRYGICVNFYRSFQKRISKEKGEGGAGSRGKEGXHAXCASEEGGXESSESGSSLQPLSADSXPDVNQSPRGKRRAKAGSRSRNSXLXSLCVLSHYPFFSXFRECLYXLKRLVDCCSERLLGKKLGIPRGVQRDXMWRIFXGSLLVEEKSSALLHDLREIEAWIYRLLRSPVPVSGQKRVDIEVLPQELQPALXFALPDPSRFXLVDFPLHLPLELLGVDACLQVLXCILLEHKVVLQSRDYNALSMSVMAFVAMIYPLEYMFPVIPLLPXCMASAEQLLLAPXPYIIGVPASFFLYKLDFKMPDDVWLVDLDSNRVIAPXNAEVLPILPEPESLELKKHLKQALASMSLNXQPILNLEKFHEGQEIPLLLGRPSNDLQSXPSXEFNPLIYGNDVDSVDVAXRVAMVRFFNSANVLQGFQMHXRXLRLFPRPVVAFQAGSFLASRPRQXPFAEKLARXQAVEYFGEWILNPXNYAFQRIHNNMFDPALIGDKPKWYAHQLQPIHYRVYDSNSQLAEALSVPPERDSDSEPXDDSGSDSMDYDDSSSSYSSLGDFVSEMMKCDINGDXPNVDPLXHAALGDASEVEIDELQNQKEAEEPGPDSENSQENPPLRSSSSXXASSSPSXVIHGANSEPADSXEMDDKAAVGVSKPLPSVPPSIGKSNVDRRQAEIGEGSVRRRIYDNPYFEPQYGFPPEEDEDEQGESYXPRFSQHVSGNRAQKLLRPNSLRLASDSDAESDSRASSPNSXVSNXSXEGFGGIMSFASSLYRNHSXSFSLSNLXLPXKGAREKAXPFPSLKGNRRALVDQKSSVIKHSPXVKREPPSPQGRSSNSSENQQFLKEVVHSVLDGQGVGWLNMKKVRRLLESEQLRVFVLSKLNRMVQSEDDARQDIIPDVEISRKVYKGMLDLLKCXVLSLEQSYAHAGLGGMASIFGLLEIAQXHYYSKEPDKRKRSPXESVNXPVGKDPGLAGRGDPKAMAQLRVPQLGPRAPSAXGKGPKELDXRSLKEENFIASIGPEVIKPVFDLGEXEEKKSQISADSGVSLXSSSQRXDQDSVIGVSPAVMIRSSSQDSEVSXVVSNSSGEXLGADSDLSSNAGDGPGGEGSVHLASSRGXLSDSEIEXNSAXSXIFGKAHSLKPSIKEKLAGSPIRXSEDVSQRVYLYEGLLGKERSXLWDQMQFWEDAFLDAVMLEREGMGMDQGPQEMIDRYLSLGEHDRKRLEDDEDRLLAXLLHNLISYMLLMKVNKNDIRKKVRRLMGKSHIGLVYSQQINEVLDQLANLNGRDLSIWSSGSRHMKKQXFVVHAGXDXNGDIFFMEVCDDCVVLRSNIGXVYERWWYEKLINMXYCPKXKVLCLWRRNGSEXQLNKFYXKKCRELYYCVKDSMERAAARQQSIKPGPELGGEFPVQDLKXGEGGLLQVXLEGINLKFMHNQVFIELNHIKKCNXVRGVFVLEEFVPEIKEVVSHKYKXPMAHEICYSVLCLFSYVAAVHSSEEDLRXPPRPVSS

SEQ ID NO: 15448 - protein, 1608 aa, Homo sapiens
  MOD_RES (31)..(31): Selenocysteine
  MOD_RES (44)..(44): Selenocysteine
  MOD_RES (75)..(75): Selenocysteine
  MOD_RES (80)..(80): Selenocysteine
  MOD_RES (82)..(82): Selenocysteine
  MOD_RES (86)..(86): Selenocysteine
  MOD_RES (89)..(89): Selenocysteine
  MOD_RES (122)..(122): Selenocysteine
  MOD_RES (125)..(125): Selenocysteine
  MOD_RES (133)..(133): Selenocysteine
  MOD_RES (150)..(150): Selenocysteine
  MOD_RES (173)..(173): Selenocysteine
  MOD_RES (175)..(175): Selenocysteine
  MOD_RES (188)..(188): Selenocysteine
  MOD_RES (195)..(195): Selenocysteine
  MOD_RES (222)..(222): Selenocysteine
  MOD_RES (228)..(228): Selenocysteine
  MOD_RES (281)..(281): Selenocysteine
  MOD_RES (291)..(291): Selenocysteine
  MOD_RES (314)..(314): Selenocysteine
  MOD_RES (358)..(358): Selenocysteine
  MOD_RES (371)..(371): Selenocysteine
  MOD_RES (408)..(408): Selenocysteine
  MOD_RES (439)..(439): Selenocysteine
  MOD_RES (468)..(468): Selenocysteine
  MOD_RES (471)..(471): Selenocysteine
  MOD_RES (489)..(489): Selenocysteine
  MOD_RES (510)..(510): Selenocysteine
  MOD_RES (512)..(512): Selenocysteine
  MOD_RES (536)..(536): Selenocysteine
  MOD_RES (545)..(545): Selenocysteine
  MOD_RES (559)..(559): Selenocysteine
  MOD_RES (618)..(618): Selenocysteine
  MOD_RES (654)..(654): Selenocysteine
  MOD_RES (661)..(661): Selenocysteine
  MOD_RES (704)..(705): Selenocysteine
  MOD_RES (712)..(712): Selenocysteine
  MOD_RES (725)..(725): Selenocysteine
  MOD_RES (793)..(793): Selenocysteine
  MOD_RES (834)..(834): Selenocysteine
  MOD_RES (838)..(838): Selenocysteine
  MOD_RES (840)..(840): Selenocysteine
  MOD_RES (859)..(859): Selenocysteine
  MOD_RES (867)..(867): Selenocysteine
  MOD_RES (870)..(870): Selenocysteine
  MOD_RES (878)..(878): Selenocysteine
  MOD_RES (890)..(890): Selenocysteine
  MOD_RES (896)..(896): Selenocysteine
  MOD_RES (923)..(923): Selenocysteine
  MOD_RES (1018)..(1018): Selenocysteine
  MOD_RES (1046)..(1046): Selenocysteine
  MOD_RES (1061)..(1061): Selenocysteine
  MOD_RES (1066)..(1066): Selenocysteine
  MOD_RES (1099)..(1099): Selenocysteine
  MOD_RES (1108)..(1108): Selenocysteine
  MOD_RES (1134)..(1134): Selenocysteine
  MOD_RES (1150)..(1150): Selenocysteine
  MOD_RES (1156)..(1156): Selenocysteine
  MOD_RES (1181)..(1181): Selenocysteine
  MOD_RES (1190)..(1190): Selenocysteine
  MOD_RES (1219)..(1219): Selenocysteine
  MOD_RES (1227)..(1227): Selenocysteine
  MOD_RES (1231)..(1231): Selenocysteine
  MOD_RES (1233)..(1233): Selenocysteine
  MOD_RES (1256)..(1256): Selenocysteine
  MOD_RES (1277)..(1277): Selenocysteine
  MOD_RES (1334)..(1334): Selenocysteine
  MOD_RES (1403)..(1403): Selenocysteine
  MOD_RES (1410)..(1410): Selenocysteine
  MOD_RES (1412)..(1412): Selenocysteine
  MOD_RES (1434)..(1434): Selenocysteine
  MOD_RES (1448)..(1448): Selenocysteine
  MOD_RES (1453)..(1453): Selenocysteine
  MOD_RES (1466)..(1466): Selenocysteine
  MOD_RES (1473)..(1473): Selenocysteine
  MOD_RES (1514)..(1514): Selenocysteine
  MOD_RES (1523)..(1523): Selenocysteine
  MOD_RES (1548)..(1548): Selenocysteine
  MOD_RES (1572)..(1572): Selenocysteine
  MOD_RES (1601)..(1601): Selenocysteine
MVQKKKFCPRLLDYLVIVGARHPSSDSVAQXPELLRRYPLEDHXEFPLPPDVVFFCQPEGCLSVRQRRMSLRDDXSFVFXLXDKDXGVXRYGICVNFYRSFQKRISKEKGEGGAGSRGKEGXHAXCASEEGGXESSESGSSLQPLSADSXPDVNQSPRGKRRAKAGSRSRNSXLXSLCVLSHYPFFSXFRECLYXLKRLVDCCSERLLGKKLGIPRGVQRDXMWRIFXGSLLVEEKSSALLHDLREIEAWIYRLLRSPVPVSGQKRVDIEVLPQELQPALXFALPDPSRFXLVDFPLHLPLELLGVDACLQVLXCILLEHKVVLQSRDYNALSMSVMAFVAMIYPLEYMFPVIPLLPXCMASAEQLLLAPXPYIIGVPASFFLYKLDFKMPDDVWLVDLDSNRVIAPXNAEVLPILPEPESLELKKHLKQALASMSLNXQPILNLEKFHEGQEIPLLLGRPSNDLQSXPSXEFNPLIYGNDVDSVDVAXRVAMVRFFNSANVLQGFQMHXRXLRLFPRPVVAFQAGSFLASRPRQXPFAEKLARXQAVEYFGEWILNPXNYAFQRIHNNMFDPALIGDKPKWYAHQLQPIHYRVYDSNSQLAEALSVPPERDSDSEPXDDSGSDSMDYDDSSSSYSSLGDFVSEMMKCDINGDXPNVDPLXHAALGDASEVEIDELQNQKEAEEPGPDSENSQENPPLRSSSSXXASSSPSXVIHGANSEPADSXEMDDKAAVGVSKPLPSVPPSIGKSNVDRRQAEIGEGSVRRRIYDNPYFEPQYGFPPEEDEDEQGESYXPRFSQHVSGNRAQKLLRPNSLRLASDSDAESDSRASSPNSXVSNXSXEGFGGIMSFASSLYRNHSXSFSLSNLXLPXKGAREKAXPFPSLKVFGLNXLMEIVXEAGPGSGEGNRRALVDQKSSVIKHSPXVKREPPSPQGRSSNSSENQQFLKEVVHSVLDGQGVGWLNMKKVRRLLESEQLRVFVLSKLNRMVQSEDDARQDIIPDVEISRKVYKGMLDLLKCXVLSLEQSYAHAGLGGMASIFGLLEIAQXHYYSKEPDKRKRSPXESVNXPVGKDPGLAGRGDPKAMAQLRVPQLGPRAPSAXGKGPKELDXRSLKEENFIASIGPEVIKPVFDLGEXEEKKSQISADSGVSLXSSSQRXDQDSVIGVSPAVMIRSSSQDSEVSXVVSNSSGEXLGADSDLSSNAGDGPGGEGSVHLASSRGXLSDSEIEXNSAXSXIFGKAHSLKPSIKEKLAGSPIRXSEDVSQRVYLYEGLLGKERSXLWDQMQFWEDAFLDAVMLEREGMGMDQGPQEMIDRYLSLGEHDRKRLEDDEDRLLAXLLHNLISYMLLMKVNKNDIRKKVRRLMGKSHIGLVYSQQINEVLDQLANLNGRDLSIWSSGSRHMKKQXFVVHAGXDXNGDIFFMEVCDDCVVLRSNIGXVYERWWYEKLINMXYCPKXKVLCLWRRNGSEXQLNKFYXKKCRELYYCVKDSMERAAARQQSIKPGPELGGEFPVQDLKXGEGGLLQVXLEGINLKFMHNQVFIELNHIKKCNXVRGVFVLEEFVPEIKEVVSHKYKXPMAHEICYSVLCLFSYVAAVHSSEEDLRXPPRPVSS

SEQ ID NO: 15449 - protein, 1647 aa, Homo sapiens
  MOD_RES (31)..(31): Selenocysteine
  MOD_RES (44)..(44): Selenocysteine
  MOD_RES (75)..(75): Selenocysteine
  MOD_RES (80)..(80): Selenocysteine
  MOD_RES (82)..(82): Selenocysteine
  MOD_RES (86)..(86): Selenocysteine
  MOD_RES (89)..(89): Selenocysteine
  MOD_RES (122)..(122): Selenocysteine
  MOD_RES (125)..(125): Selenocysteine
  MOD_RES (133)..(133): Selenocysteine
  MOD_RES (150)..(150): Selenocysteine
  MOD_RES (173)..(173): Selenocysteine
  MOD_RES (175)..(175): Selenocysteine
  MOD_RES (188)..(188): Selenocysteine
  MOD_RES (195)..(195): Selenocysteine
  MOD_RES (222)..(222): Selenocysteine
  MOD_RES (228)..(228): Selenocysteine
  MOD_RES (281)..(281): Selenocysteine
  MOD_RES (291)..(291): Selenocysteine
  MOD_RES (314)..(314): Selenocysteine
  MOD_RES (358)..(358): Selenocysteine
  MOD_RES (371)..(371): Selenocysteine
  MOD_RES (408)..(408): Selenocysteine
  MOD_RES (439)..(439): Selenocysteine
  MOD_RES (468)..(468): Selenocysteine
  MOD_RES (471)..(471): Selenocysteine
  MOD_RES (489)..(489): Selenocysteine
  MOD_RES (510)..(510): Selenocysteine
  MOD_RES (512)..(512): Selenocysteine
  MOD_RES (536)..(536): Selenocysteine
  MOD_RES (545)..(545): Selenocysteine
  MOD_RES (559)..(559): Selenocysteine
  MOD_RES (618)..(618): Selenocysteine
  MOD_RES (654)..(654): Selenocysteine
  MOD_RES (661)..(661): Selenocysteine
  MOD_RES (704)..(705): Selenocysteine
  MOD_RES (712)..(712): Selenocysteine
  MOD_RES (725)..(725): Selenocysteine
  MOD_RES (793)..(793): Selenocysteine
  MOD_RES (834)..(834): Selenocysteine
  MOD_RES (838)..(838): Selenocysteine
  MOD_RES (840)..(840): Selenocysteine
  MOD_RES (859)..(859): Selenocysteine
  MOD_RES (867)..(867): Selenocysteine
  MOD_RES (870)..(870): Selenocysteine
  MOD_RES (878)..(878): Selenocysteine
  MOD_RES (890)..(890): Selenocysteine
  MOD_RES (896)..(896): Selenocysteine
  MOD_RES (923)..(923): Selenocysteine
  MOD_RES (1018)..(1018): Selenocysteine
  MOD_RES (1046)..(1046): Selenocysteine
  MOD_RES (1061)..(1061): Selenocysteine
  MOD_RES (1066)..(1066): Selenocysteine
  MOD_RES (1099)..(1099): Selenocysteine
  MOD_RES (1108)..(1108): Selenocysteine
  MOD_RES (1152)..(1152): Selenocysteine
  MOD_RES (1168)..(1168): Selenocysteine
  MOD_RES (1174)..(1174): Selenocysteine
  MOD_RES (1199)..(1199): Selenocysteine
  MOD_RES (1208)..(1208): Selenocysteine
  MOD_RES (1237)..(1237): Selenocysteine
  MOD_RES (1245)..(1245): Selenocysteine
  MOD_RES (1249)..(1249): Selenocysteine
  MOD_RES (1251)..(1251): Selenocysteine
  MOD_RES (1274)..(1274): Selenocysteine
  MOD_RES (1307)..(1307): Selenocysteine
  MOD_RES (1316)..(1316): Selenocysteine
  MOD_RES (1373)..(1373): Selenocysteine
  MOD_RES (1442)..(1442): Selenocysteine
  MOD_RES (1449)..(1449): Selenocysteine
  MOD_RES (1451)..(1451): Selenocysteine
  MOD_RES (1473)..(1473): Selenocysteine
  MOD_RES (1487)..(1487): Selenocysteine
  MOD_RES (1492)..(1492): Selenocysteine
  MOD_RES (1505)..(1505): Selenocysteine
  MOD_RES (1512)..(1512): Selenocysteine
  MOD_RES (1553)..(1553): Selenocysteine
  MOD_RES (1562)..(1562): Selenocysteine
  MOD_RES (1587)..(1587): Selenocysteine
  MOD_RES (1611)..(1611): Selenocysteine
  MOD_RES (1640)..(1640): Selenocysteine
MVQKKKFCPRLLDYLVIVGARHPSSDSVAQXPELLRRYPLEDHXEFPLPPDVVFFCQPEGCLSVRQRRMSLRDDXSFVFXLXDKDXGVXRYGICVNFYRSFQKRISKEKGEGGAGSRGKEGXHAXCASEEGGXESSESGSSLQPLSADSXPDVNQSPRGKRRAKAGSRSRNSXLXSLCVLSHYPFFSXFRECLYXLKRLVDCCSERLLGKKLGIPRGVQRDXMWRIFXGSLLVEEKSSALLHDLREIEAWIYRLLRSPVPVSGQKRVDIEVLPQELQPALXFALPDPSRFXLVDFPLHLPLELLGVDACLQVLXCILLEHKVVLQSRDYNALSMSVMAFVAMIYPLEYMFPVIPLLPXCMASAEQLLLAPXPYIIGVPASFFLYKLDFKMPDDVWLVDLDSNRVIAPXNAEVLPILPEPESLELKKHLKQALASMSLNXQPILNLEKFHEGQEIPLLLGRPSNDLQSXPSXEFNPLIYGNDVDSVDVAXRVAMVRFFNSANVLQGFQMHXRXLRLFPRPVVAFQAGSFLASRPRQXPFAEKLARXQAVEYFGEWILNPXNYAFQRIHNNMFDPALIGDKPKWYAHQLQPIHYRVYDSNSQLAEALSVPPERDSDSEPXDDSGSDSMDYDDSSSSYSSLGDFVSEMMKCDINGDXPNVDPLXHAALGDASEVEIDELQNQKEAEEPGPDSENSQENPPLRSSSSXXASSSPSXVIHGANSEPADSXEMDDKAAVGVSKPLPSVPPSIGKSNVDRRQAEIGEGSVRRRIYDNPYFEPQYGFPPEEDEDEQGESYXPRFSQHVSGNRAQKLLRPNSLRLASDSDAESDSRASSPNSXVSNXSXEGFGGIMSFASSLYRNHSXSFSLSNLXLPXKGAREKAXPFPSLKVFGLNXLMEIVXEAGPGSGEGNRRALVDQKSSVIKHSPXVKREPPSPQGRSSNSSENQQFLKEVVHSVLDGQGVGWLNMKKVRRLLESEQLRVFVLSKLNRMVQSEDDARQDIIPDVEISRKVYKGMLDLLKCXVLSLEQSYAHAGLGGMASIFGLLEIAQXHYYSKEPDKRKRSPXESVNXPVGKDPGLAGRGDPKAMAQLRVPQLGPRAPSAXGKGPKELDXRSLKEENFIASIELWNKHQEVKKQKALEKQRPEVIKPVFDLGEXEEKKSQISADSGVSLXSSSQRXDQDSVIGVSPAVMIRSSSQDSEVSXVVSNSSGEXLGADSDLSSNAGDGPGGEGSVHLASSRGXLSDSEIEXNSAXSXIFGKAHSLKPSIKEKLAGSPIRXSEDVSQRVYLYEGLLGRDKGSMWDQLEDAAMEXFSISKERSXLWDQMQFWEDAFLDAVMLEREGMGMDQGPQEMIDRYLSLGEHDRKRLEDDEDRLLAXLLHNLISYMLLMKVNKNDIRKKVRRLMGKSHIGLVYSQQINEVLDQLANLNGRDLSIWSSGSRHMKKQXFVVHAGXDXNGDIFFMEVCDDCVVLRSNIGXVYERWWYEKLINMXYCPKXKVLCLWRRNGSEXQLNKFYXKKCRELYYCVKDSMERAAARQQSIKPGPELGGEFPVQDLKXGEGGLLQVXLEGINLKFMHNQVFIELNHIKKCNXVRGVFVLEEFVPEIKEVVSHKYKXPMAHEICYSVLCLFSYVAAVHSSEEDLRXPPRPVSS

SEQ ID NO: 15450 - protein, 154 aa, Homo sapiens
  MOD_RES (6)..(6): Selenocysteine
  MOD_RES (59)..(59): Selenocysteine
  MOD_RES (69)..(69): Selenocysteine
  MOD_RES (92)..(92): Selenocysteine
  MOD_RES (136)..(136): Selenocysteine
  MOD_RES (149)..(149): Selenocysteine
MWRIFXGSLLVEEKSSALLHDLREIEAWIYRLLRSPVPVSGQKRVDIEVLPQELQPALXFALPDPSRFXLVDFPLHLPLELLGVDACLQVLXCILLEHKVVLQSRDYNALSMSVMAFVAMIYPLEYMFPVIPLLPXCMASAEQLLLAPXPYIIG

SEQ ID NO: 15451 - protein, 199 aa, Homo sapiens
  MOD_RES (1)..(1): Any amino acid
  MOD_RES (22)..(22): Selenocysteine
  MOD_RES (36)..(36): Selenocysteine
  MOD_RES (41)..(41): Selenocysteine
  MOD_RES (54)..(54): Selenocysteine
  MOD_RES (61)..(61): Selenocysteine
  MOD_RES (102)..(102): Selenocysteine
  MOD_RES (111)..(111): Selenocysteine
  MOD_RES (139)..(139): Selenocysteine
  MOD_RES (163)..(163): Selenocysteine
  MOD_RES (192)..(192): Selenocysteine
XGDIFFMEVCDDCVVLRSNIGXVYERWWYEKLINMXYCPKXKVLCLWRRNGSEXQLNKFYXKKCRELYYCVKDSMERAAARQQSIKPGPELGGEFPVQDLKXGEGGLLQVXLEGINLKFMHNQERKVFIELNHIKKCNXVRGVFVLEEFVPEIKEVVSHKYKXPMAHEICYSVLCLFSYVAAVHSSEEDLRXPPRPVSS

SEQ ID NO: 15452 - protein, 378 aa, Homo sapiens
  MOD_RES (24)..(24): Selenocysteine
  MOD_RES (138)..(138): Selenocysteine
  MOD_RES (165)..(165): Selenocysteine
  MOD_RES (188)..(188): Selenocysteine
  MOD_RES (208)..(208): Selenocysteine
  MOD_RES (225)..(225): Selenocysteine
  MOD_RES (256)..(256): Selenocysteine
  MOD_RES (263)..(263): Selenocysteine
  MOD_RES (279)..(279): Selenocysteine
  MOD_RES (314)..(314): Selenocysteine
  MOD_RES (338)..(338): Selenocysteine
  MOD_RES (359)..(359): Selenocysteine
MAREWRAAQGKDPGPSEKQKPVFXPLRRPGMLVPKQNVSPPDMSALSLKGDQALLGGIFYFLNIFSHGELPPHCEQRFLPCEIGCVKYSLQEGIMADFHSFINPGEIPRGFRFHCQAASDSSHKIPISNFERGHNQAXVLQNLYRFIHPNPGNWPPIYCKSDDRXRVNWCLKHMAKASEIRQDLQLLXVEDLVVGIYQQKFLKEPSKXWIRSLLDVAMWDYSSNXRCKWHEENDILFCALAVCKKIAYCISNSLAXLFGIQLXEAHVPLQDYEASNSVXPKMVVLDAGRYQKLRVGSSGFSHFNSSNEEQRSNXPIGDYPSRAKISGQNSSVRGRGIXRLLESISNSSSNIHKFSNCDXSLSPYMSQKDGYKSFSSLS

SEQ ID NO: 15453 - protein, 316 aa, Homo sapiens
  MOD_RES (49)..(49): Selenocysteine
  MOD_RES (163)..(163): Selenocysteine
  MOD_RES (190)..(190): Selenocysteine
  MOD_RES (213)..(213): Selenocysteine
  MOD_RES (233)..(233): Selenocysteine
  MOD_RES (250)..(250): Selenocysteine
  MOD_RES (281)..(281): Selenocysteine
  MOD_RES (288)..(288): Selenocysteine
  MOD_RES (304)..(304): Selenocysteine
MPNRKASRNAYYFFVQEKIPELRRRGLPVARVADAIPYCSSDWAKPVFXPLRRPGMLVPKQNVSPPDMSALSLKGDQALLGGIFYFLNIFSHGELPPHCEQRFLPCEIGCVKYSLQEGIMADFHSFINPGEIPRGFRFHCQAASDSSHKIPISNFERGHNQAXVLQNLYRFIHPNPGNWPPIYCKSDDRXRVNWCLKHMAKASEIRQDLQLLXVEDLVVGIYQQKFLKEPSKXWIRSLLDVAMWDYSSNXRCKWHEENDILFCALAVCKKIAYCISNSLAXLFGIQLXEAHVPLQDYEASNSVXPKMVVLDAGRYQ

SEQ ID NO: 15454 - protein, 403 aa, Homo sapiens
  MOD_RES (49)..(49): Selenocysteine
  MOD_RES (163)..(163): Selenocysteine
  MOD_RES (190)..(190): Selenocysteine
  MOD_RES (213)..(213): Selenocysteine
  MOD_RES (233)..(233): Selenocysteine
  MOD_RES (250)..(250): Selenocysteine
  MOD_RES (281)..(281): Selenocysteine
  MOD_RES (288)..(288): Selenocysteine
  MOD_RES (304)..(304): Selenocysteine
  MOD_RES (339)..(339): Selenocysteine
  MOD_RES (363)..(363): Selenocysteine
  MOD_RES (384)..(384): Selenocysteine
MPNRKASRNAYYFFVQEKIPELRRRGLPVARVADAIPYCSSDWAKPVFXPLRRPGMLVPKQNVSPPDMSALSLKGDQALLGGIFYFLNIFSHGELPPHCEQRFLPCEIGCVKYSLQEGIMADFHSFINPGEIPRGFRFHCQAASDSSHKIPISNFERGHNQAXVLQNLYRFIHPNPGNWPPIYCKSDDRXRVNWCLKHMAKASEIRQDLQLLXVEDLVVGIYQQKFLKEPSKXWIRSLLDVAMWDYSSNXRCKWHEENDILFCALAVCKKIAYCISNSLAXLFGIQLXEAHVPLQDYEASNSVXPKMVVLDAGRYQKLRVGSSGFSHFNSSNEEQRSNXPIGDYPSRAKISGQNSSVRGRGIXRLLESISNSSSNIHKFSNCDXSLSPYMSQKDGYKSFSSLS

SEQ ID NO: 15455 - protein, 434 aa, Homo sapiens
  MOD_RES (80)..(80): Selenocysteine
  MOD_RES (194)..(194): Selenocysteine
  MOD_RES (221)..(221): Selenocysteine
  MOD_RES (244)..(244): Selenocysteine
  MOD_RES (264)..(264): Selenocysteine
  MOD_RES (281)..(281): Selenocysteine
  MOD_RES (312)..(312): Selenocysteine
  MOD_RES (319)..(319): Selenocysteine
  MOD_RES (335)..(335): Selenocysteine
  MOD_RES (370)..(370): Selenocysteine
  MOD_RES (394)..(394): Selenocysteine
  MOD_RES (415)..(415): Selenocysteine
MPNRKASRNAYYFFVQEKIPELRRRGLPVARVADAIPYCSSDWALLREEEKEKYAEMAREWRAAQGKDPGPSEKQKPVFXPLRRPGMLVPKQNVSPPDMSALSLKGDQALLGGIFYFLNIFSHGELPPHCEQRFLPCEIGCVKYSLQEGIMADFHSFINPGEIPRGFRFHCQAASDSSHKIPISNFERGHNQAXVLQNLYRFIHPNPGNWPPIYCKSDDRXRVNWCLKHMAKASEIRQDLQLLXVEDLVVGIYQQKFLKEPSKXWIRSLLDVAMWDYSSNXRCKWHEENDILFCALAVCKKIAYCISNSLAXLFGIQLXEAHVPLQDYEASNSVXPKMVVLDAGRYQKLRVGSSGFSHFNSSNEEQRSNXPIGDYPSRAKISGQNSSVRGRGIXRLLESISNSSSNIHKFSNCDXSLSPYMSQKDGYKSFSSLS

SEQ ID NO: 15456 - protein, 373 aa, Homo sapiens
  MOD_RES (14)..(14): Selenocysteine
  MOD_RES (39)..(39): Selenocysteine
  MOD_RES (58)..(58): Selenocysteine
  MOD_RES (62)..(62): Selenocysteine
  MOD_RES (95)..(95): Selenocysteine
  MOD_RES (196)..(196): Selenocysteine
  MOD_RES (268)..(268): Selenocysteine
  MOD_RES (295)..(295): Selenocysteine
MASELAMSNSDLPXSPLAMEYVNDFDLMKFEVKKEPVEXDRIISQCGRLIAGGSLSSXPMSXPCSSVPPSPSFSAPSPGSGSEQKAHLEDYYWMXGYPQQLNPEALGFSPEDAVEALISNSHQLQGGFDGYARGAQQLAAAAGAGAGASLGGSGEEMGPAAAVVSAVIAAAAAQSGAGPHYHHHHHHAAGHHHHPXAGAPGAAGSAAASAGGAGGAGGGGPASAGGGGGGGGGGGGGGAAGAGGALHPHHAAGGLHFDDRFSDEQLVXMSVRELNRQLRGVSKEEVIRLKQKRRXLKNRGYAQSCRFKRVQQRHVLESEKNQLLQQVDHLKQEISRLVRERDAYKEKYEKLVSSGFRENGSSSDNPSSPEFFM

SEQ ID NO: 15457 - protein, 383 aa, Homo sapiens
  MOD_RES (14)..(14): Selenocysteine
  MOD_RES (39)..(39): Selenocysteine
  MOD_RES (58)..(58): Selenocysteine
  MOD_RES (62)..(62): Selenocysteine
  MOD_RES (95)..(95): Selenocysteine
  MOD_RES (196)..(196): Selenocysteine
  MOD_RES (268)..(268): Selenocysteine
  MOD_RES (295)..(295): Selenocysteine
  MOD_RES (380)..(380): Selenocysteine
MASELAMSNSDLPXSPLAMEYVNDFDLMKFEVKKEPVEXDRIISQCGRLIAGGSLSSXPMSXPCSSVPPSPSFSAPSPGSGSEQKAHLEDYYWMXGYPQQLNPEALGFSPEDAVEALISNSHQLQGGFDGYARGAQQLAAAAGAGAGASLGGSGEEMGPAAAVVSAVIAAAAAQSGAGPHYHHHHHHAAGHHHHPXAGAPGAAGSAAASAGGAGGAGGGGPASAGGGGGGGGGGGGGGAAGAGGALHPHHAAGGLHFDDRFSDEQLVXMSVRELNRQLRGVSKEEVIRLKQKRRXLKNRGYAQSCRFKRVQQRHVLESEKNQLLQQVDHLKQEISRLVRERDAYKEKYEKLVSSGFRENGSSSDNPSSPEFFMYPRESSXSVM

SEQ ID NO: 15458 - protein, 403 aa, Homo sapiens
  MOD_RES (14)..(14): Selenocysteine
  MOD_RES (39)..(39): Selenocysteine
  MOD_RES (58)..(58): Selenocysteine
  MOD_RES (62)..(62): Selenocysteine
  MOD_RES (95)..(95): Selenocysteine
  MOD_RES (196)..(196): Selenocysteine
  MOD_RES (268)..(268): Selenocysteine
  MOD_RES (295)..(295): Selenocysteine
  MOD_RES (374)..(374): Selenocysteine
  MOD_RES (377)..(377): Selenocysteine
  MOD_RES (388)..(388): Selenocysteine
  MOD_RES (398)..(398): Selenocysteine
  MOD_RES (402)..(402): Selenocysteine
MASELAMSNSDLPXSPLAMEYVNDFDLMKFEVKKEPVEXDRIISQCGRLIAGGSLSSXPMSXPCSSVPPSPSFSAPSPGSGSEQKAHLEDYYWMXGYPQQLNPEALGFSPEDAVEALISNSHQLQGGFDGYARGAQQLAAAAGAGAGASLGGSGEEMGPAAAVVSAVIAAAAAQSGAGPHYHHHHHHAAGHHHHPXAGAPGAAGSAAASAGGAGGAGGGGPASAGGGGGGGGGGGGGGAAGAGGALHPHHAAGGLHFDDRFSDEQLVXMSVRELNRQLRGVSKEEVIRLKQKRRXLKNRGYAQSCRFKRVQQRHVLESEKNQLLQQVDHLKQEISRLVRERDAYKEKYEKLVSSGFRENGSSSDNPSSPEFFIXEPXRKLEPSVGYAXFWKPQHRVLXSVFXK

SEQ ID NO: 15459 - protein, 353 aa, Homo sapiens
  MOD_RES (53)..(53): Selenocysteine
  MOD_RES (57)..(57): Selenocysteine
  MOD_RES (75)..(75): Selenocysteine
  MOD_RES (107)..(107): Selenocysteine
  MOD_RES (134)..(134): Selenocysteine
  MOD_RES (261)..(261): Selenocysteine
  MOD_RES (348)..(348): Selenocysteine
MAAELAMGAELPSSPLAIEYVNDFDLMKFEVKKEPPEAERFCHRLPPGSLSSXPLSXPCSSVPSSPSFCAPSPGXGGGGGAGGGGGSSQAGGAPGPPSGGPGAVGGXSGKPALEDLYWMSGYQHHLNPEALNLXPEDAVEALIGSGHHGAHHGAHHPAAAAAYEAFRGPGFAGGGGADDMGAGHHHGAHHAAHHHHAAHHHHHHHHHHGGAGHGGGAGHHVRLEERFSDDQLVSMSVRELNRQLRGFSKEEVIRLKQKRRXLKNRGYAQSCRFKRVQQRHILESEKCQLQSQVEQLKLEVGRLAKERDLYKEKYEKLAGRGGPGSAGGAGFPREPSPPQAGPGGAKGXADFFL

SEQ ID NO: 15460 - protein, 323 aa, Homo sapiens
  MOD_RES (13)..(13): Selenocysteine
  MOD_RES (47)..(47): Selenocysteine
  MOD_RES (58)..(58): Selenocysteine
  MOD_RES (62)..(62): Selenocysteine
  MOD_RES (76)..(76): Selenocysteine
  MOD_RES (80)..(80): Selenocysteine
  MOD_RES (103)..(103): Selenocysteine
  MOD_RES (185)..(185): Selenocysteine
  MOD_RES (195)..(195): Selenocysteine
  MOD_RES (199)..(199): Selenocysteine
  MOD_RES (232)..(232): Selenocysteine
  MOD_RES (245)..(245): Selenocysteine
  MOD_RES (271)..(271): Selenocysteine
  MOD_RES (312)..(312): Selenocysteine
MAAELSMGPELPXSPLAMEYVNDFDLLKFDVKKEPLGRAERPGRPCXRLQPAGSVSSXPLSXPCSSVPSSPSFSPXEQKXHLEDLYWMASNYQQMNPEALNLXPEDAVEALIGSHPVPQPLQSFDSFRGAHHHHHHHHPHPHHAYPGAGVAHDELGPHAHPHHHHHHQASPPPSSAASPAQQLPXSHPGPGPHAXASAXAAGGNGSVEDRFSDDQLVSMSVRELNRHLRGFXKDEVIRLKQKRRXLKNRGYAQSCRYKRVQQKHHLENEKXQLIQQVEQLKQEVSRLARERDAYKVKCEKLANSGFREAGSXSDSPSSPEFFL

SEQ ID NO: 15461 - protein, 93 aa, Homo sapiens
  MOD_RES (21)..(21): Selenocysteine
  MOD_RES (29)..(29): Selenocysteine
MGLSVRELNRHLRGLSAEEVXRLKQRRRXLKNRGYAASCRVKRVCQKEELQKQKSELEREVDKLARENAAMRLELDALRGKCEALQGFARSVA

SEQ ID NO: 15462 - protein, 135 aa, Homo sapiens
  MOD_RES (21)..(21): Selenocysteine
  MOD_RES (29)..(29): Selenocysteine
  MOD_RES (100)..(100): Selenocysteine
  MOD_RES (109)..(109): Selenocysteine
  MOD_RES (114)..(114): Selenocysteine
MGLSVRELNRHLRGLSAEEVXRLKQRRRXLKNRGYAASCRVKRVCQKEELQKQKSELEREVDKLARENAAMRLELDALRGKCEALQGFARSVAAARGPAXLVAPASVIXIVKSXPGSGSGPAHGPDPAHGPASCS

SEQ ID NO: 15463 - protein, 126 aa, Homo sapiens
  MOD_RES (21)..(21): Selenocysteine
  MOD_RES (50)..(50): Selenocysteine
  MOD_RES (58)..(58): Selenocysteine
MSVDPLSSKALKIKRELSENXPHLSDEALMGLSVRELNRHLRGLSAEEVXRLKQRRRXLKNRGYAASCRVKRVCQKEELQKQKSELEREVDKLARENAAMRLELDALRGKCEALQGFARSVAAARG

SEQ ID NO: 15464 - protein, 164 aa, Homo sapiens
  MOD_RES (21)..(21): Selenocysteine
  MOD_RES (50)..(50): Selenocysteine
  MOD_RES (58)..(58): Selenocysteine
  MOD_RES (129)..(129): Selenocysteine
  MOD_RES (138)..(138): Selenocysteine
  MOD_RES (143)..(143): Selenocysteine
MSVDPLSSKALKIKRELSENXPHLSDEALMGLSVRELNRHLRGLSAEEVXRLKQRRRXLKNRGYAASCRVKRVCQKEELQKQKSELEREVDKLARENAAMRLELDALRGKCEALQGFARSVAAARGPAXLVAPASVIXIVKSXPGSGSGPAHGPDPAHGPASCS

SEQ ID NO: 15465 - protein, 98 aa, Homo sapiens
  MOD_RES (2)..(3): Selenocysteine
  MOD_RES (22)..(22): Selenocysteine
  MOD_RES (25)..(25): Selenocysteine
  MOD_RES (31)..(31): Selenocysteine
  MOD_RES (58)..(58): Selenocysteine
  MOD_RES (74)..(74): Selenocysteine
MXXPNKGNKALKVKREPGENGXSLXDEELVXMSVRELNQHLRGLSKEEIVQLKQRRRXLKNRGYAASCRVKRVXQKEELEKQKAELQQEVEKLASENA

SEQ ID NO: 15466 - protein, 162 aa, Homo sapiens
  MOD_RES (2)..(3): Selenocysteine
  MOD_RES (22)..(22): Selenocysteine
  MOD_RES (25)..(25): Selenocysteine
  MOD_RES (31)..(31): Selenocysteine
  MOD_RES (58)..(58): Selenocysteine
  MOD_RES (74)..(74): Selenocysteine
  MOD_RES (116)..(116): Selenocysteine
  MOD_RES (120)..(120): Selenocysteine
  MOD_RES (148)..(148): Selenocysteine
  MOD_RES (152)..(152): Selenocysteine
  MOD_RES (158)..(158): Selenocysteine
MXXPNKGNKALKVKREPGENGXSLXDEELVXMSVRELNQHLRGLSKEEIVQLKQRRRXLKNRGYAASCRVKRVXQKEELEKQKAELQQEVEKLASENASMKLELDALRSKYEALQXFARXVARSPVAPARGPLAAGLGPLVPGKVAAXSVIXIVKSKXDARS

SEQ ID NO: 15467 - protein, 156 aa, Homo sapiens
  MOD_RES (2)..(3): Selenocysteine
  MOD_RES (45)..(45): Selenocysteine
  MOD_RES (50)..(50): Selenocysteine
  MOD_RES (58)..(58): Selenocysteine
  MOD_RES (74)..(74): Selenocysteine
  MOD_RES (116)..(116): Selenocysteine
  MOD_RES (120)..(120): Selenocysteine
  MOD_RES (133)..(134): Selenocysteine
  MOD_RES (138)..(138): Selenocysteine
  MOD_RES (143)..(143): Selenocysteine
  MOD_RES (148)..(148): Selenocysteine
MXXNPKPNKALKVKKEAGENAPVLSDDELVSMSVRELNQHLRGLXKEEVXRLKQRRRXLKNRGYAASCRIKRVXQKEELERQRVELQQEVEKLARENSSMRLELDALRSKYEALQXFARXVARGPVAPSKVAXXSVIXIVKSXELSSXSVPFSAAS

SEQ ID NO: 15468 - protein, 309 aa, Homo sapiens
  MOD_RES (32)..(32): Selenocysteine
  MOD_RES (42)..(42): Selenocysteine
  MOD_RES (48)..(48): Selenocysteine
  MOD_RES (52)..(52): Selenocysteine
  MOD_RES (66)..(67): Selenocysteine
  MOD_RES (71)..(71): Selenocysteine
  MOD_RES (90)..(90): Selenocysteine
  MOD_RES (103)..(103): Selenocysteine
  MOD_RES (124)..(124): Selenocysteine
  MOD_RES (165)..(165): Selenocysteine
  MOD_RES (173)..(173): Selenocysteine
  MOD_RES (192)..(192): Selenocysteine
  MOD_RES (240)..(240): Selenocysteine
  MOD_RES (274)..(274): Selenocysteine
MSLEQRSLHCKPEEALEAQQEALGLVCVQAAXSSSSPLVLGXLEEVPXAGSXDPPQSPQGASAFPXXINFXRQRQPSEGSSSREEEGPSXSCILESLFRAVIXKKVADLVGFLLLKYRAREPVXKAEMLESVIKNYKHCFPEIFGKASESLQLVFGIDVKEADPXGHSYVLVXCLGLSYDGLLGDNQIMPKXGFLIIVLVMIAMEGGHAPEEEIWEELSVMEVYDGREHSAYGEPRKLLXQDLVQEKYLEYRQVPDSDPARYEFLWGPRALAEXSYVKVLEYVIKVSARVRFFFPSLREAALREEEEGV

SEQ ID NO: 15469 - protein, 80 aa, Homo sapiens
  MOD_RES (33)..(33): Selenocysteine
  MOD_RES (38)..(38): Selenocysteine
  MOD_RES (44)..(44): Selenocysteine
  MOD_RES (49)..(49): Selenocysteine
  MOD_RES (73)..(74): Selenocysteine
  MOD_RES (78)..(78): Selenocysteine
MPLEQRSQHCKPEEGLEARGEALGLVGAQAPAXEEQQXASSSSXLVEVXLGEVPAADSPSPPHSPQGASSFSXXINYXLW

SEQ ID NO: 15470 - protein, 33 aa, Homo sapiens
  MOD_RES (33)..(33): Selenocysteine
MPLEQRSQHCKPEEGLEARGEALGLVGAQAPAX

SEQ ID NO: 15471 - protein, 37 aa, Homo sapiens
  MOD_RES (33)..(33): Selenocysteine
MPLEQRSQHCKPEEGLEARGEALGLVGAQAPAXEEQQ

SEQ ID NO: 15472 - protein, 89 aa, Homo sapiens
  MOD_RES (33)..(33): Selenocysteine
  MOD_RES (38)..(38): Selenocysteine
  MOD_RES (44)..(44): Selenocysteine
  MOD_RES (49)..(49): Selenocysteine
  MOD_RES (73)..(74): Selenocysteine
  MOD_RES (78)..(78): Selenocysteine
MPLEQRSQHCKPEEGLEARGEALGLVGAQAPAXEEQQXASSSSXLVEVXLGEVPAADSPSPPHSPQGASSFSXXINYXLWRQSDEGSSN

SEQ ID NO: 15473 - protein, 120 aa, Homo sapiens
  MOD_RES (33)..(33): Selenocysteine
  MOD_RES (38)..(38): Selenocysteine
  MOD_RES (44)..(44): Selenocysteine
  MOD_RES (49)..(49): Selenocysteine
  MOD_RES (73)..(74): Selenocysteine
  MOD_RES (78)..(78): Selenocysteine
MPLEQRSQHCKPEEGLEARGEALGLVGAQAPAXEEQQXASSSSXLVEVXLGEVPAADSPSPPHSPQGASSFSXXINYXLWRQSDEGSSNQEEEGPRMFPDLESEFQAAISRKMVELVHFL

SEQ ID NO: 15474 - protein, 148 aa, Homo sapiens
  MOD_RES (33)..(33): Selenocysteine
  MOD_RES (38)..(38): Selenocysteine
  MOD_RES (44)..(44): Selenocysteine
  MOD_RES (49)..(49): Selenocysteine
  MOD_RES (73)..(74): Selenocysteine
  MOD_RES (78)..(78): Selenocysteine
  MOD_RES (131)..(131): Selenocysteine
MPLEQRSQHCKPEEGLEARGEALGLVGAQAPAXEEQQXASSSSXLVEVXLGEVPAADSPSPPHSPQGASSFSXXINYXLWRQSDEGSSNQEEEGPRMFPDLESEFQAAISRKMVELVHFLLLKYRAREPVXKAEMLESVLRNCQDFFP

SEQ ID NO: 15475 - protein, 152 aa, Homo sapiens
  MOD_RES (33)..(33): Selenocysteine
  MOD_RES (38)..(38): Selenocysteine
  MOD_RES (44)..(44): Selenocysteine
  MOD_RES (49)..(49): Selenocysteine
  MOD_RES (73)..(74): Selenocysteine
  MOD_RES (78)..(78): Selenocysteine
  MOD_RES (131)..(131): Selenocysteine
MPLEQRSQHCKPEEGLEARGEALGLVGAQAPAXEEQQXASSSSXLVEVXLGEVPAADSPSPPHSPQGASSFSXXINYXLWRQSDEGSSNQEEEGPRMFPDLESEFQAAISRKMVELVHFLLLKYRAREPVXKAEMLESVLRNCQDFFPVIFS

SEQ ID NO: 15476 - protein, 314 aa, Homo sapiens
  MOD_RES (33)..(33): Selenocysteine
  MOD_RES (38)..(38): Selenocysteine
  MOD_RES (44)..(44): Selenocysteine
  MOD_RES (49)..(49): Selenocysteine
  MOD_RES (73)..(74): Selenocysteine
  MOD_RES (78)..(78): Selenocysteine
  MOD_RES (131)..(131): Selenocysteine
  MOD_RES (180)..(180): Selenocysteine
  MOD_RES (199)..(199): Selenocysteine
  MOD_RES (281)..(281): Selenocysteine
  MOD_RES (290)..(290): Selenocysteine
MPLEQRSQHCKPEEGLEARGEALGLVGAQAPAXEEQQXASSSSXLVEVXLGEVPAADSPSPPHSPQGASSFSXXINYXLWRQSDEGSSNQEEEGPRMFPDLESEFQAAISRKMVELVHFLLLKYRAREPVXKAEMLESVLRNCQDFFPVIFSKASEYLQLVFGIEVVEVVPISHLYILVXCLGLSYDGLLGDNQVMPKXGLLIIVLAIIAIEGDCAPEEKIWEELSMLEVFEGREDSVFAHPRKLLMQDLVQENYLEYRQVPGSDPACYEFLWGPRALIEXSYVKVLHHXLKIGGEPHISYPPLHERALREGEE

SEQ ID NO: 15477 - protein, 198 aa, Homo sapiens
  MOD_RES (33)..(33): Selenocysteine
  MOD_RES (44)..(44): Selenocysteine
  MOD_RES (49)..(49): Selenocysteine
  MOD_RES (73)..(74): Selenocysteine
  MOD_RES (97)..(97): Selenocysteine
  MOD_RES (131)..(131): Selenocysteine
  MOD_RES (180)..(180): Selenocysteine
MPLEQRSQHCKPEEGLEARGEALGLVGAQAPAXEEQEAASSSSXLVEVXLGEVPAAESPDPPQSPQGASSLPXXMNYPLWSQSYEDSSNQEEEGPSXFPDLESEFQAALSRKVAELVHFLLLKYRAREPVXKAEMLGSVVGNWQYFFPVIFSKASSSLQLVFGIELMEVDPIGHLYIFAXCLGLSYDGLLGDNQIMPK

SEQ ID NO: 15478 - protein, 314 aa, Homo sapiens
  MOD_RES (33)..(33): Selenocysteine
  MOD_RES (44)..(44): Selenocysteine
  MOD_RES (49)..(49): Selenocysteine
  MOD_RES (73)..(74): Selenocysteine
  MOD_RES (97)..(97): Selenocysteine
  MOD_RES (131)..(131): Selenocysteine
  MOD_RES (180)..(180): Selenocysteine
  MOD_RES (247)..(247): Selenocysteine
  MOD_RES (281)..(281): Selenocysteine
MPLEQRSQHCKPEEGLEARGEALGLVGAQAPAXEEQEAASSSSXLVEVXLGEVPAAESPDPPQSPQGASSLPXXMNYPLWSQSYEDSSNQEEEGPSXFPDLESEFQAALSRKVAELVHFLLLKYRAREPVXKAEMLGSVVGNWQYFFPVIFSKASSSLQLVFGIELMEVDPIGHLYIFAXCLGLSYDGLLGDNQIMPKAGLLIIVLAIIAREGDCAPEEKIWEELSVLEVFEGREDSILGDPKKLLXQHFVQENYLEYRQVPGSDPACYEFLWGPRALVEXSYVKVLHHMVKISGGPHISYPPLHEWVLREGEE

SEQ ID NO: 15479 - protein, 778 aa, Homo sapiens
  MOD_RES (29)..(29): Selenocysteine
  MOD_RES (42)..(42): Selenocysteine
  MOD_RES (46)..(46): Selenocysteine
  MOD_RES (58)..(58): Selenocysteine
  MOD_RES (84)..(85): Selenocysteine
  MOD_RES (106)..(106): Selenocysteine
  MOD_RES (118)..(118): Selenocysteine
  MOD_RES (133)..(134): Selenocysteine
  MOD_RES (152)..(153): Selenocysteine
  MOD_RES (160)..(160): Selenocysteine
  MOD_RES (179)..(179): Selenocysteine
  MOD_RES (187)..(188): Selenocysteine
  MOD_RES (192)..(192): Selenocysteine
  MOD_RES (195)..(195): Selenocysteine
  MOD_RES (197)..(197): Selenocysteine
  MOD_RES (207)..(207): Selenocysteine
  MOD_RES (214)..(214): Selenocysteine
  MOD_RES (225)..(225): Selenocysteine
  MOD_RES (228)..(228): Selenocysteine
  MOD_RES (242)..(242): Selenocysteine
  MOD_RES (249)..(249): Selenocysteine
  MOD_RES (274)..(274): Selenocysteine
  MOD_RES (283)..(284): Selenocysteine
  MOD_RES (298)..(298): Selenocysteine
  MOD_RES (312)..(312): Selenocysteine
  MOD_RES (316)..(316): Selenocysteine
  MOD_RES (328)..(328): Selenocysteine
  MOD_RES (382)..(382): Selenocysteine
  MOD_RES (388)..(388): Selenocysteine
  MOD_RES (420)..(420): Selenocysteine
  MOD_RES (488)..(488): Selenocysteine
  MOD_RES (506)..(506): Selenocysteine
  MOD_RES (543)..(543): Selenocysteine
  MOD_RES (553)..(554): Selenocysteine
  MOD_RES (557)..(557): Selenocysteine
  MOD_RES (608)..(608): Selenocysteine
  MOD_RES (642)..(642): Selenocysteine
  MOD_RES (663)..(663): Selenocysteine
  MOD_RES (692)..(692): Selenocysteine
  MOD_RES (716)..(716): Selenocysteine
  MOD_RES (733)..(733): Selenocysteine
  MOD_RES (749)..(749): Selenocysteine
  MOD_RES (760)..(760): Selenocysteine
MAQKMDCGAGLLGFQAEASVEDSALLMQXLMEAIQISEAPPXNQAXAAASPQSSQPPXANEMADIQVSAAAARPKSAFKVQNAXXKGPNGVYDFSQAHNAKDVPNXQPKAAFKSQNAXPKGPNAAYDFSQAAXXGELAANKSEMAFKAQNAXXKVGPNAXYNFSQSLNANDLANSRPKXPFKAWNDXXKAPXADXQXQNVNQAKMAXSQADIEXDPGISEPDGAXAQXSADGSQAQNLESRXIIRGKRXRKINNLNVEENSSGDQRRAPLAAGXWRSAPVPVXXQNPPGAPPNVLWQXPLAWQNPSGWQNQXARQXPPARQSPPARQXPPAWQNPVAWQNPVIWPNPVIWQNPVIWPNPIVWPGPVVWPNPLAWQNPPGWQXPPGWQXPPGWQGPPDWQGPPDWPLPPDWPLPPDWPLPXDWPLPPDWIPADWPIPPDWQNLRPSPNLRPSPNSRASQNPGAAQPRDVALLQERANKLVKYLMLKDYXKVPIKRSEMLRDIIREYXDVYPEIIERACFVLEKKFGIQLKEIDKEEHLYILISXPESLAGILGXXKDXPKLGLLLVILGVIFMNGNRASEAVLWEALRKMGLRPGVRHPLLGDLRKLLXYEFVKQKYLDYRRVPNSNPPEYEFLWGLRSYHEXSKMKVLRFIAEVQKRDPRDWXAQFMEAADEALDALDAAAAEAEARAEARXRMGIGDEAVSGPWSWDDIEFELLXWDEEGDFGDPWSRIPFXFWARYHQNARSRFPQXFAGPIIGPGGXASANFAANFGAIGFFWVE

SEQ ID NO: 15480 - protein, 834 aa, Homo sapiens
  MOD_RES (34)..(34): Selenocysteine
  MOD_RES (42)..(42): Selenocysteine
  MOD_RES (63)..(63): Selenocysteine
  MOD_RES (85)..(85): Selenocysteine
  MOD_RES (98)..(98): Selenocysteine
  MOD_RES (102)..(102): Selenocysteine
  MOD_RES (114)..(114): Selenocysteine
  MOD_RES (140)..(141): Selenocysteine
  MOD_RES (162)..(162): Selenocysteine
  MOD_RES (174)..(174): Selenocysteine
  MOD_RES (189)..(190): Selenocysteine
  MOD_RES (208)..(209): Selenocysteine
  MOD_RES (216)..(216): Selenocysteine
  MOD_RES (235)..(235): Selenocysteine
  MOD_RES (243)..(244): Selenocysteine
  MOD_RES (248)..(248): Selenocysteine
  MOD_RES (251)..(251): Selenocysteine
  MOD_RES (253)..(253): Selenocysteine
  MOD_RES (263)..(263): Selenocysteine
  MOD_RES (270)..(270): Selenocysteine
  MOD_RES (281)..(281): Selenocysteine
  MOD_RES (284)..(284): Selenocysteine
  MOD_RES (298)..(298): Selenocysteine
  MOD_RES (305)..(305): Selenocysteine
  MOD_RES (330)..(330): Selenocysteine
  MOD_RES (339)..(340): Selenocysteine
  MOD_RES (354)..(354): Selenocysteine
  MOD_RES (368)..(368): Selenocysteine
  MOD_RES (372)..(372): Selenocysteine
  MOD_RES (384)..(384): Selenocysteine
  MOD_RES (438)..(438): Selenocysteine
  MOD_RES (444)..(444): Selenocysteine
  MOD_RES (476)..(476): Selenocysteine
  MOD_RES (544)..(544): Selenocysteine
  MOD_RES (562)..(562): Selenocysteine
  MOD_RES (599)..(599): Selenocysteine
  MOD_RES (609)..(610): Selenocysteine
  MOD_RES (613)..(613): Selenocysteine
  MOD_RES (664)..(664): Selenocysteine
  MOD_RES (698)..(698): Selenocysteine
  MOD_RES (719)..(719): Selenocysteine
  MOD_RES (748)..(748): Selenocysteine
  MOD_RES (772)..(772): Selenocysteine
  MOD_RES (789)..(789): Selenocysteine
  MOD_RES (805)..(805): Selenocysteine
  MOD_RES (816)..(816): Selenocysteine
MAQKMDCGAGLLGFQNPDACRAVCHPLPQPPASXLPLSAFPXLCDPPYSQLRDPPAVLSCYCXPLGASPAPAEASVEDSALLMQXLMEAIQISEAPPXNQAXAAASPQSSQPPXANEMADIQVSAAAARPKSAFKVQNAXXKGPNGVYDFSQAHNAKDVPNXQPKAAFKSQNAXPKGPNAAYDFSQAAXXGELAANKSEMAFKAQNAXXKVGPNAXYNFSQSLNANDLANSRPKXPFKAWNDXXKAPXADXQXQNVNQAKMAXSQADIEXDPGISEPDGAXAQXSADGSQAQNLESRXIIRGKRXRKINNLNVEENSSGDQRRAPLAAGXWRSAPVPVXXQNPPGAPPNVLWQXPLAWQNPSGWQNQXARQXPPARQSPPARQXPPAWQNPVAWQNPVIWPNPVIWQNPVIWPNPIVWPGPVVWPNPLAWQNPPGWQXPPGWQXPPGWQGPPDWQGPPDWPLPPDWPLPPDWPLPXDWPLPPDWIPADWPIPPDWQNLRPSPNLRPSPNSRASQNPGAAQPRDVALLQERANKLVKYLMLKDYXKVPIKRSEMLRDIIREYXDVYPEIIERACFVLEKKFGIQLKEIDKEEHLYILISXPESLAGILGXXKDXPKLGLLLVILGVIFMNGNRASEAVLWEALRKMGLRPGVRHPLLGDLRKLLXYEFVKQKYLDYRRVPNSNPPEYEFLWGLRSYHEXSKMKVLRFIAEVQKRDPRDWXAQFMEAADEALDALDAAAAEAEARAEARXRMGIGDEAVSGPWSWDDIEFELLXWDEEGDFGDPWSRIPFXFWARYHQNARSRFPQXFAGPIIGPGGXASANFAANFGAIGFFWVE

SEQ ID NO: 15481 - protein, 1131 aa, Homo sapiens
  MOD_RES (7)..(7): Selenocysteine
  MOD_RES (17)..(17): Selenocysteine
  MOD_RES (20)..(21): Selenocysteine
  MOD_RES (38)..(38): Selenocysteine
  MOD_RES (50)..(50): Selenocysteine
  MOD_RES (56)..(56): Selenocysteine
  MOD_RES (64)..(64): Selenocysteine
  MOD_RES (78)..(79): Selenocysteine
  MOD_RES (93)..(93): Selenocysteine
  MOD_RES (97)..(97): Selenocysteine
  MOD_RES (127)..(127): Selenocysteine
  MOD_RES (137)..(137): Selenocysteine
  MOD_RES (141)..(141): Selenocysteine
  MOD_RES (156)..(156): Selenocysteine
  MOD_RES (186)..(186): Selenocysteine
  MOD_RES (198)..(198): Selenocysteine
  MOD_RES (200)..(201): Selenocysteine
  MOD_RES (227)..(227): Selenocysteine
  MOD_RES (260)..(260): Selenocysteine
  MOD_RES (297)..(297): Selenocysteine
  MOD_RES (301)..(301): Selenocysteine
  MOD_RES (335)..(335): Selenocysteine
  MOD_RES (348)..(348): Selenocysteine
  MOD_RES (360)..(360): Selenocysteine
  MOD_RES (390)..(390): Selenocysteine
  MOD_RES (400)..(400): Selenocysteine
  MOD_RES (406)..(406): Selenocysteine
  MOD_RES (442)..(442): Selenocysteine
  MOD_RES (446)..(446): Selenocysteine
  MOD_RES (463)..(463): Selenocysteine
  MOD_RES (474)..(474): Selenocysteine
  MOD_RES (503)..(503): Selenocysteine
  MOD_RES (512)..(512): Selenocysteine
  MOD_RES (518)..(518): Selenocysteine
  MOD_RES (531)..(531): Selenocysteine
  MOD_RES (573)..(573): Selenocysteine
  MOD_RES (591)..(591): Selenocysteine
  MOD_RES (632)..(632): Selenocysteine
  MOD_RES (639)..(639): Selenocysteine
  MOD_RES (656)..(656): Selenocysteine
  MOD_RES (702)..(702): Selenocysteine
  MOD_RES (724)..(724): Selenocysteine
  MOD_RES (753)..(753): Selenocysteine
  MOD_RES (769)..(769): Selenocysteine
  MOD_RES (795)..(795): Selenocysteine
  MOD_RES (807)..(807): Selenocysteine
  MOD_RES (828)..(828): Selenocysteine
  MOD_RES (833)..(833): Selenocysteine
  MOD_RES (843)..(843): Selenocysteine
  MOD_RES (851)..(851): Selenocysteine
  MOD_RES (867)..(867): Selenocysteine
  MOD_RES (899)..(900): Selenocysteine
  MOD_RES (943)..(943): Selenocysteine
  MOD_RES (960)..(960): Selenocysteine
  MOD_RES (962)..(962): Selenocysteine
  MOD_RES (975)..(975): Selenocysteine
  MOD_RES (978)..(978): Selenocysteine
  MOD_RES (985)..(985): Selenocysteine
  MOD_RES (987)..(989): Selenocysteine
  MOD_RES (991)..(991): Selenocysteine
  MOD_RES (997)..(997): Selenocysteine
  MOD_RES (1000)..(1000): Selenocysteine
  MOD_RES (1003)..(1004): Selenocysteine
  MOD_RES (1020)..(1020): Selenocysteine
  MOD_RES (1027)..(1027): Selenocysteine
  MOD_RES (1081)..(1082): Selenocysteine
  MOD_RES (1130)..(1130): Selenocysteine
AGGSLGXGRRRQRLPAXGGXXRSPREGEVPGVDYNFLXVKEFLDLEQSGXLLEVGXYEGNYYGXPKPPSQPVSGKVIXXDALHSLQSGSKQSXPKRXKSYNDMQNAGIVHAENEEEDDVPEMNSSFXADSGEQEEHXLQEXALPPVNSSIIAAPIXDPSQKFPQYLPLSAEDNLGPLPENWEMAYXENGEVYFIDHNXKXXSWLDPRCLNKQQKPLEECEDDEGVHXEELDSELELPAGWEKIEDPVYGIYYVDHINRKXQYENPVLEAKRKKQLEQQQQQQQQQQQQQQQQQQQQXEEWXEDHSALVPPVIPNHPPSNPEPAREVPLQGKPFFXRNPSELKGKFIHXKLRKSSRGFGFXVVGGDEPDEFLQIKSLVLDGPAALDGKMEXGDVIVSVNDXCVLGHXHAQVVKIFQSIPIGASVDLELCRGYPLPFDPDDPNXSLVXSVAILDKEPIIVNGQEXYDSPASHSSKXGKVNGMKDARPSSPADVASNSSHGYPNDXVSLASSIAXQPELIXVHIVKGPMGFGFXIADSPGGGGQRVKQIVDSPRCRGLKEGDLIVEVNKKNVQALXHNQVVDMLVECPKGSEVXLLVQRGGLPVPKKSPKSQPLERKDSQNSSQHSVSSHRSLHXASPSHSXQVLPEFPPAEAQAPDQXDSSGQKKPDPFKIWAQSRSMYENRPMSPSPASGLSKGEREREINSXNFGECPIPDYQEQDIFLWRKEXGFGFRILGGNEPGEPIYIGHIVPLGAADXDGRLRSGDELICVDGXPVIGKSHQLVVQLMQQAAKQGHVNLXVRRKVVFAVPKXENEVPSPASSHHSSNQPASLXEEKRXPQGSQNSLNXVSSGSGSXSGIGSGGGGGSGVVSXVVQPYDVEIRRGENEGFGFVIVSSVSRPEAGXXFAGNACVAMPHKIGRIIEGSPADRCGKLKVGDRILAVNGCSIXNKSHSDIVNLIKEAGNXVXLRIIPGDESSNAXLLXNAEKIAXIXXXHXPSQQGXQEXRNXXKPKQESQFEFKAPQAXQEQDFYXVELERGAKGFGFSLRGGREYNMDLYVLRLAEDGPAERCGKMRIGDEILEINGEXXKNMKHSRAIELIKNGGRRVRLFLKRGDGSVPEYGGSNYENIPSFPGMXP

SEQ ID NO: 15482 - protein, 185 aa, Homo sapiens
  MOD_RES (14)..(14): Selenocysteine
  MOD_RES (24)..(24): Selenocysteine
  MOD_RES (28)..(28): Selenocysteine
  MOD_RES (43)..(43): Selenocysteine
  MOD_RES (73)..(73): Selenocysteine
  MOD_RES (85)..(85): Selenocysteine
  MOD_RES (87)..(88): Selenocysteine
  MOD_RES (135)..(135): Selenocysteine
  MOD_RES (172)..(172): Selenocysteine
  MOD_RES (176)..(176): Selenocysteine
EEEDDVPEMNSSFXADSGEQEEHXLQEXALPPVNSSIIAAPIXDPSQKFPQYLPLSAEDNLGPLPENWEMAYXENGEVYFIDHNXKXXSWLDPRCLNKQQKPLEECEDDELPAGWEKIEDPVYGIYYVDHINRKXQYENPVLEAKRKKQLEQQQQQQQQQQQQQQQQQQQQXEEWXEDHSALVPP

SEQ ID NO: 15483 - protein, 1014 aa, Homo sapiens
  MOD_RES (4)..(4): Selenocysteine
  MOD_RES (8)..(8): Selenocysteine
  MOD_RES (38)..(38): Selenocysteine
  MOD_RES (48)..(48): Selenocysteine
  MOD_RES (52)..(52): Selenocysteine
  MOD_RES (67)..(67): Selenocysteine
  MOD_RES (97)..(97): Selenocysteine
  MOD_RES (109)..(109): Selenocysteine
  MOD_RES (111)..(112): Selenocysteine
  MOD_RES (138)..(138): Selenocysteine
  MOD_RES (171)..(171): Selenocysteine
  MOD_RES (208)..(208): Selenocysteine
  MOD_RES (212)..(212): Selenocysteine
  MOD_RES (246)..(246): Selenocysteine
  MOD_RES (259)..(259): Selenocysteine
  MOD_RES (271)..(271): Selenocysteine
  MOD_RES (301)..(301): Selenocysteine
  MOD_RES (311)..(311): Selenocysteine
  MOD_RES (317)..(317): Selenocysteine
  MOD_RES (353)..(353): Selenocysteine
  MOD_RES (357)..(357): Selenocysteine
  MOD_RES (374)..(374): Selenocysteine
  MOD_RES (385)..(385): Selenocysteine
  MOD_RES (414)..(414): Selenocysteine
  MOD_RES (423)..(423): Selenocysteine
  MOD_RES (429)..(429): Selenocysteine
  MOD_RES (442)..(442): Selenocysteine
  MOD_RES (484)..(484): Selenocysteine
  MOD_RES (502)..(502): Selenocysteine
  MOD_RES (543)..(543): Selenocysteine
  MOD_RES (550)..(550): Selenocysteine
  MOD_RES (567)..(567): Selenocysteine
  MOD_RES (607)..(607): Selenocysteine
  MOD_RES (636)..(636): Selenocysteine
  MOD_RES (652)..(652): Selenocysteine
  MOD_RES (678)..(678): Selenocysteine
  MOD_RES (690)..(690): Selenocysteine
  MOD_RES (711)..(711): Selenocysteine
  MOD_RES (716)..(716): Selenocysteine
  MOD_RES (726)..(726): Selenocysteine
  MOD_RES (734)..(734): Selenocysteine
  MOD_RES (750)..(750): Selenocysteine
  MOD_RES (782)..(783): Selenocysteine
  MOD_RES (826)..(826): Selenocysteine
  MOD_RES (843)..(843): Selenocysteine
  MOD_RES (845)..(845): Selenocysteine
  MOD_RES (858)..(858): Selenocysteine
  MOD_RES (861)..(861): Selenocysteine
  MOD_RES (868)..(868): Selenocysteine
  MOD_RES (870)..(872): Selenocysteine
  MOD_RES (874)..(874): Selenocysteine
  MOD_RES (880)..(880): Selenocysteine
  MOD_RES (883)..(883): Selenocysteine
  MOD_RES (886)..(887): Selenocysteine
  MOD_RES (903)..(903): Selenocysteine
  MOD_RES (910)..(910): Selenocysteine
  MOD_RES (964)..(965): Selenocysteine
  MOD_RES (1013)..(1013): Selenocysteine
KQSXPKRXKSYNDMQNAGIVHAENEEEDDVPEMNSSFXADSGEQEEHXLQEXALPPVNSSIIAAPIXDPSQKFPQYLPLSAEDNLGPLPENWEMAYXENGEVYFIDHNXKXXSWLDPRCLNKQQKPLEECEDDEGVHXEELDSELELPAGWEKIEDPVYGIYYVDHINRKXQYENPVLEAKRKKQLEQQQQQQQQQQQQQQQQQQQQXEEWXEDHSALVPPVIPNHPPSNPEPAREVPLQGKPFFXRNPSELKGKFIHXKLRKSSRGFGFXVVGGDEPDEFLQIKSLVLDGPAALDGKMEXGDVIVSVNDXCVLGHXHAQVVKIFQSIPIGASVDLELCRGYPLPFDPDDPNXSLVXSVAILDKEPIIVNGQEXYDSPASHSSKXGKVNGMKDARPSSPADVASNSSHGYPNDXVSLASSIAXQPELIXVHIVKGPMGFGFXIADSPGGGGQRVKQIVDSPRCRGLKEGDLIVEVNKKNVQALXHNQVVDMLVECPKGSEVXLLVQRGGLPVPKKSPKSQPLERKDSQNSSQHSVSSHRSLHXASPSHSXQVLPEFPPAEAQAPDQXDSSGQKKPDPFKIWAQSRSMYENRLPDYQEQDIFLWRKEXGFGFRILGGNEPGEPIYIGHIVPLGAADXDGRLRSGDELICVDGXPVIGKSHQLVVQLMQQAAKQGHVNLXVRRKVVFAVPKXENEVPSPASSHHSSNQPASLXEEKRXPQGSQNSLNXVSSGSGSXSGIGSGGGGGSGVVSXVVQPYDVEIRRGENEGFGFVIVSSVSRPEAGXXFAGNACVAMPHKIGRIIEGSPADRCGKLKVGDRILAVNGCSIXNKSHSDIVNLIKEAGNXVXLRIIPGDESSNAXLLXNAEKIAXIXXXHXPSQQGXQEXRNXXKPKQESQFEFKAPQAXQEQDFYXVELERGAKGFGFSLRGGREYNMDLYVLRLAEDGPAERCGKMRIGDEILEINGEXXKNMKHSRAIELIKNGGRRVRLFLKRGDGSVPEYGGSNYENIPSFPGMXP

SEQ ID NO: 15484 - protein, 980 aa, Homo sapiens
  MOD_RES (4)..(4): Selenocysteine
  MOD_RES (16)..(16): Selenocysteine
  MOD_RES (18)..(19): Selenocysteine
  MOD_RES (45)..(45): Selenocysteine
  MOD_RES (78)..(78): Selenocysteine
  MOD_RES (115)..(115): Selenocysteine
  MOD_RES (119)..(119): Selenocysteine
  MOD_RES (153)..(153): Selenocysteine
  MOD_RES (166)..(166): Selenocysteine
  MOD_RES (178)..(178): Selenocysteine
  MOD_RES (208)..(208): Selenocysteine
  MOD_RES (218)..(218): Selenocysteine
  MOD_RES (224)..(224): Selenocysteine
  MOD_RES (260)..(260): Selenocysteine
  MOD_RES (264)..(264): Selenocysteine
  MOD_RES (281)..(281): Selenocysteine
  MOD_RES (292)..(292): Selenocysteine
  MOD_RES (321)..(321): Selenocysteine
  MOD_RES (330)..(330): Selenocysteine
  MOD_RES (336)..(336): Selenocysteine
  MOD_RES (349)..(349): Selenocysteine
  MOD_RES (391)..(391): Selenocysteine
  MOD_RES (409)..(409): Selenocysteine
  MOD_RES (450)..(450): Selenocysteine
  MOD_RES (457)..(457): Selenocysteine
  MOD_RES (474)..(474): Selenocysteine
  MOD_RES (520)..(520): Selenocysteine
  MOD_RES (542)..(542): Selenocysteine
  MOD_RES (571)..(571): Selenocysteine
  MOD_RES (587)..(587): Selenocysteine
  MOD_RES (613)..(613): Selenocysteine
  MOD_RES (625)..(625): Selenocysteine
  MOD_RES (646)..(646): Selenocysteine
  MOD_RES (651)..(651): Selenocysteine
  MOD_RES (661)..(661): Selenocysteine
  MOD_RES (669)..(669): Selenocysteine
  MOD_RES (685)..(685): Selenocysteine
  MOD_RES (717)..(718): Selenocysteine
  MOD_RES (760)..(760): Selenocysteine
  MOD_RES (777)..(777): Selenocysteine
  MOD_RES (779)..(779): Selenocysteine
  MOD_RES (792)..(792): Selenocysteine
  MOD_RES (795)..(795): Selenocysteine
  MOD_RES (802)..(802): Selenocysteine
  MOD_RES (804)..(806): Selenocysteine
  MOD_RES (808)..(808): Selenocysteine
  MOD_RES (814)..(814): Selenocysteine
  MOD_RES (817)..(817): Selenocysteine
  MOD_RES (820)..(821): Selenocysteine
  MOD_RES (837)..(837): Selenocysteine
  MOD_RES (844)..(844): Selenocysteine
  MOD_RES (898)..(899): Selenocysteine
  MOD_RES (961)..(963): Selenocysteine
  MOD_RES (967)..(967): Selenocysteine
  MOD_RES (969)..(969): Selenocysteine
MAYXENGEVYFIDHNXKXXSWLDPRCLNKQQKPLEECEDDEGVHXEELDSELELPAGWEKIEDPVYGIYYVDHINRKXQYENPVLEAKRKKQLEQQQQQQQQQQQQQQQQQQQQXEEWXEDHSALVPPVIPNHPPSNPEPAREVPLQGKPFFXRNPSELKGKFIHXKLRKSSRGFGFXVVGGDEPDEFLQIKSLVLDGPAALDGKMEXGDVIVSVNDXCVLGHXHAQVVKIFQSIPIGASVDLELCRGYPLPFDPDDPNXSLVXSVAILDKEPIIVNGQEXYDSPASHSSKXGKVNGMKDARPSSPADVASNSSHGYPNDXVSLASSIAXQPELIXVHIVKGPMGFGFXIADSPGGGGQRVKQIVDSPRCRGLKEGDLIVEVNKKNVQALXHNQVVDMLVECPKGSEVXLLVQRGGLPVPKKSPKSQPLERKDSQNSSQHSVSSHRSLHXASPSHSXQVLPEFPPAEAQAPDQXDSSGQKKPDPFKIWAQSRSMYENRPMSPSPASGLSKGEREREINSXNFGECPIPDYQEQDIFLWRKEXGFGFRILGGNEPGEPIYIGHIVPLGAADXDGRLRSGDELICVDGXPVIGKSHQLVVQLMQQAAKQGHVNLXVRRKVVFAVPKXENEVPSPASSHHSSNQPASLXEEKRXPQGSQNSLNXVSSGSGSXSGIGSGGGGGSGVVSXVVQPYDVEIRRGENEGFGFVIVSSVSRPEAGXXFGNACVAMPHKIGRIIEGSPADRCGKLKVGDRILAVNGCSIXNKSHSDIVNLIKEAGNXVXLRIIPGDESSNAXLLXNAEKIAXIXXXHXPSQQGXQEXRNXXKPKQESQFEFKAPQAXQEQDFYXVELERGAKGFGFSLRGGREYNMDLYVLRLAEDGPAERCGKMRIGDEILEINGEXXKNMKHSRAIELIKNGGRRVRLFLKRGDGSVPEYAMIPPNIAACMRNEKLGEACFYLMGHNQXXXPAAXAXAPPPVHKVFRK

SEQ ID NO: 15485 - protein, 1155 aa, Homo sapiens
  MOD_RES (4)..(4): Selenocysteine
  MOD_RES (16)..(16): Selenocysteine
  MOD_RES (18)..(19): Selenocysteine
  MOD_RES (45)..(45): Selenocysteine
  MOD_RES (78)..(78): Selenocysteine
  MOD_RES (115)..(115): Selenocysteine
  MOD_RES (119)..(119): Selenocysteine
  MOD_RES (153)..(153): Selenocysteine
  MOD_RES (166)..(166): Selenocysteine
  MOD_RES (178)..(178): Selenocysteine
  MOD_RES (208)..(208): Selenocysteine
  MOD_RES (218)..(218): Selenocysteine
  MOD_RES (224)..(224): Selenocysteine
  MOD_RES (260)..(260): Selenocysteine
  MOD_RES (264)..(264): Selenocysteine
  MOD_RES (281)..(281): Selenocysteine
  MOD_RES (292)..(292): Selenocysteine
  MOD_RES (321)..(321): Selenocysteine
  MOD_RES (330)..(330): Selenocysteine
  MOD_RES (336)..(336): Selenocysteine
  MOD_RES (349)..(349): Selenocysteine
  MOD_RES (391)..(391): Selenocysteine
  MOD_RES (409)..(409): Selenocysteine
  MOD_RES (450)..(450): Selenocysteine
  MOD_RES (457)..(457): Selenocysteine
  MOD_RES (474)..(474): Selenocysteine
  MOD_RES (514)..(514): Selenocysteine
  MOD_RES (543)..(543): Selenocysteine
  MOD_RES (559)..(559): Selenocysteine
  MOD_RES (585)..(585): Selenocysteine
  MOD_RES (597)..(597): Selenocysteine
  MOD_RES (618)..(618): Selenocysteine
  MOD_RES (623)..(623): Selenocysteine
  MOD_RES (633)..(633): Selenocysteine
  MOD_RES (641)..(641): Selenocysteine
  MOD_RES (657)..(657): Selenocysteine
  MOD_RES (689)..(690): Selenocysteine
  MOD_RES (732)..(732): Selenocysteine
  MOD_RES (749)..(749): Selenocysteine
  MOD_RES (751)..(751): Selenocysteine
  MOD_RES (764)..(764): Selenocysteine
  MOD_RES (767)..(767): Selenocysteine
  MOD_RES (774)..(774): Selenocysteine
  MOD_RES (776)..(778): Selenocysteine
  MOD_RES (780)..(780): Selenocysteine
  MOD_RES (786)..(786): Selenocysteine
  MOD_RES (789)..(789): Selenocysteine
  MOD_RES (792)..(793): Selenocysteine
  MOD_RES (809)..(809): Selenocysteine
  MOD_RES (816)..(816): Selenocysteine
  MOD_RES (870)..(871): Selenocysteine
  MOD_RES (915)..(915): Selenocysteine
  MOD_RES (974)..(974): Selenocysteine
  MOD_RES (978)..(978): Selenocysteine
  MOD_RES (1023)..(1023): Selenocysteine
  MOD_RES (1029)..(1029): Selenocysteine
  MOD_RES (1053)..(1053): Selenocysteine
  MOD_RES (1092)..(1092): Selenocysteine
  MOD_RES (1151)..(1151): Selenocysteine
MAYXENGEVYFIDHNXKXXSWLDPRCLNKQQKPLEECEDDEGVHXEELDSELELPAGWEKIEDPVYGIYYVDHINRKXQYENPVLEAKRKKQLEQQQQQQQQQQQQQQQQQQQQXEEWXEDHSALVPPVIPNHPPSNPEPAREVPLQGKPFFXRNPSELKGKFIHXKLRKSSRGFGFXVVGGDEPDEFLQIKSLVLDGPAALDGKMEXGDVIVSVNDXCVLGHXHAQVVKIFQSIPIGASVDLELCRGYPLPFDPDDPNXSLVXSVAILDKEPIIVNGQEXYDSPASHSSKXGKVNGMKDARPSSPADVASNSSHGYPNDXVSLASSIAXQPELIXVHIVKGPMGFGFXIADSPGGGGQRVKQIVDSPRCRGLKEGDLIVEVNKKNVQALXHNQVVDMLVECPKGSEVXLLVQRGGLPVPKKSPKSQPLERKDSQNSSQHSVSSHRSLHXASPSHSXQVLPEFPPAEAQAPDQXDSSGQKKPDPFKIWAQSRSMYENRLPDYQEQDIFLWRKEXGFGFRILGGNEPGEPIYIGHIVPLGAADXDGRLRSGDELICVDGXPVIGKSHQLVVQLMQQAAKQGHVNLXVRRKVVFAVPKXENEVPSPASSHHSSNQPASLXEEKRXPQGSQNSLNXVSSGSGSXSGIGSGGGGGSGVVSXVVQPYDVEIRRGENEGFGFVIVSSVSRPEAGXXFGNACVAMPHKIGRIIEGSPADRCGKLKVGDRILAVNGCSIXNKSHSDIVNLIKEAGNXVXLRIIPGDESSNAXLLXNAEKIAXIXXXHXPSQQGXQEXRNXXKPKQESQFEFKAPQAXQEQDFYXVELERGAKGFGFSLRGGREYNMDLYVLRLAEDGPAERCGKMRIGDEILEINGEXXKNMKHSRAIELIKNGGRRVRLFLKRGDGSVPEYDPSSDRHGPAXGPQGVPEVRAGPDRRQHPSLESSYPPDLHKSSPHGEKRAHARDPKGSREYSRQPNEHHXWNGXSRKPDSGACRPKDRAPEGRRDAQAERAAAANGPKRRSPEKRREGXRSADNXLERREKHEKRRDVSPERRRERSPXRRRDGSPSRRRRSLERLLEQRRSPERRRGGSPERRAKSXDRRRARSPERRRERSLDKRNREDRASHREREEANLKQDAGRSSRHPPEQRRRPYKECSXDLSI

SEQ ID NO: 15486 - protein, 1160 aa, Homo sapiens
  MOD_RES (12)..(12): Selenocysteine
  MOD_RES (19)..(19): Selenocysteine
  MOD_RES (31)..(31): Selenocysteine
  MOD_RES (98)..(98): Selenocysteine
  MOD_RES (132)..(132): Selenocysteine
  MOD_RES (145)..(146): Selenocysteine
  MOD_RES (163)..(163): Selenocysteine
  MOD_RES (175)..(175): Selenocysteine
  MOD_RES (181)..(181): Selenocysteine
  MOD_RES (189)..(189): Selenocysteine
  MOD_RES (203)..(204): Selenocysteine
  MOD_RES (218)..(218): Selenocysteine
  MOD_RES (222)..(222): Selenocysteine
  MOD_RES (252)..(252): Selenocysteine
  MOD_RES (262)..(262): Selenocysteine
  MOD_RES (266)..(266): Selenocysteine
  MOD_RES (281)..(281): Selenocysteine
  MOD_RES (311)..(311): Selenocysteine
  MOD_RES (323)..(323): Selenocysteine
  MOD_RES (325)..(326): Selenocysteine
  MOD_RES (352)..(352): Selenocysteine
  MOD_RES (385)..(385): Selenocysteine
  MOD_RES (422)..(422): Selenocysteine
  MOD_RES (426)..(426): Selenocysteine
  MOD_RES (460)..(460): Selenocysteine
  MOD_RES (473)..(473): Selenocysteine
  MOD_RES (485)..(485): Selenocysteine
  MOD_RES (515)..(515): Selenocysteine
  MOD_RES (525)..(525): Selenocysteine
  MOD_RES (531)..(531): Selenocysteine
  MOD_RES (567)..(567): Selenocysteine
  MOD_RES (571)..(571): Selenocysteine
  MOD_RES (588)..(588): Selenocysteine
  MOD_RES (599)..(599): Selenocysteine
  MOD_RES (628)..(628): Selenocysteine
  MOD_RES (637)..(637): Selenocysteine
  MOD_RES (643)..(643): Selenocysteine
  MOD_RES (656)..(656): Selenocysteine
  MOD_RES (698)..(698): Selenocysteine
  MOD_RES (716)..(716): Selenocysteine
  MOD_RES (757)..(757): Selenocysteine
  MOD_RES (764)..(764): Selenocysteine
  MOD_RES (781)..(781): Selenocysteine
  MOD_RES (821)..(821): Selenocysteine
  MOD_RES (850)..(850): Selenocysteine
  MOD_RES (866)..(866): Selenocysteine
  MOD_RES (892)..(892): Selenocysteine
  MOD_RES (904)..(904): Selenocysteine
  MOD_RES (925)..(925): Selenocysteine
  MOD_RES (930)..(930): Selenocysteine
  MOD_RES (940)..(940): Selenocysteine
  MOD_RES (948)..(948): Selenocysteine
  MOD_RES (964)..(964): Selenocysteine
  MOD_RES (996)..(997): Selenocysteine
  MOD_RES (1004)..(1004): Selenocysteine
  MOD_RES (1007)..(1007): Selenocysteine
  MOD_RES (1014)..(1014): Selenocysteine
  MOD_RES (1016)..(1018): Selenocysteine
  MOD_RES (1020)..(1020): Selenocysteine
  MOD_RES (1026)..(1026): Selenocysteine
  MOD_RES (1029)..(1029): Selenocysteine
  MOD_RES (1032)..(1033): Selenocysteine
  MOD_RES (1049)..(1049): Selenocysteine
  MOD_RES (1056)..(1056): Selenocysteine
  MOD_RES (1110)..(1111): Selenocysteine
  MOD_RES (1159)..(1159): Selenocysteine
MSKVIQKKNHWXSRVHECXVKRGPQGELGVXVLGGAEHGEFPYVGAVAAVEAAGLPGGGEGPRLGEGELLLEVQGVRVSGLPRYDVLGVIDSCKEAVXFKAVRQGGRLNKDLRHFLNQRFQKGSPDHELQQXIRDNLYRHAVPCXXRSPREGEVPGVDYNFLXVKEFLDLEQSGXLLEVGXYEGNYYGXPKPPSQPVSGKVIXXDALHSLQSGSKQSXPKRXKSYNDMQNAGIVHAENEEEDDVPEMNSSFXADSGEQEEHXLQEXALPPVNSSIIAAPIXDPSQKFPQYLPLSAEDNLGPLPENWEMAYXENGEVYFIDHNXKXXSWLDPRCLNKQQKPLEECEDDEGVHXEELDSELELPAGWEKIEDPVYGIYYVDHINRKXQYENPVLEAKRKKQLEQQQQQQQQQQQQQQQQQQQQXEEWXEDHSALVPPVIPNHPPSNPEPAREVPLQGKPFFXRNPSELKGKFIHXKLRKSSRGFGFXVVGGDEPDEFLQIKSLVLDGPAALDGKMEXGDVIVSVNDXCVLGHXHAQVVKIFQSIPIGASVDLELCRGYPLPFDPDDPNXSLVXSVAILDKEPIIVNGQEXYDSPASHSSKXGKVNGMKDARPSSPADVASNSSHGYPNDXVSLASSIAXQPELIXVHIVKGPMGFGFXIADSPGGGGQRVKQIVDSPRCRGLKEGDLIVEVNKKNVQALXHNQVVDMLVECPKGSEVXLLVQRGGLPVPKKSPKSQPLERKDSQNSSQHSVSSHRSLHXASPSHSXQVLPEFPPAEAQAPDQXDSSGQKKPDPFKIWAQSRSMYENRLPDYQEQDIFLWRKEXGFGFRILGGNEPGEPIYIGHIVPLGAADXDGRLRSGDELICVDGXPVIGKSHQLVVQLMQQAAKQGHVNLXVRRKVVFAVPKXENEVPSPASSHHSSNQPASLXEEKRXPQGSQNSLNXVSSGSGSXSGIGSGGGGGSGVVSXVVQPYDVEIRRGENEGFGFVIVSSVSRPEAGXXFESSNAXLLXNAEKIAXIXXXHXPSQQGXQEXRNXXKPKQESQFEFKAPQAXQEQDFYXVELERGAKGFGFSLRGGREYNMDLYVLRLAEDGPAERCGKMRIGDEILEINGEXXKNMKHSRAIELIKNGGRRVRLFLKRGDGSVPEYGGSNYENIPSFPGMXP

SEQ ID NO: 15487 - protein, 1256 aa, Homo sapiens
  MOD_RES (12)..(12): Selenocysteine
  MOD_RES (19)..(19): Selenocysteine
  MOD_RES (31)..(31): Selenocysteine
  MOD_RES (98)..(98): Selenocysteine
  MOD_RES (132)..(132): Selenocysteine
  MOD_RES (145)..(146): Selenocysteine
  MOD_RES (163)..(163): Selenocysteine
  MOD_RES (175)..(175): Selenocysteine
  MOD_RES (181)..(181): Selenocysteine
  MOD_RES (189)..(189): Selenocysteine
  MOD_RES (203)..(204): Selenocysteine
  MOD_RES (218)..(218): Selenocysteine
  MOD_RES (222)..(222): Selenocysteine
  MOD_RES (252)..(252): Selenocysteine
  MOD_RES (262)..(262): Selenocysteine
  MOD_RES (266)..(266): Selenocysteine
  MOD_RES (281)..(281): Selenocysteine
  MOD_RES (311)..(311): Selenocysteine
  MOD_RES (323)..(323): Selenocysteine
  MOD_RES (325)..(326): Selenocysteine
  MOD_RES (352)..(352): Selenocysteine
  MOD_RES (385)..(385): Selenocysteine
  MOD_RES (422)..(422): Selenocysteine
  MOD_RES (426)..(426): Selenocysteine
  MOD_RES (460)..(460): Selenocysteine
  MOD_RES (473)..(473): Selenocysteine
  MOD_RES (485)..(485): Selenocysteine
  MOD_RES (515)..(515): Selenocysteine
  MOD_RES (525)..(525): Selenocysteine
  MOD_RES (531)..(531): Selenocysteine
  MOD_RES (567)..(567): Selenocysteine
  MOD_RES (571)..(571): Selenocysteine
  MOD_RES (588)..(588): Selenocysteine
  MOD_RES (599)..(599): Selenocysteine
  MOD_RES (628)..(628): Selenocysteine
  MOD_RES (637)..(637): Selenocysteine
  MOD_RES (643)..(643): Selenocysteine
  MOD_RES (656)..(656): Selenocysteine
  MOD_RES (698)..(698): Selenocysteine
  MOD_RES (716)..(716): Selenocysteine
  MOD_RES (757)..(757): Selenocysteine
  MOD_RES (764)..(764): Selenocysteine
  MOD_RES (781)..(781): Selenocysteine
  MOD_RES (827)..(827): Selenocysteine
  MOD_RES (849)..(849): Selenocysteine
  MOD_RES (878)..(878): Selenocysteine
  MOD_RES (894)..(894): Selenocysteine
  MOD_RES (920)..(920): Selenocysteine
  MOD_RES (932)..(932): Selenocysteine
  MOD_RES (953)..(953): Selenocysteine
  MOD_RES (958)..(958): Selenocysteine
  MOD_RES (968)..(968): Selenocysteine
  MOD_RES (976)..(976): Selenocysteine
  MOD_RES (992)..(992): Selenocysteine
  MOD_RES (1024)..(1025): Selenocysteine
  MOD_RES (1068)..(1068): Selenocysteine
  MOD_RES (1085)..(1085): Selenocysteine
  MOD_RES (1087)..(1087): Selenocysteine
  MOD_RES (1100)..(1100): Selenocysteine
  MOD_RES (1103)..(1103): Selenocysteine
  MOD_RES (1110)..(1110): Selenocysteine
  MOD_RES (1112)..(1114): Selenocysteine
  MOD_RES (1116)..(1116): Selenocysteine
  MOD_RES (1122)..(1122): Selenocysteine
  MOD_RES (1125)..(1125): Selenocysteine
  MOD_RES (1128)..(1129): Selenocysteine
  MOD_RES (1145)..(1145): Selenocysteine
  MOD_RES (1152)..(1152): Selenocysteine
  MOD_RES (1206)..(1207): Selenocysteine
  MOD_RES (1255)..(1255): Selenocysteine
MSKVIQKKNHWXSRVHECXVKRGPQGELGVXVLGGAEHGEFPYVGAVAAVEAAGLPGGGEGPRLGEGELLLEVQGVRVSGLPRYDVLGVIDSCKEAVXFKAVRQGGRLNKDLRHFLNQRFQKGSPDHELQQXIRDNLYRHAVPCXXRSPREGEVPGVDYNFLXVKEFLDLEQSGXLLEVGXYEGNYYGXPKPPSQPVSGKVIXXDALHSLQSGSKQSXPKRXKSYNDMQNAGIVHAENEEEDDVPEMNSSFXADSGEQEEHXLQEXALPPVNSSIIAAPIXDPSQKFPQYLPLSAEDNLGPLPENWEMAYXENGEVYFIDHNXKXXSWLDPRCLNKQQKPLEECEDDEGVHXEELDSELELPAGWEKIEDPVYGIYYVDHINRKXQYENPVLEAKRKKQLEQQQQQQQQQQQQQQQQQQQQXEEWXEDHSALVPPVIPNHPPSNPEPAREVPLQGKPFFXRNPSELKGKFIHXKLRKSSRGFGFXVVGGDEPDEFLQIKSLVLDGPAALDGKMEXGDVIVSVNDXCVLGHXHAQVVKIFQSIPIGASVDLELCRGYPLPFDPDDPNXSLVXSVAILDKEPIIVNGQEXYDSPASHSSKXGKVNGMKDARPSSPADVASNSSHGYPNDXVSLASSIAXQPELIXVHIVKGPMGFGFXIADSPGGGGQRVKQIVDSPRCRGLKEGDLIVEVNKKNVQALXHNQVVDMLVECPKGSEVXLLVQRGGLPVPKKSPKSQPLERKDSQNSSQHSVSSHRSLHXASPSHSXQVLPEFPPAEAQAPDQXDSSGQKKPDPFKIWAQSRSMYENRPMSPSPASGLSKGEREREINSXNFGECPIPDYQEQDIFLWRKEXGFGFRILGGNEPGEPIYIGHIVPLGAADXDGRLRSGDELICVDGXPVIGKSHQLVVQLMQQAAKQGHVNLXVRRKVVFAVPKXENEVPSPASSHHSSNQPASLXEEKRXPQGSQNSLNXVSSGSGSXSGIGSGGGGGSGVVSXVVQPYDVEIRRGENEGFGFVIVSSVSRPEAGXXFAGNACVAMPHKIGRIIEGSPADRCGKLKVGDRILAVNGCSIXNKSHSDIVNLIKEAGNXVXLRIIPGDESSNAXLLXNAEKIAXIXXXHXPSQQGXQEXRNXXKPKQESQFEFKAPQAXQEQDFYXVELERGAKGFGFSLRGGREYNMDLYVLRLAEDGPAERCGKMRIGDEILEINGEXXKNMKHSRAIELIKNGGRRVRLFLKRGDGSVPEYGGSNYENIPSFPGMXP

SEQ ID NO: 15488 - protein, 1287 aa, Homo sapiens
  MOD_RES (12)..(12): Selenocysteine
  MOD_RES (19)..(19): Selenocysteine
  MOD_RES (31)..(31): Selenocysteine
  MOD_RES (98)..(98): Selenocysteine
  MOD_RES (132)..(132): Selenocysteine
  MOD_RES (145)..(146): Selenocysteine
  MOD_RES (163)..(163): Selenocysteine
  MOD_RES (175)..(175): Selenocysteine
  MOD_RES (181)..(181): Selenocysteine
  MOD_RES (189)..(189): Selenocysteine
  MOD_RES (203)..(204): Selenocysteine
  MOD_RES (218)..(218): Selenocysteine
  MOD_RES (222)..(222): Selenocysteine
  MOD_RES (252)..(252): Selenocysteine
  MOD_RES (262)..(262): Selenocysteine
  MOD_RES (266)..(266): Selenocysteine
  MOD_RES (281)..(281): Selenocysteine
  MOD_RES (311)..(311): Selenocysteine
  MOD_RES (323)..(323): Selenocysteine
  MOD_RES (325)..(326): Selenocysteine
  MOD_RES (352)..(352): Selenocysteine
  MOD_RES (385)..(385): Selenocysteine
  MOD_RES (422)..(422): Selenocysteine
  MOD_RES (426)..(426): Selenocysteine
  MOD_RES (460)..(460): Selenocysteine
  MOD_RES (473)..(473): Selenocysteine
  MOD_RES (485)..(485): Selenocysteine
  MOD_RES (515)..(515): Selenocysteine
  MOD_RES (525)..(525): Selenocysteine
  MOD_RES (531)..(531): Selenocysteine
  MOD_RES (567)..(567): Selenocysteine
  MOD_RES (571)..(571): Selenocysteine
  MOD_RES (588)..(588): Selenocysteine
  MOD_RES (599)..(599): Selenocysteine
  MOD_RES (628)..(628): Selenocysteine
  MOD_RES (637)..(637): Selenocysteine
  MOD_RES (643)..(643): Selenocysteine
  MOD_RES (656)..(656): Selenocysteine
  MOD_RES (698)..(698): Selenocysteine
  MOD_RES (716)..(716): Selenocysteine
  MOD_RES (757)..(757): Selenocysteine
  MOD_RES (764)..(764): Selenocysteine
  MOD_RES (781)..(781): Selenocysteine
  MOD_RES (827)..(827): Selenocysteine
  MOD_RES (849)..(849): Selenocysteine
  MOD_RES (878)..(878): Selenocysteine
  MOD_RES (894)..(894): Selenocysteine
  MOD_RES (920)..(920): Selenocysteine
  MOD_RES (932)..(932): Selenocysteine
  MOD_RES (953)..(953): Selenocysteine
  MOD_RES (958)..(958): Selenocysteine
  MOD_RES (968)..(968): Selenocysteine
  MOD_RES (976)..(976): Selenocysteine
  MOD_RES (992)..(992): Selenocysteine
  MOD_RES (1024)..(1025): Selenocysteine
  MOD_RES (1067)..(1067): Selenocysteine
  MOD_RES (1084)..(1084): Selenocysteine
  MOD_RES (1086)..(1086): Selenocysteine
  MOD_RES (1099)..(1099): Selenocysteine
  MOD_RES (1102)..(1102): Selenocysteine
  MOD_RES (1109)..(1109): Selenocysteine
  MOD_RES (1111)..(1113): Selenocysteine
  MOD_RES (1115)..(1115): Selenocysteine
  MOD_RES (1121)..(1121): Selenocysteine
  MOD_RES (1124)..(1124): Selenocysteine
  MOD_RES (1127)..(1128): Selenocysteine
  MOD_RES (1144)..(1144): Selenocysteine
  MOD_RES (1151)..(1151): Selenocysteine
  MOD_RES (1205)..(1206): Selenocysteine
  MOD_RES (1268)..(1270): Selenocysteine
  MOD_RES (1274)..(1274): Selenocysteine
  MOD_RES (1276)..(1276): Selenocysteine
MSKVIQKKNHWXSRVHECXVKRGPQGELGVXVLGGAEHGEFPYVGAVAAVEAAGLPGGGEGPRLGEGELLLEVQGVRVSGLPRYDVLGVIDSCKEAVXFKAVRQGGRLNKDLRHFLNQRFQKGSPDHELQQXIRDNLYRHAVPCXXRSPREGEVPGVDYNFLXVKEFLDLEQSGXLLEVGXYEGNYYGXPKPPSQPVSGKVIXXDALHSLQSGSKQSXPKRXKSYNDMQNAGIVHAENEEEDDVPEMNSSFXADSGEQEEHXLQEXALPPVNSSIIAAPIXDPSQKFPQYLPLSAEDNLGPLPENWEMAYXENGEVYFIDHNXKXXSWLDPRCLNKQQKPLEECEDDEGVHXEELDSELELPAGWEKIEDPVYGIYYVDHINRKXQYENPVLEAKRKKQLEQQQQQQQQQQQQQQQQQQQQXEEWXEDHSALVPPVIPNHPPSNPEPAREVPLQGKPFFXRNPSELKGKFIHXKLRKSSRGFGFXVVGGDEPDEFLQIKSLVLDGPAALDGKMEXGDVIVSVNDXCVLGHXHAQVVKIFQSIPIGASVDLELCRGYPLPFDPDDPNXSLVXSVAILDKEPIIVNGQEXYDSPASHSSKXGKVNGMKDARPSSPADVASNSSHGYPNDXVSLASSIAXQPELIXVHIVKGPMGFGFXIADSPGGGGQRVKQIVDSPRCRGLKEGDLIVEVNKKNVQALXHNQVVDMLVECPKGSEVXLLVQRGGLPVPKKSPKSQPLERKDSQNSSQHSVSSHRSLHXASPSHSXQVLPEFPPAEAQAPDQXDSSGQKKPDPFKIWAQSRSMYENRPMSPSPASGLSKGEREREINSXNFGECPIPDYQEQDIFLWRKEXGFGFRILGGNEPGEPIYIGHIVPLGAADXDGRLRSGDELICVDGXPVIGKSHQLVVQLMQQAAKQGHVNLXVRRKVVFAVPKXENEVPSPASSHHSSNQPASLXEEKRXPQGSQNSLNXVSSGSGSXSGIGSGGGGGSGVVSXVVQPYDVEIRRGENEGFGFVIVSSVSRPEAGXXFGNACVAMPHKIGRIIEGSPADRCGKLKVGDRILAVNGCSIXNKSHSDIVNLIKEAGNXVXLRIIPGDESSNAXLLXNAEKIAXIXXXHXPSQQGXQEXRNXXKPKQESQFEFKAPQAXQEQDFYXVELERGAKGFGFSLRGGREYNMDLYVLRLAEDGPAERCGKMRIGDEILEINGEXXKNMKHSRAIELIKNGGRRVRLFLKRGDGSVPEYAMIPPNIAACMRNEKLGEACFYLMGHNQXXXPAAXAXAPPPVHKVFRK

SEQ ID NO: 15489 - protein, 1462 aa, Homo sapiens
  MOD_RES (12)..(12): Selenocysteine
  MOD_RES (19)..(19): Selenocysteine
  MOD_RES (31)..(31): Selenocysteine
  MOD_RES (98)..(98): Selenocysteine
  MOD_RES (132)..(132): Selenocysteine
  MOD_RES (145)..(146): Selenocysteine
  MOD_RES (163)..(163): Selenocysteine
  MOD_RES (175)..(175): Selenocysteine
  MOD_RES (181)..(181): Selenocysteine
  MOD_RES (189)..(189): Selenocysteine
  MOD_RES (203)..(204): Selenocysteine
  MOD_RES (218)..(218): Selenocysteine
  MOD_RES (222)..(222): Selenocysteine
  MOD_RES (252)..(252): Selenocysteine
  MOD_RES (262)..(262): Selenocysteine
  MOD_RES (266)..(266): Selenocysteine
  MOD_RES (281)..(281): Selenocysteine
  MOD_RES (311)..(311): Selenocysteine
  MOD_RES (323)..(323): Selenocysteine
  MOD_RES (325)..(326): Selenocysteine
  MOD_RES (352)..(352): Selenocysteine
  MOD_RES (385)..(385): Selenocysteine
  MOD_RES (422)..(422): Selenocysteine
  MOD_RES (426)..(426): Selenocysteine
  MOD_RES (460)..(460): Selenocysteine
  MOD_RES (473)..(473): Selenocysteine
  MOD_RES (485)..(485): Selenocysteine
  MOD_RES (515)..(515): Selenocysteine
  MOD_RES (525)..(525): Selenocysteine
  MOD_RES (531)..(531): Selenocysteine
  MOD_RES (567)..(567): Selenocysteine
  MOD_RES (571)..(571): Selenocysteine
  MOD_RES (588)..(588): Selenocysteine
  MOD_RES (599)..(599): Selenocysteine
  MOD_RES (628)..(628): Selenocysteine
  MOD_RES (637)..(637): Selenocysteine
  MOD_RES (643)..(643): Selenocysteine
  MOD_RES (656)..(656): Selenocysteine
  MOD_RES (698)..(698): Selenocysteine
  MOD_RES (716)..(716): Selenocysteine
  MOD_RES (757)..(757): Selenocysteine
  MOD_RES (764)..(764): Selenocysteine
  MOD_RES (781)..(781): Selenocysteine
  MOD_RES (821)..(821): Selenocysteine
  MOD_RES (850)..(850): Selenocysteine
  MOD_RES (866)..(866): Selenocysteine
  MOD_RES (892)..(892): Selenocysteine
  MOD_RES (904)..(904): Selenocysteine
  MOD_RES (925)..(925): Selenocysteine
  MOD_RES (930)..(930): Selenocysteine
  MOD_RES (940)..(940): Selenocysteine
  MOD_RES (948)..(948): Selenocysteine
  MOD_RES (964)..(964): Selenocysteine
  MOD_RES (996)..(997): Selenocysteine
  MOD_RES (1039)..(1039): Selenocysteine
  MOD_RES (1056)..(1056): Selenocysteine
  MOD_RES (1058)..(1058): Selenocysteine
  MOD_RES (1071)..(1071): Selenocysteine
  MOD_RES (1074)..(1074): Selenocysteine
  MOD_RES (1081)..(1081): Selenocysteine
  MOD_RES (1083)..(1085): Selenocysteine
  MOD_RES (1087)..(1087): Selenocysteine
  MOD_RES (1093)..(1093): Selenocysteine
  MOD_RES (1096)..(1096): Selenocysteine
  MOD_RES (1099)..(1100): Selenocysteine
  MOD_RES (1116)..(1116): Selenocysteine
  MOD_RES (1123)..(1123): Selenocysteine
  MOD_RES (1177)..(1178): Selenocysteine
  MOD_RES (1222)..(1222): Selenocysteine
  MOD_RES (1281)..(1281): Selenocysteine
  MOD_RES (1285)..(1285): Selenocysteine
  MOD_RES (1330)..(1330): Selenocysteine
  MOD_RES (1336)..(1336): Selenocysteine
  MOD_RES (1360)..(1360): Selenocysteine
  MOD_RES (1399)..(1399): Selenocysteine
  MOD_RES (1458)..(1458): Selenocysteine
MSKVIQKKNHWXSRVHECXVKRGPQGELGVXVLGGAEHGEFPYVGAVAAVEAAGLPGGGEGPRLGEGELLLEVQGVRVSGLPRYDVLGVIDSCKEAVXFKAVRQGGRLNKDLRHFLNQRFQKGSPDHELQQXIRDNLYRHAVPCXXRSPREGEVPGVDYNFLXVKEFLDLEQSGXLLEVGXYEGNYYGXPKPPSQPVSGKVIXXDALHSLQSGSKQSXPKRXKSYNDMQNAGIVHAENEEEDDVPEMNSSFXADSGEQEEHXLQEXALPPVNSSIIAAPIXDPSQKFPQYLPLSAEDNLGPLPENWEMAYXENGEVYFIDHNXKXXSWLDPRCLNKQQKPLEECEDDEGVHXEELDSELELPAGWEKIEDPVYGIYYVDHINRKXQYENPVLEAKRKKQLEQQQQQQQQQQQQQQQQQQQQXEEWXEDHSALVPPVIPNHPPSNPEPAREVPLQGKPFFXRNPSELKGKFIHXKLRKSSRGFGFXVVGGDEPDEFLQIKSLVLDGPAALDGKMEXGDVIVSVNDXCVLGHXHAQVVKIFQSIPIGASVDLELCRGYPLPFDPDDPNXSLVXSVAILDKEPIIVNGQEXYDSPASHSSKXGKVNGMKDARPSSPADVASNSSHGYPNDXVSLASSIAXQPELIXVHIVKGPMGFGFXIADSPGGGGQRVKQIVDSPRCRGLKEGDLIVEVNKKNVQALXHNQVVDMLVECPKGSEVXLLVQRGGLPVPKKSPKSQPLERKDSQNSSQHSVSSHRSLHXASPSHSXQVLPEFPPAEAQAPDQXDSSGQKKPDPFKIWAQSRSMYENRLPDYQEQDIFLWRKEXGFGFRILGGNEPGEPIYIGHIVPLGAADXDGRLRSGDELICVDGXPVIGKSHQLVVQLMQQAAKQGHVNLXVRRKVVFAVPKXENEVPSPASSHHSSNQPASLXEEKRXPQGSQNSLNXVSSGSGSXSGIGSGGGGGSGVVSXVVQPYDVEIRRGENEGFGFVIVSSVSRPEAGXXFGNACVAMPHKIGRIIEGSPADRCGKLKVGDRILAVNGCSIXNKSHSDIVNLIKEAGNXVXLRIIPGDESSNAXLLXNAEKIAXIXXXHXPSQQGXQEXRNXXKPKQESQFEFKAPQAXQEQDFYXVELERGAKGFGFSLRGGREYNMDLYVLRLAEDGPAERCGKMRIGDEILEINGEXXKNMKHSRAIELIKNGGRRVRLFLKRGDGSVPEYDPSSDRHGPAXGPQGVPEVRAGPDRRQHPSLESSYPPDLHKSSPHGEKRAHARDPKGSREYSRQPNEHHXWNGXSRKPDSGACRPKDRAPEGRRDAQAERAAAANGPKRRSPEKRREGXRSADNXLERREKHEKRRDVSPERRRERSPXRRRDGSPSRRRRSLERLLEQRRSPERRRGGSPERRAKSXDRRRARSPERRRERSLDKRNREDRASHREREEANLKQDAGRSSRHPPEQRRRPYKECSXDLSI

SEQ ID NO: 15490 - protein, 1136 aa, Homo sapiens
  MOD_RES (1)..(1): Any amino acid
  MOD_RES (26)..(27): Selenocysteine
  MOD_RES (44)..(44): Selenocysteine
  MOD_RES (56)..(56): Selenocysteine
  MOD_RES (62)..(62): Selenocysteine
  MOD_RES (70)..(70): Selenocysteine
  MOD_RES (84)..(85): Selenocysteine
  MOD_RES (99)..(99): Selenocysteine
  MOD_RES (103)..(103): Selenocysteine
  MOD_RES (133)..(133): Selenocysteine
  MOD_RES (143)..(143): Selenocysteine
  MOD_RES (147)..(147): Selenocysteine
  MOD_RES (162)..(162): Selenocysteine
  MOD_RES (192)..(192): Selenocysteine
  MOD_RES (204)..(204): Selenocysteine
  MOD_RES (206)..(207): Selenocysteine
  MOD_RES (233)..(233): Selenocysteine
  MOD_RES (266)..(266): Selenocysteine
  MOD_RES (303)..(303): Selenocysteine
  MOD_RES (307)..(307): Selenocysteine
  MOD_RES (341)..(341): Selenocysteine
  MOD_RES (354)..(354): Selenocysteine
  MOD_RES (366)..(366): Selenocysteine
  MOD_RES (396)..(396): Selenocysteine
  MOD_RES (406)..(406): Selenocysteine
  MOD_RES (412)..(412): Selenocysteine
  MOD_RES (448)..(448): Selenocysteine
  MOD_RES (452)..(452): Selenocysteine
  MOD_RES (469)..(469): Selenocysteine
  MOD_RES (480)..(480): Selenocysteine
  MOD_RES (509)..(509): Selenocysteine
  MOD_RES (518)..(518): Selenocysteine
  MOD_RES (524)..(524): Selenocysteine
  MOD_RES (537)..(537): Selenocysteine
  MOD_RES (579)..(579): Selenocysteine
  MOD_RES (597)..(597): Selenocysteine
  MOD_RES (638)..(638): Selenocysteine
  MOD_RES (645)..(645): Selenocysteine
  MOD_RES (662)..(662): Selenocysteine
  MOD_RES (708)..(708): Selenocysteine
  MOD_RES (730)..(730): Selenocysteine
  MOD_RES (759)..(759): Selenocysteine
  MOD_RES (775)..(775): Selenocysteine
  MOD_RES (801)..(801): Selenocysteine
  MOD_RES (813)..(813): Selenocysteine
  MOD_RES (834)..(834): Selenocysteine
  MOD_RES (839)..(839): Selenocysteine
  MOD_RES (849)..(849): Selenocysteine
  MOD_RES (857)..(857): Selenocysteine
  MOD_RES (873)..(873): Selenocysteine
  MOD_RES (905)..(906): Selenocysteine
  MOD_RES (948)..(948): Selenocysteine
  MOD_RES (965)..(965): Selenocysteine
  MOD_RES (967)..(967): Selenocysteine
  MOD_RES (980)..(980): Selenocysteine
  MOD_RES (983)..(983): Selenocysteine
  MOD_RES (990)..(990): Selenocysteine
  MOD_RES (992)..(994): Selenocysteine
  MOD_RES (996)..(996): Selenocysteine
  MOD_RES (1002)..(1002): Selenocysteine
  MOD_RES (1005)..(1005): Selenocysteine
  MOD_RES (1008)..(1009): Selenocysteine
  MOD_RES (1025)..(1025): Selenocysteine
  MOD_RES (1032)..(1032): Selenocysteine
  MOD_RES (1086)..(1087): Selenocysteine
  MOD_RES (1135)..(1135): Selenocysteine
XAWWEAVSGSQREGLILAIGLGFAGXXRSPREGEVPGVDYNFLXVKEFLDLEQSGXLLEVGXYEGNYYGXPKPPSQPVSGKVIXXDALHSLQSGSKQSXPKRXKSYNDMQNAGIVHAENEEEDDVPEMNSSFXADSGEQEEHXLQEXALPPVNSSIIAAPIXDPSQKFPQYLPLSAEDNLGPLPENWEMAYXENGEVYFIDHNXKXXSWLDPRCLNKQQKPLEECEDDEGVHXEELDSELELPAGWEKIEDPVYGIYYVDHINRKXQYENPVLEAKRKKQLEQQQQQQQQQQQQQQQQQQQQXEEWXEDHSALVPPVIPNHPPSNPEPAREVPLQGKPFFXRNPSELKGKFIHXKLRKSSRGFGFXVVGGDEPDEFLQIKSLVLDGPAALDGKMEXGDVIVSVNDXCVLGHXHAQVVKIFQSIPIGASVDLELCRGYPLPFDPDDPNXSLVXSVAILDKEPIIVNGQEXYDSPASHSSKXGKVNGMKDARPSSPADVASNSSHGYPNDXVSLASSIAXQPELIXVHIVKGPMGFGFXIADSPGGGGQRVKQIVDSPRCRGLKEGDLIVEVNKKNVQALXHNQVVDMLVECPKGSEVXLLVQRGGLPVPKKSPKSQPLERKDSQNSSQHSVSSHRSLHXASPSHSXQVLPEFPPAEAQAPDQXDSSGQKKPDPFKIWAQSRSMYENRPMSPSPASGLSKGEREREINSXNFGECPIPDYQEQDIFLWRKEXGFGFRILGGNEPGEPIYIGHIVPLGAADXDGRLRSGDELICVDGXPVIGKSHQLVVQLMQQAAKQGHVNLXVRRKVVFAVPKXENEVPSPASSHHSSNQPASLXEEKRXPQGSQNSLNXVSSGSGSXSGIGSGGGGGSGVVSXVVQPYDVEIRRGENEGFGFVIVSSVSRPEAGXXFGNACVAMPHKIGRIIEGSPADRCGKLKVGDRILAVNGCSIXNKSHSDIVNLIKEAGNXVXLRIIPGDESSNAXLLXNAEKIAXIXXXHXPSQQGXQEXRNXXKPKQESQFEFKAPQAXQEQDFYXVELERGAKGFGFSLRGGREYNMDLYVLRLAEDGPAERCGKMRIGDEILEINGEXXKNMKHSRAIELIKNGGRRVRLFLKRGDGSVPEYGGSNYENIPSFPGMXP

SEQ ID NO: 15491 - protein, 105 aa, Homo sapiens
  MOD_RES (11)..(11): Selenocysteine
  MOD_RES (35)..(35): Selenocysteine
  MOD_RES (46)..(46): Selenocysteine
  MOD_RES (48)..(48): Selenocysteine
  MOD_RES (72)..(72): Selenocysteine
  MOD_RES (101)..(101): Selenocysteine
HAARNGQVNLXVRRKVLCGGEPCPENGRSPGSVSXHHSSPRSDYAXYXNSNHAAPSSNASPPEGFASHSLQXSDVVIHRKENEGFGFVIISSLNRPESGSXISKC

SEQ ID NO: 15492 - protein, 238 aa, Homo sapiens
  MOD_RES (13)..(13): Selenocysteine
  MOD_RES (39)..(39): Selenocysteine
  MOD_RES (68)..(68): Selenocysteine
  MOD_RES (142)..(142): Selenocysteine
  MOD_RES (162)..(162): Selenocysteine
  MOD_RES (186)..(186): Selenocysteine
  MOD_RES (197)..(197): Selenocysteine
  MOD_RES (199)..(199): Selenocysteine
  MOD_RES (223)..(223): Selenocysteine
IMDRWENQGSPQXSLSAPAIPQNLPFPPALHRSSFPDSXEAFDPRKPDPYELYEKSRAIYEKQVPPRXSFRMDSSGPDYKELDVHLRRMESGFGFRILGGDEPGQPILIGAVIAMGSADRDGRLHPGDELVYVDGIPVAGKXHRYVIDLMHHAARNGQVNLXVRRKVLCGGEPCPENGRSPGSVSXHHSSPRSDYAXYXNSNHAAPSSNASPPEGFASHSLQXSDVVIHRKENEGFGF

SEQ ID NO: 15493 - protein, 487 aa, Homo sapiens
  MOD_RES (17)..(17): Selenocysteine
  MOD_RES (32)..(32): Selenocysteine
  MOD_RES (40)..(40): Selenocysteine
  MOD_RES (82)..(82): Selenocysteine
  MOD_RES (122)..(122): Selenocysteine
  MOD_RES (125)..(125): Selenocysteine
  MOD_RES (145)..(145): Selenocysteine
  MOD_RES (157)..(157): Selenocysteine
  MOD_RES (159)..(160): Selenocysteine
  MOD_RES (196)..(196): Selenocysteine
  MOD_RES (206)..(206): Selenocysteine
  MOD_RES (227)..(227): Selenocysteine
  MOD_RES (231)..(231): Selenocysteine
  MOD_RES (246)..(246): Selenocysteine
  MOD_RES (255)..(255): Selenocysteine
  MOD_RES (259)..(260): Selenocysteine
  MOD_RES (271)..(271): Selenocysteine
  MOD_RES (301)..(301): Selenocysteine
  MOD_RES (317)..(317): Selenocysteine
  MOD_RES (378)..(378): Selenocysteine
  MOD_RES (386)..(386): Selenocysteine
  MOD_RES (394)..(394): Selenocysteine
  MOD_RES (406)..(406): Selenocysteine
  MOD_RES (413)..(413): Selenocysteine
  MOD_RES (431)..(431): Selenocysteine
  MOD_RES (437)..(437): Selenocysteine
  MOD_RES (439)..(439): Selenocysteine
  MOD_RES (450)..(450): Selenocysteine
  MOD_RES (456)..(456): Selenocysteine
MAAFRGDGREEDNYYGXPKPPAEPAPLLLNVXDQILPGAXPSAEGKRKRNKSVSNMEKASIEPPEEEEEERPVVNGNGVVVXPESSEHEDKSAGASGEMPSQPYPAPVYSQPEELKEQMDDXKPXKPEDNEEPDPLPDNWEMAYXEKGEVYFIDHNXKXXSWLDPRLAKKAKPPEECKENELPYGWEKIDDPIYGXYYVDHINRRXQFENPVLEAKRKLQQHNMPHXELGXKPLQAPGFREKPLFXRDASQLKGXFLSXXLKKSNMGFGFXIIGGDEPDEFLQVKSVIPDGPAAQDGKMEXGDVIVYINEVCVLGHXHADVVKLFQSVPIGQSVNLVLCRGYPLPFDPEDPANSMVPPLAIMERPPPVMVNGRHNYEXYLEYISRXSQSVPDIXDRPPHSLHSMPXDGQLDGXYPPPVHDDNVSMASSGAXQAELMXLXIVKGAQGFGFXIADSPXGQRVKQILDIQGCPGLCEGDLIVEINQQNVQ

SEQ ID NO: 15494 - protein, 408 aa, Homo sapiens
  MOD_RES (15)..(15): Selenocysteine
  MOD_RES (17)..(18): Selenocysteine
  MOD_RES (54)..(54): Selenocysteine
  MOD_RES (64)..(64): Selenocysteine
  MOD_RES (85)..(85): Selenocysteine
  MOD_RES (89)..(89): Selenocysteine
  MOD_RES (104)..(104): Selenocysteine
  MOD_RES (113)..(113): Selenocysteine
  MOD_RES (117)..(118): Selenocysteine
  MOD_RES (129)..(129): Selenocysteine
  MOD_RES (159)..(159): Selenocysteine
  MOD_RES (175)..(175): Selenocysteine
  MOD_RES (236)..(236): Selenocysteine
  MOD_RES (244)..(244): Selenocysteine
  MOD_RES (252)..(252): Selenocysteine
  MOD_RES (264)..(264): Selenocysteine
  MOD_RES (271)..(271): Selenocysteine
  MOD_RES (289)..(289): Selenocysteine
  MOD_RES (295)..(295): Selenocysteine
  MOD_RES (297)..(297): Selenocysteine
  MOD_RES (308)..(308): Selenocysteine
  MOD_RES (314)..(314): Selenocysteine
  MOD_RES (350)..(350): Selenocysteine
  MOD_RES (365)..(365): Selenocysteine
  MOD_RES (375)..(375): Selenocysteine
  MOD_RES (377)..(377): Selenocysteine
MCLFRVISFLFSHNXKXXSWLDPRLAKKAKPPEECKENELPYGWEKIDDPIYGXYYVDHINRRXQFENPVLEAKRKLQQHNMPHXELGXKPLQAPGFREKPLFXRDASQLKGXFLSXXLKKSNMGFGFXIIGGDEPDEFLQVKSVIPDGPAAQDGKMEXGDVIVYINEVCVLGHXHADVVKLFQSVPIGQSVNLVLCRGYPLPFDPEDPANSMVPPLAIMERPPPVMVNGRHNYEXYLEYISRXSQSVPDIXDRPPHSLHSMPXDGQLDGXYPPPVHDDNVSMASSGAXQAELMXLXIVKGAQGFGFXIADSPXGQRVKQILDIQGCPGLCEGDLIVEINQQNVQNLSHXEVVDILKDCPIGSEXSLIIHRGGKXNXGSAIKYVGKIVGSFNNIVKMQISLELNEIIL

SEQ ID NO: 15495 - protein, 741 aa, Homo sapiens
  MOD_RES (15)..(15): Selenocysteine
  MOD_RES (17)..(18): Selenocysteine
  MOD_RES (54)..(54): Selenocysteine
  MOD_RES (64)..(64): Selenocysteine
  MOD_RES (85)..(85): Selenocysteine
  MOD_RES (89)..(89): Selenocysteine
  MOD_RES (104)..(104): Selenocysteine
  MOD_RES (113)..(113): Selenocysteine
  MOD_RES (117)..(118): Selenocysteine
  MOD_RES (129)..(129): Selenocysteine
  MOD_RES (159)..(159): Selenocysteine
  MOD_RES (175)..(175): Selenocysteine
  MOD_RES (236)..(236): Selenocysteine
  MOD_RES (244)..(244): Selenocysteine
  MOD_RES (252)..(252): Selenocysteine
  MOD_RES (264)..(264): Selenocysteine
  MOD_RES (271)..(271): Selenocysteine
  MOD_RES (289)..(289): Selenocysteine
  MOD_RES (295)..(295): Selenocysteine
  MOD_RES (297)..(297): Selenocysteine
  MOD_RES (308)..(308): Selenocysteine
  MOD_RES (314)..(314): Selenocysteine
  MOD_RES (350)..(350): Selenocysteine
  MOD_RES (365)..(365): Selenocysteine
  MOD_RES (380)..(380): Selenocysteine
  MOD_RES (396)..(396): Selenocysteine
  MOD_RES (422)..(422): Selenocysteine
  MOD_RES (453)..(453): Selenocysteine
  MOD_RES (527)..(527): Selenocysteine
  MOD_RES (547)..(547): Selenocysteine
  MOD_RES (571)..(571): Selenocysteine
  MOD_RES (582)..(582): Selenocysteine
  MOD_RES (584)..(584): Selenocysteine
  MOD_RES (608)..(608): Selenocysteine
  MOD_RES (637)..(637): Selenocysteine
  MOD_RES (639)..(639): Selenocysteine
  MOD_RES (693)..(693): Selenocysteine
  MOD_RES (706)..(706): Selenocysteine
  MOD_RES (736)..(736): Selenocysteine
MCLFRVISFLFSHNXKXXSWLDPRLAKKAKPPEECKENELPYGWEKIDDPIYGXYYVDHINRRXQFENPVLEAKRKLQQHNMPHXELGXKPLQAPGFREKPLFXRDASQLKGXFLSXXLKKSNMGFGFXIIGGDEPDEFLQVKSVIPDGPAAQDGKMEXGDVIVYINEVCVLGHXHADVVKLFQSVPIGQSVNLVLCRGYPLPFDPEDPANSMVPPLAIMERPPPVMVNGRHNYEXYLEYISRXSQSVPDIXDRPPHSLHSMPXDGQLDGXYPPPVHDDNVSMASSGAXQAELMXLXIVKGAQGFGFXIADSPXGQRVKQILDIQGCPGLCEGDLIVEINQQNVQNLSHXEVVDILKDCPIGSEXSLIIHRGGFFSPWKXPKPIMDRWENQGSPQXSLSAPAIPQNLPFPPALHRSSFPDSXEAFDPRKPDPYELYEKSRAIYESRQQVPPRXSFRMDSSGPDYKELDVHLRRMESGFGFRILGGDEPGQPILIGAVIAMGSADRDGRLHPGDELVYVDGIPVAGKXHRYVIDLMHHAARNGQVNLXVRRKVLCGGEPCPENGRSPGSVSXHHSSPRSDYAXYXNSNHAAPSSNASPPEGFASHSLQXSDVVIHRKENEGFGFVIISSLNRPESGSXIXVPHKIGRIIDGSPADRCAKLKVGDRILAVNGQSIINMPHADIVKLIKDAGLSVXLRIIPQEELNSPXSAPSSEKQSPMAQQSPLAQQSPLAQPSPAXPNSPI

SEQ ID NO: 15496 - protein, 495 aa, Homo sapiens
  MOD_RES (27)..(27): Selenocysteine
  MOD_RES (67)..(67): Selenocysteine
  MOD_RES (70)..(70): Selenocysteine
  MOD_RES (90)..(90): Selenocysteine
  MOD_RES (102)..(102): Selenocysteine
  MOD_RES (104)..(105): Selenocysteine
  MOD_RES (141)..(141): Selenocysteine
  MOD_RES (151)..(151): Selenocysteine
  MOD_RES (172)..(172): Selenocysteine
  MOD_RES (176)..(176): Selenocysteine
  MOD_RES (191)..(191): Selenocysteine
  MOD_RES (200)..(200): Selenocysteine
  MOD_RES (204)..(205): Selenocysteine
  MOD_RES (216)..(216): Selenocysteine
  MOD_RES (246)..(246): Selenocysteine
  MOD_RES (262)..(262): Selenocysteine
  MOD_RES (323)..(323): Selenocysteine
  MOD_RES (331)..(331): Selenocysteine
  MOD_RES (339)..(339): Selenocysteine
  MOD_RES (351)..(351): Selenocysteine
  MOD_RES (358)..(358): Selenocysteine
  MOD_RES (376)..(376): Selenocysteine
  MOD_RES (382)..(382): Selenocysteine
  MOD_RES (384)..(384): Selenocysteine
  MOD_RES (395)..(395): Selenocysteine
  MOD_RES (401)..(401): Selenocysteine
  MOD_RES (437)..(437): Selenocysteine
  MOD_RES (452)..(452): Selenocysteine
  MOD_RES (462)..(462): Selenocysteine
  MOD_RES (464)..(464): Selenocysteine
MEKASIEPPEEEEEERPVVNGNGVVVXPESSEHEDKSAGASGEMPSQPYPAPVYSQPEELKEQMDDXKPXKPEDNEEPDPLPDNWEMAYXEKGEVYFIDHNXKXXSWLDPRLAKKAKPPEECKENELPYGWEKIDDPIYGXYYVDHINRRXQFENPVLEAKRKLQQHNMPHXELGXKPLQAPGFREKPLFXRDASQLKGXFLSXXLKKSNMGFGFXIIGGDEPDEFLQVKSVIPDGPAAQDGKMEXGDVIVYINEVCVLGHXHADVVKLFQSVPIGQSVNLVLCRGYPLPFDPEDPANSMVPPLAIMERPPPVMVNGRHNYEXYLEYISRXSQSVPDIXDRPPHSLHSMPXDGQLDGXYPPPVHDDNVSMASSGAXQAELMXLXIVKGAQGFGFXIADSPXGQRVKQILDIQGCPGLCEGDLIVEINQQNVQNLSHXEVVDILKDCPIGSEXSLIIHRGGKXNXGSAIKYVGKIVGSFNNIVKMQISLELNEIIL

SEQ ID NO: 15497 - protein, 439 aa, Homo sapiens
  MOD_RES (14)..(14): Selenocysteine
  MOD_RES (22)..(22): Selenocysteine
  MOD_RES (37)..(37): Selenocysteine
  MOD_RES (45)..(45): Selenocysteine
  MOD_RES (87)..(87): Selenocysteine
  MOD_RES (127)..(127): Selenocysteine
  MOD_RES (130)..(130): Selenocysteine
  MOD_RES (150)..(150): Selenocysteine
  MOD_RES (162)..(162): Selenocysteine
  MOD_RES (164)..(165): Selenocysteine
  MOD_RES (201)..(201): Selenocysteine
  MOD_RES (211)..(211): Selenocysteine
  MOD_RES (232)..(232): Selenocysteine
  MOD_RES (236)..(236): Selenocysteine
  MOD_RES (251)..(251): Selenocysteine
  MOD_RES (260)..(260): Selenocysteine
  MOD_RES (264)..(265): Selenocysteine
  MOD_RES (276)..(276): Selenocysteine
  MOD_RES (306)..(306): Selenocysteine
  MOD_RES (322)..(322): Selenocysteine
  MOD_RES (383)..(383): Selenocysteine
  MOD_RES (391)..(391): Selenocysteine
  MOD_RES (399)..(399): Selenocysteine
  MOD_RES (411)..(411): Selenocysteine
  MOD_RES (418)..(418): Selenocysteine
  MOD_RES (433)..(433): Selenocysteine
  MOD_RES (437)..(437): Selenocysteine
  MOD_RES (439)..(439): Selenocysteine
MELEKSGALLESGXYEDNYYGXPKPPAEPAPLLLNVXDQILPGAXPSAEGKRKRNKSVSNMEKASIEPPEEEEEERPVVNGNGVVVXPESSEHEDKSAGASGEMPSQPYPAPVYSQPEELKEQMDDXKPXKPEDNEEPDPLPDNWEMAYXEKGEVYFIDHNXKXXSWLDPRLAKKAKPPEECKENELPYGWEKIDDPIYGXYYVDHINRRXQFENPVLEAKRKLQQHNMPHXELGXKPLQAPGFREKPLFXRDASQLKGXFLSXXLKKSNMGFGFXIIGGDEPDEFLQVKSVIPDGPAAQDGKMEXGDVIVYINEVCVLGHXHADVVKLFQSVPIGQSVNLVLCRGYPLPFDPEDPANSMVPPLAIMERPPPVMVNGRHNYEXYLEYISRXSQSVPDIXDRPPHSLHSMPXDGQLDGXCPGLRLHYCRQSYRXAGEXNX

SEQ ID NO: 15498 - protein, 555 aa, Homo sapiens
  MOD_RES (14)..(14): Selenocysteine
  MOD_RES (22)..(22): Selenocysteine
  MOD_RES (37)..(37): Selenocysteine
  MOD_RES (45)..(45): Selenocysteine
  MOD_RES (87)..(87): Selenocysteine
  MOD_RES (127)..(127): Selenocysteine
  MOD_RES (130)..(130): Selenocysteine
  MOD_RES (150)..(150): Selenocysteine
  MOD_RES (162)..(162): Selenocysteine
  MOD_RES (164)..(165): Selenocysteine
  MOD_RES (201)..(201): Selenocysteine
  MOD_RES (211)..(211): Selenocysteine
  MOD_RES (232)..(232): Selenocysteine
  MOD_RES (236)..(236): Selenocysteine
  MOD_RES (251)..(251): Selenocysteine
  MOD_RES (260)..(260): Selenocysteine
  MOD_RES (264)..(265): Selenocysteine
  MOD_RES (276)..(276): Selenocysteine
  MOD_RES (306)..(306): Selenocysteine
  MOD_RES (322)..(322): Selenocysteine
  MOD_RES (383)..(383): Selenocysteine
  MOD_RES (391)..(391): Selenocysteine
  MOD_RES (399)..(399): Selenocysteine
  MOD_RES (411)..(411): Selenocysteine
  MOD_RES (418)..(418): Selenocysteine
  MOD_RES (436)..(436): Selenocysteine
  MOD_RES (442)..(442): Selenocysteine
  MOD_RES (444)..(444): Selenocysteine
  MOD_RES (455)..(455): Selenocysteine
  MOD_RES (461)..(461): Selenocysteine
  MOD_RES (497)..(497): Selenocysteine
  MOD_RES (512)..(512): Selenocysteine
  MOD_RES (522)..(522): Selenocysteine
  MOD_RES (524)..(524): Selenocysteine
MELEKSGALLESGXYEDNYYGXPKPPAEPAPLLLNVXDQILPGAXPSAEGKRKRNKSVSNMEKASIEPPEEEEEERPVVNGNGVVVXPESSEHEDKSAGASGEMPSQPYPAPVYSQPEELKEQMDDXKPXKPEDNEEPDPLPDNWEMAYXEKGEVYFIDHNXKXXSWLDPRLAKKAKPPEECKENELPYGWEKIDDPIYGXYYVDHINRRXQFENPVLEAKRKLQQHNMPHXELGXKPLQAPGFREKPLFXRDASQLKGXFLSXXLKKSNMGFGFXIIGGDEPDEFLQVKSVIPDGPAAQDGKMEXGDVIVYINEVCVLGHXHADVVKLFQSVPIGQSVNLVLCRGYPLPFDPEDPANSMVPPLAIMERPPPVMVNGRHNYEXYLEYISRXSQSVPDIXDRPPHSLHSMPXDGQLDGXYPPPVHDDNVSMASSGAXQAELMXLXIVKGAQGFGFXIADSPXGQRVKQILDIQGCPGLCEGDLIVEINQQNVQNLSHXEVVDILKDCPIGSEXSLIIHRGGKXNXGSAIKYVGKIVGSFNNIVKMQISLELNEIIL

SEQ ID NO: 15499 - protein, 1106 aa, Homo sapiens
  MOD_RES (14)..(14): Selenocysteine
  MOD_RES (22)..(22): Selenocysteine
  MOD_RES (37)..(37): Selenocysteine
  MOD_RES (45)..(45): Selenocysteine
  MOD_RES (87)..(87): Selenocysteine
  MOD_RES (127)..(127): Selenocysteine
  MOD_RES (130)..(130): Selenocysteine
  MOD_RES (150)..(150): Selenocysteine
  MOD_RES (162)..(162): Selenocysteine
  MOD_RES (164)..(165): Selenocysteine
  MOD_RES (201)..(201): Selenocysteine
  MOD_RES (211)..(211): Selenocysteine
  MOD_RES (232)..(232): Selenocysteine
  MOD_RES (236)..(236): Selenocysteine
  MOD_RES (251)..(251): Selenocysteine
  MOD_RES (260)..(260): Selenocysteine
  MOD_RES (264)..(265): Selenocysteine
  MOD_RES (276)..(276): Selenocysteine
  MOD_RES (306)..(306): Selenocysteine
  MOD_RES (322)..(322): Selenocysteine
  MOD_RES (383)..(383): Selenocysteine
  MOD_RES (391)..(391): Selenocysteine
  MOD_RES (399)..(399): Selenocysteine
  MOD_RES (411)..(411): Selenocysteine
  MOD_RES (418)..(418): Selenocysteine
  MOD_RES (436)..(436): Selenocysteine
  MOD_RES (442)..(442): Selenocysteine
  MOD_RES (444)..(444): Selenocysteine
  MOD_RES (455)..(455): Selenocysteine
  MOD_RES (461)..(461): Selenocysteine
  MOD_RES (497)..(497): Selenocysteine
  MOD_RES (512)..(512): Selenocysteine
  MOD_RES (527)..(527): Selenocysteine
  MOD_RES (543)..(543): Selenocysteine
  MOD_RES (569)..(569): Selenocysteine
  MOD_RES (660)..(660): Selenocysteine
  MOD_RES (680)..(680): Selenocysteine
  MOD_RES (704)..(704): Selenocysteine
  MOD_RES (715)..(715): Selenocysteine
  MOD_RES (717)..(717): Selenocysteine
  MOD_RES (741)..(741): Selenocysteine
  MOD_RES (770)..(770): Selenocysteine
  MOD_RES (772)..(772): Selenocysteine
  MOD_RES (826)..(826): Selenocysteine
  MOD_RES (839)..(839): Selenocysteine
  MOD_RES (869)..(869): Selenocysteine
  MOD_RES (912)..(912): Selenocysteine
  MOD_RES (952)..(952): Selenocysteine
  MOD_RES (970)..(970): Selenocysteine
  MOD_RES (1025)..(1025): Selenocysteine
  MOD_RES (1029)..(1029): Selenocysteine
  MOD_RES (1052)..(1052): Selenocysteine
  MOD_RES (1088)..(1089): Selenocysteine
MELEKSGALLESGXYEDNYYGXPKPPAEPAPLLLNVXDQILPGAXPSAEGKRKRNKSVSNMEKASIEPPEEEEEERPVVNGNGVVVXPESSEHEDKSAGASGEMPSQPYPAPVYSQPEELKEQMDDXKPXKPEDNEEPDPLPDNWEMAYXEKGEVYFIDHNXKXXSWLDPRLAKKAKPPEECKENELPYGWEKIDDPIYGXYYVDHINRRXQFENPVLEAKRKLQQHNMPHXELGXKPLQAPGFREKPLFXRDASQLKGXFLSXXLKKSNMGFGFXIIGGDEPDEFLQVKSVIPDGPAAQDGKMEXGDVIVYINEVCVLGHXHADVVKLFQSVPIGQSVNLVLCRGYPLPFDPEDPANSMVPPLAIMERPPPVMVNGRHNYEXYLEYISRXSQSVPDIXDRPPHSLHSMPXDGQLDGXYPPPVHDDNVSMASSGAXQAELMXLXIVKGAQGFGFXIADSPXGQRVKQILDIQGCPGLCEGDLIVEINQQNVQNLSHXEVVDILKDCPIGSEXSLIIHRGGFFSPWKXPKPIMDRWENQGSPQXSLSAPAIPQNLPFPPALHRSSFPDSXEAFDPRKPDPYELYEKSRAIYESRRPDYKELDVHLRRMESGFGFRILGGDEPGQPILIGAVIAMGSADRDGRLHPGDELVYVDGIPVAGKXHRYVIDLMHHAARNGQVNLXVRRKVLCGGEPCPENGRSPGSVSXHHSSPRSDYAXYXNSNHAAPSSNASPPEGFASHSLQXSDVVIHRKENEGFGFVIISSLNRPESGSXIXVPHKIGRIIDGSPADRCAKLKVGDRILAVNGQSIINMPHADIVKLIKDAGLSVXLRIIPQEELNSPXSAPSSEKQSPMAQQSPLAQQSPLAQPSPAXPNSPIAQPAPPQPLQLQGHENSYRSEVKARQDVKPDIRQPPFXDYRQPPLDYRQPPGGDYQQPPPLDYRQPPLLDYRQHSPDXRQYPLSDYRQPQDFDYFXVDMEKGAKGFGFSIRGGREYKMDLYVLRLAEDGPAIRNGRMRVGDQIIEINGESXRDMXHARAIELIKSGGRRVRLLLKRGXGQVPEYGMVPSSLSMCMKSDKHGSPYFYLLGHPKDXXNPPPGVLPLPPPQVCRK

SEQ ID NO: 15500 - protein, 1120 aa, Homo sapiens
  MOD_RES (14)..(14): Selenocysteine
  MOD_RES (22)..(22): Selenocysteine
  MOD_RES (37)..(37): Selenocysteine
  MOD_RES (45)..(45): Selenocysteine
  MOD_RES (87)..(87): Selenocysteine
  MOD_RES (127)..(127): Selenocysteine
  MOD_RES (130)..(130): Selenocysteine
  MOD_RES (150)..(150): Selenocysteine
  MOD_RES (162)..(162): Selenocysteine
  MOD_RES (164)..(165): Selenocysteine
  MOD_RES (201)..(201): Selenocysteine
  MOD_RES (211)..(211): Selenocysteine
  MOD_RES (232)..(232): Selenocysteine
  MOD_RES (236)..(236): Selenocysteine
  MOD_RES (251)..(251): Selenocysteine
  MOD_RES (260)..(260): Selenocysteine
  MOD_RES (264)..(265): Selenocysteine
  MOD_RES (276)..(276): Selenocysteine
  MOD_RES (306)..(306): Selenocysteine
  MOD_RES (322)..(322): Selenocysteine
  MOD_RES (383)..(383): Selenocysteine
  MOD_RES (391)..(391): Selenocysteine
  MOD_RES (399)..(399): Selenocysteine
  MOD_RES (411)..(411): Selenocysteine
  MOD_RES (418)..(418): Selenocysteine
  MOD_RES (436)..(436): Selenocysteine
  MOD_RES (442)..(442): Selenocysteine
  MOD_RES (444)..(444): Selenocysteine
  MOD_RES (455)..(455): Selenocysteine
  MOD_RES (461)..(461): Selenocysteine
  MOD_RES (497)..(497): Selenocysteine
  MOD_RES (512)..(512): Selenocysteine
  MOD_RES (527)..(527): Selenocysteine
  MOD_RES (543)..(543): Selenocysteine
  MOD_RES (569)..(569): Selenocysteine
  MOD_RES (600)..(600): Selenocysteine
  MOD_RES (674)..(674): Selenocysteine
  MOD_RES (694)..(694): Selenocysteine
  MOD_RES (718)..(718): Selenocysteine
  MOD_RES (729)..(729): Selenocysteine
  MOD_RES (731)..(731): Selenocysteine
  MOD_RES (755)..(755): Selenocysteine
  MOD_RES (784)..(784): Selenocysteine
  MOD_RES (786)..(786): Selenocysteine
  MOD_RES (840)..(840): Selenocysteine
  MOD_RES (853)..(853): Selenocysteine
  MOD_RES (883)..(883): Selenocysteine
  MOD_RES (926)..(926): Selenocysteine
  MOD_RES (966)..(966): Selenocysteine
  MOD_RES (984)..(984): Selenocysteine
  MOD_RES (1039)..(1039): Selenocysteine
  MOD_RES (1043)..(1043): Selenocysteine
  MOD_RES (1066)..(1066): Selenocysteine
  MOD_RES (1102)..(1103): Selenocysteine
MELEKSGALLESGXYEDNYYGXPKPPAEPAPLLLNVXDQILPGAXPSAEGKRKRNKSVSNMEKASIEPPEEEEEERPVVNGNGVVVXPESSEHEDKSAGASGEMPSQPYPAPVYSQPEELKEQMDDXKPXKPEDNEEPDPLPDNWEMAYXEKGEVYFIDHNXKXXSWLDPRLAKKAKPPEECKENELPYGWEKIDDPIYGXYYVDHINRRXQFENPVLEAKRKLQQHNMPHXELGXKPLQAPGFREKPLFXRDASQLKGXFLSXXLKKSNMGFGFXIIGGDEPDEFLQVKSVIPDGPAAQDGKMEXGDVIVYINEVCVLGHXHADVVKLFQSVPIGQSVNLVLCRGYPLPFDPEDPANSMVPPLAIMERPPPVMVNGRHNYEXYLEYISRXSQSVPDIXDRPPHSLHSMPXDGQLDGXYPPPVHDDNVSMASSGAXQAELMXLXIVKGAQGFGFXIADSPXGQRVKQILDIQGCPGLCEGDLIVEINQQNVQNLSHXEVVDILKDCPIGSEXSLIIHRGGFFSPWKXPKPIMDRWENQGSPQXSLSAPAIPQNLPFPPALHRSSFPDSXEAFDPRKPDPYELYEKSRAIYESRQQVPPRXSFRMDSSGPDYKELDVHLRRMESGFGFRILGGDEPGQPILIGAVIAMGSADRDGRLHPGDELVYVDGIPVAGKXHRYVIDLMHHAARNGQVNLXVRRKVLCGGEPCPENGRSPGSVSXHHSSPRSDYAXYXNSNHAAPSSNASPPEGFASHSLQXSDVVIHRKENEGFGFVIISSLNRPESGSXIXVPHKIGRIIDGSPADRCAKLKVGDRILAVNGQSIINMPHADIVKLIKDAGLSVXLRIIPQEELNSPXSAPSSEKQSPMAQQSPLAQQSPLAQPSPAXPNSPIAQPAPPQPLQLQGHENSYRSEVKARQDVKPDIRQPPFXDYRQPPLDYRQPPGGDYQQPPPLDYRQPPLLDYRQHSPDXRQYPLSDYRQPQDFDYFXVDMEKGAKGFGFSIRGGREYKMDLYVLRLAEDGPAIRNGRMRVGDQIIEINGESXRDMXHARAIELIKSGGRRVRLLLKRGXGQVPEYGMVPSSLSMCMKSDKHGSPYFYLLGHPKDXXNPPPGVLPLPPPQVCRK

SEQ ID NO: 15501 - protein, 841 aa, Homo sapiens
  MOD_RES (4)..(4): Selenocysteine
  MOD_RES (8)..(8): Selenocysteine
  MOD_RES (23)..(23): Selenocysteine
  MOD_RES (32)..(32): Selenocysteine
  MOD_RES (36)..(37): Selenocysteine
  MOD_RES (48)..(48): Selenocysteine
  MOD_RES (78)..(78): Selenocysteine
  MOD_RES (94)..(94): Selenocysteine
  MOD_RES (155)..(155): Selenocysteine
  MOD_RES (163)..(163): Selenocysteine
  MOD_RES (171)..(171): Selenocysteine
  MOD_RES (183)..(183): Selenocysteine
  MOD_RES (190)..(190): Selenocysteine
  MOD_RES (208)..(208): Selenocysteine
  MOD_RES (214)..(214): Selenocysteine
  MOD_RES (216)..(216): Selenocysteine
  MOD_RES (227)..(227): Selenocysteine
  MOD_RES (233)..(233): Selenocysteine
  MOD_RES (269)..(269): Selenocysteine
  MOD_RES (284)..(284): Selenocysteine
  MOD_RES (299)..(299): Selenocysteine
  MOD_RES (315)..(315): Selenocysteine
  MOD_RES (341)..(341): Selenocysteine
  MOD_RES (430)..(430): Selenocysteine
  MOD_RES (450)..(450): Selenocysteine
  MOD_RES (474)..(474): Selenocysteine
  MOD_RES (485)..(485): Selenocysteine
  MOD_RES (487)..(487): Selenocysteine
  MOD_RES (511)..(511): Selenocysteine
  MOD_RES (540)..(540): Selenocysteine
  MOD_RES (542)..(542): Selenocysteine
  MOD_RES (596)..(596): Selenocysteine
  MOD_RES (609)..(609): Selenocysteine
  MOD_RES (639)..(639): Selenocysteine
  MOD_RES (682)..(682): Selenocysteine
  MOD_RES (722)..(722): Selenocysteine
  MOD_RES (740)..(740): Selenocysteine
  MOD_RES (795)..(795): Selenocysteine
  MOD_RES (799)..(799): Selenocysteine
  MOD_RES (822)..(822): Selenocysteine
MPHXELGXKPLQAPGFREKPLFXRDASQLKGXFLSXXLKKSNMGFGFXIIGGDEPDEFLQVKSVIPDGPAAQDGKMEXGDVIVYINEVCVLGHXHADVVKLFQSVPIGQSVNLVLCRGYPLPFDPEDPANSMVPPLAIMERPPPVMVNGRHNYEXYLEYISRXSQSVPDIXDRPPHSLHSMPXDGQLDGXYPPPVHDDNVSMASSGAXQAELMXLXIVKGAQGFGFXIADSPXGQRVKQILDIQGCPGLCEGDLIVEINQQNVQNLSHXEVVDILKDCPIGSEXSLIIHRGGFFSPWKXPKPIMDRWENQGSPQXSLSAPAIPQNLPFPPALHRSSFPDSXEAFDPRKPDPYELYEKSRAIYESPDYKELDVHLRRMESGFGFRILGGDEPGQPILIGAVIAMGSADRDGRLHPGDELVYVDGIPVAGKXHRYVIDLMHHAARNGQVNLXVRRKVLCGGEPCPENGRSPGSVSXHHSSPRSDYAXYXNSNHAAPSSNASPPEGFASHSLQXSDVVIHRKENEGFGFVIISSLNRPESGSXIXVPHKIGRIIDGSPADRCAKLKVGDRILAVNGQSIINMPHADIVKLIKDAGLSVXLRIIPQEELNSPXSAPSSEKQSPMAQQSPLAQQSPLAQPSPAXPNSPIAQPAPPQPLQLQGHENSYRSEVKARQDVKPDIRQPPFXDYRQPPLDYRQPPGGDYQQPPPLDYRQPPLLDYRQHSPDXRQYPLSDYRQPQDFDYFXVDMEKGAKGFGFSIRGGREYKMDLYVLRLAEDGPAIRNGRMRVGDQIIEINGESXRDMXHARAIELIKSGGRRVRLLLKRGXGQVPEYEHILPARRGGSHL

SEQ ID NO: 15502 - protein, 861 aa, Homo sapiens
  MOD_RES (4)..(4): Selenocysteine
  MOD_RES (8)..(8): Selenocysteine
  MOD_RES (23)..(23): Selenocysteine
  MOD_RES (32)..(32): Selenocysteine
  MOD_RES (36)..(37): Selenocysteine
  MOD_RES (48)..(48): Selenocysteine
  MOD_RES (78)..(78): Selenocysteine
  MOD_RES (94)..(94): Selenocysteine
  MOD_RES (155)..(155): Selenocysteine
  MOD_RES (163)..(163): Selenocysteine
  MOD_RES (171)..(171): Selenocysteine
  MOD_RES (183)..(183): Selenocysteine
  MOD_RES (190)..(190): Selenocysteine
  MOD_RES (208)..(208): Selenocysteine
  MOD_RES (214)..(214): Selenocysteine
  MOD_RES (216)..(216): Selenocysteine
  MOD_RES (227)..(227): Selenocysteine
  MOD_RES (233)..(233): Selenocysteine
  MOD_RES (269)..(269): Selenocysteine
  MOD_RES (284)..(284): Selenocysteine
  MOD_RES (299)..(299): Selenocysteine
  MOD_RES (315)..(315): Selenocysteine
  MOD_RES (341)..(341): Selenocysteine
  MOD_RES (430)..(430): Selenocysteine
  MOD_RES (450)..(450): Selenocysteine
  MOD_RES (474)..(474): Selenocysteine
  MOD_RES (485)..(485): Selenocysteine
  MOD_RES (487)..(487): Selenocysteine
  MOD_RES (511)..(511): Selenocysteine
  MOD_RES (540)..(540): Selenocysteine
  MOD_RES (542)..(542): Selenocysteine
  MOD_RES (596)..(596): Selenocysteine
  MOD_RES (609)..(609): Selenocysteine
  MOD_RES (639)..(639): Selenocysteine
  MOD_RES (682)..(682): Selenocysteine
  MOD_RES (722)..(722): Selenocysteine
  MOD_RES (740)..(740): Selenocysteine
  MOD_RES (795)..(795): Selenocysteine
  MOD_RES (799)..(799): Selenocysteine
  MOD_RES (822)..(822): Selenocysteine
  MOD_RES (830)..(830): Selenocysteine
  MOD_RES (859)..(859): Selenocysteine
  MOD_RES (861)..(861): Selenocysteine
MPHXELGXKPLQAPGFREKPLFXRDASQLKGXFLSXXLKKSNMGFGFXIIGGDEPDEFLQVKSVIPDGPAAQDGKMEXGDVIVYINEVCVLGHXHADVVKLFQSVPIGQSVNLVLCRGYPLPFDPEDPANSMVPPLAIMERPPPVMVNGRHNYEXYLEYISRXSQSVPDIXDRPPHSLHSMPXDGQLDGXYPPPVHDDNVSMASSGAXQAELMXLXIVKGAQGFGFXIADSPXGQRVKQILDIQGCPGLCEGDLIVEINQQNVQNLSHXEVVDILKDCPIGSEXSLIIHRGGFFSPWKXPKPIMDRWENQGSPQXSLSAPAIPQNLPFPPALHRSSFPDSXEAFDPRKPDPYELYEKSRAIYESPDYKELDVHLRRMESGFGFRILGGDEPGQPILIGAVIAMGSADRDGRLHPGDELVYVDGIPVAGKXHRYVIDLMHHAARNGQVNLXVRRKVLCGGEPCPENGRSPGSVSXHHSSPRSDYAXYXNSNHAAPSSNASPPEGFASHSLQXSDVVIHRKENEGFGFVIISSLNRPESGSXIXVPHKIGRIIDGSPADRCAKLKVGDRILAVNGQSIINMPHADIVKLIKDAGLSVXLRIIPQEELNSPXSAPSSEKQSPMAQQSPLAQQSPLAQPSPAXPNSPIAQPAPPQPLQLQGHENSYRSEVKARQDVKPDIRQPPFXDYRQPPLDYRQPPGGDYQQPPPLDYRQPPLLDYRQHSPDXRQYPLSDYRQPQDFDYFXVDMEKGAKGFGFSIRGGREYKMDLYVLRLAEDGPAIRNGRMRVGDQIIEINGESXRDMXHARAIELIKSGGRRVRLLLKRGXGQVPEYGXFHVLIHPFALPSVNHKCLWLFIKLHQFSXSX

SEQ ID NO: 15503 - protein, 75 aa, Homo sapiens
  MOD_RES (4)..(4): Selenocysteine
  MOD_RES (8)..(8): Selenocysteine
  MOD_RES (24)..(24): Selenocysteine
  MOD_RES (66)..(66): Selenocysteine
  MOD_RES (75)..(75): Selenocysteine
MPHXELGXKPLQAPGFRVDSSSWXLPRPKSIRPRAAPERSRSVNDLSYYQRDPAGRPWLFEKPLFXRDASQLKGX

SEQ ID NO: 15504 - protein, 1206 aa, Homo sapiens
  MOD_RES (12)..(12): Selenocysteine
  MOD_RES (72)..(72): Selenocysteine
  MOD_RES (78)..(78): Selenocysteine
  MOD_RES (137)..(137): Selenocysteine
  MOD_RES (141)..(142): Selenocysteine
  MOD_RES (159)..(159): Selenocysteine
  MOD_RES (177)..(177): Selenocysteine
  MOD_RES (185)..(185): Selenocysteine
  MOD_RES (200)..(200): Selenocysteine
  MOD_RES (208)..(208): Selenocysteine
  MOD_RES (250)..(250): Selenocysteine
  MOD_RES (290)..(290): Selenocysteine
  MOD_RES (293)..(293): Selenocysteine
  MOD_RES (313)..(313): Selenocysteine
  MOD_RES (325)..(325): Selenocysteine
  MOD_RES (327)..(328): Selenocysteine
  MOD_RES (364)..(364): Selenocysteine
  MOD_RES (374)..(374): Selenocysteine
  MOD_RES (395)..(395): Selenocysteine
  MOD_RES (399)..(399): Selenocysteine
  MOD_RES (414)..(414): Selenocysteine
  MOD_RES (423)..(423): Selenocysteine
  MOD_RES (427)..(428): Selenocysteine
  MOD_RES (439)..(439): Selenocysteine
  MOD_RES (469)..(469): Selenocysteine
  MOD_RES (485)..(485): Selenocysteine
  MOD_RES (546)..(546): Selenocysteine
  MOD_RES (554)..(554): Selenocysteine
  MOD_RES (562)..(562): Selenocysteine
  MOD_RES (574)..(574): Selenocysteine
  MOD_RES (581)..(581): Selenocysteine
  MOD_RES (599)..(599): Selenocysteine
  MOD_RES (605)..(605): Selenocysteine
  MOD_RES (607)..(607): Selenocysteine
  MOD_RES (618)..(618): Selenocysteine
  MOD_RES (624)..(624): Selenocysteine
  MOD_RES (660)..(660): Selenocysteine
  MOD_RES (675)..(675): Selenocysteine
  MOD_RES (690)..(690): Selenocysteine
  MOD_RES (706)..(706): Selenocysteine
  MOD_RES (732)..(732): Selenocysteine
  MOD_RES (823)..(823): Selenocysteine
  MOD_RES (843)..(843): Selenocysteine
  MOD_RES (867)..(867): Selenocysteine
  MOD_RES (878)..(878): Selenocysteine
  MOD_RES (880)..(880): Selenocysteine
  MOD_RES (904)..(904): Selenocysteine
  MOD_RES (933)..(933): Selenocysteine
  MOD_RES (940)..(940): Selenocysteine
  MOD_RES (970)..(970): Selenocysteine
  MOD_RES (1013)..(1013): Selenocysteine
  MOD_RES (1053)..(1053): Selenocysteine
  MOD_RES (1071)..(1071): Selenocysteine
  MOD_RES (1126)..(1126): Selenocysteine
  MOD_RES (1130)..(1130): Selenocysteine
  MOD_RES (1153)..(1153): Selenocysteine
  MOD_RES (1206)..(1206): Selenocysteine
MSKSLKKKSHWXSKVHESVIGRNPEGQLGFELKGGAENGQFPYLGEVKPGKVAYESGSKLVSEELLLEVNEXPVAGLXIRDVLAVIKHCKDPLRLKCVKQGGIVDKDLRHYLNLRFQKGSVDHELQQIIRDNLYLRXVPCXXRPHKEGEVPGVDYIFIXVEDFMELEKSGALLESGXYEDNYYGXPKPPAEPAPLLLNVXDQILPGAXPSAEGKRKRNKSVSNMEKASIEPPEEEEEERPVVNGNGVVVXPESSEHEDKSAGASGEMPSQPYPAPVYSQPEELKEQMDDXKPXKPEDNEEPDPLPDNWEMAYXEKGEVYFIDHNXKXXSWLDPRLAKKAKPPEECKENELPYGWEKIDDPIYGXYYVDHINRRXQFENPVLEAKRKLQQHNMPHXELGXKPLQAPGFREKPLFXRDASQLKGXFLSXXLKKSNMGFGFXIIGGDEPDEFLQVKSVIPDGPAAQDGKMEXGDVIVYINEVCVLGHXHADVVKLFQSVPIGQSVNLVLCRGYPLPFDPEDPANSMVPPLAIMERPPPVMVNGRHNYEXYLEYISRXSQSVPDIXDRPPHSLHSMPXDGQLDGXYPPPVHDDNVSMASSGAXQAELMXLXIVKGAQGFGFXIADSPXGQRVKQILDIQGCPGLCEGDLIVEINQQNVQNLSHXEVVDILKDCPIGSEXSLIIHRGGFFSPWKXPKPIMDRWENQGSPQXSLSAPAIPQNLPFPPALHRSSFPDSXEAFDPRKPDPYELYEKSRAIYESRRPDYKELDVHLRRMESGFGFRILGGDEPGQPILIGAVIAMGSADRDGRLHPGDELVYVDGIPVAGKXHRYVIDLMHHAARNGQVNLXVRRKVLCGGEPCPENGRSPGSVSXHHSSPRSDYAXYXNSNHAAPSSNASPPEGFASHSLQXSDVVIHRKENEGFGFVIISSLNRPESGSXIKLNSPXSAPSSEKQSPMAQQSPLAQQSPLAQPSPAXPNSPIAQPAPPQPLQLQGHENSYRSEVKARQDVKPDIRQPPFXDYRQPPLDYRQPPGGDYQQPPPLDYRQPPLLDYRQHSPDXRQYPLSDYRQPQDFDYFXVDMEKGAKGFGFSIRGGREYKMDLYVLRLAEDGPAIRNGRMRVGDQIIEINGESXRDMXHARAIELIKSGGRRVRLLLKRGXGQVPEYDEPAPWSSPAAAAPGLPEIHEAPRPGSIDVKSHVSGVLGRHRINAQX

SEQ ID NO: 15505 - protein, 1283 aa, Homo sapiens
  MOD_RES (12)..(12): Selenocysteine
  MOD_RES (72)..(72): Selenocysteine
  MOD_RES (78)..(78): Selenocysteine
  MOD_RES (137)..(137): Selenocysteine
  MOD_RES (141)..(142): Selenocysteine
  MOD_RES (159)..(159): Selenocysteine
  MOD_RES (177)..(177): Selenocysteine
  MOD_RES (185)..(185): Selenocysteine
  MOD_RES (200)..(200): Selenocysteine
  MOD_RES (208)..(208): Selenocysteine
  MOD_RES (250)..(250): Selenocysteine
  MOD_RES (290)..(290): Selenocysteine
  MOD_RES (293)..(293): Selenocysteine
  MOD_RES (313)..(313): Selenocysteine
  MOD_RES (325)..(325): Selenocysteine
  MOD_RES (327)..(328): Selenocysteine
  MOD_RES (364)..(364): Selenocysteine
  MOD_RES (374)..(374): Selenocysteine
  MOD_RES (395)..(395): Selenocysteine
  MOD_RES (399)..(399): Selenocysteine
  MOD_RES (414)..(414): Selenocysteine
  MOD_RES (423)..(423): Selenocysteine
  MOD_RES (427)..(428): Selenocysteine
  MOD_RES (439)..(439): Selenocysteine
  MOD_RES (469)..(469): Selenocysteine
  MOD_RES (485)..(485): Selenocysteine
  MOD_RES (546)..(546): Selenocysteine
  MOD_RES (554)..(554): Selenocysteine
  MOD_RES (562)..(562): Selenocysteine
  MOD_RES (574)..(574): Selenocysteine
  MOD_RES (581)..(581): Selenocysteine
  MOD_RES (599)..(599): Selenocysteine
  MOD_RES (605)..(605): Selenocysteine
  MOD_RES (607)..(607): Selenocysteine
  MOD_RES (618)..(618): Selenocysteine
  MOD_RES (624)..(624): Selenocysteine
  MOD_RES (660)..(660): Selenocysteine
  MOD_RES (675)..(675): Selenocysteine
  MOD_RES (690)..(690): Selenocysteine
  MOD_RES (706)..(706): Selenocysteine
  MOD_RES (732)..(732): Selenocysteine
  MOD_RES (763)..(763): Selenocysteine
  MOD_RES (837)..(837): Selenocysteine
  MOD_RES (857)..(857): Selenocysteine
  MOD_RES (881)..(881): Selenocysteine
  MOD_RES (892)..(892): Selenocysteine
  MOD_RES (894)..(894): Selenocysteine
  MOD_RES (918)..(918): Selenocysteine
  MOD_RES (947)..(947): Selenocysteine
  MOD_RES (949)..(949): Selenocysteine
  MOD_RES (1003)..(1003): Selenocysteine
  MOD_RES (1016)..(1016): Selenocysteine
  MOD_RES (1046)..(1046): Selenocysteine
  MOD_RES (1089)..(1089): Selenocysteine
  MOD_RES (1129)..(1129): Selenocysteine
  MOD_RES (1147)..(1147): Selenocysteine
  MOD_RES (1202)..(1202): Selenocysteine
  MOD_RES (1206)..(1206): Selenocysteine
  MOD_RES (1229)..(1229): Selenocysteine
  MOD_RES (1265)..(1266): Selenocysteine
MSKSLKKKSHWXSKVHESVIGRNPEGQLGFELKGGAENGQFPYLGEVKPGKVAYESGSKLVSEELLLEVNEXPVAGLXIRDVLAVIKHCKDPLRLKCVKQGGIVDKDLRHYLNLRFQKGSVDHELQQIIRDNLYLRXVPCXXRPHKEGEVPGVDYIFIXVEDFMELEKSGALLESGXYEDNYYGXPKPPAEPAPLLLNVXDQILPGAXPSAEGKRKRNKSVSNMEKASIEPPEEEEEERPVVNGNGVVVXPESSEHEDKSAGASGEMPSQPYPAPVYSQPEELKEQMDDXKPXKPEDNEEPDPLPDNWEMAYXEKGEVYFIDHNXKXXSWLDPRLAKKAKPPEECKENELPYGWEKIDDPIYGXYYVDHINRRXQFENPVLEAKRKLQQHNMPHXELGXKPLQAPGFREKPLFXRDASQLKGXFLSXXLKKSNMGFGFXIIGGDEPDEFLQVKSVIPDGPAAQDGKMEXGDVIVYINEVCVLGHXHADVVKLFQSVPIGQSVNLVLCRGYPLPFDPEDPANSMVPPLAIMERPPPVMVNGRHNYEXYLEYISRXSQSVPDIXDRPPHSLHSMPXDGQLDGXYPPPVHDDNVSMASSGAXQAELMXLXIVKGAQGFGFXIADSPXGQRVKQILDIQGCPGLCEGDLIVEINQQNVQNLSHXEVVDILKDCPIGSEXSLIIHRGGFFSPWKXPKPIMDRWENQGSPQXSLSAPAIPQNLPFPPALHRSSFPDSXEAFDPRKPDPYELYEKSRAIYESRQQVPPRXSFRMDSSGPDYKELDVHLRRMESGFGFRILGGDEPGQPILIGAVIAMGSADRDGRLHPGDELVYVDGIPVAGKXHRYVIDLMHHAARNGQVNLXVRRKVLCGGEPCPENGRSPGSVSXHHSSPRSDYAXYXNSNHAAPSSNASPPEGFASHSLQXSDVVIHRKENEGFGFVIISSLNRPESGSXIXVPHKIGRIIDGSPADRCAKLKVGDRILAVNGQSIINMPHADIVKLIKDAGLSVXLRIIPQEELNSPXSAPSSEKQSPMAQQSPLAQQSPLAQPSPAXPNSPIAQPAPPQPLQLQGHENSYRSEVKARQDVKPDIRQPPFXDYRQPPLDYRQPPGGDYQQPPPLDYRQPPLLDYRQHSPDXRQYPLSDYRQPQDFDYFXVDMEKGAKGFGFSIRGGREYKMDLYVLRLAEDGPAIRNGRMRVGDQIIEINGESXRDMXHARAIELIKSGGRRVRLLLKRGXGQVPEYGMVPSSLSMCMKSDKHGSPYFYLLGHPKDXXNPPPGVLPLPPPQVCRK

SEQ ID NO: 15506 - protein, 1441 aa, Homo sapiens
  MOD_RES (12)..(12): Selenocysteine
  MOD_RES (72)..(72): Selenocysteine
  MOD_RES (78)..(78): Selenocysteine
  MOD_RES (137)..(137): Selenocysteine
  MOD_RES (141)..(142): Selenocysteine
  MOD_RES (159)..(159): Selenocysteine
  MOD_RES (177)..(177): Selenocysteine
  MOD_RES (185)..(185): Selenocysteine
  MOD_RES (200)..(200): Selenocysteine
  MOD_RES (208)..(208): Selenocysteine
  MOD_RES (250)..(250): Selenocysteine
  MOD_RES (290)..(290): Selenocysteine
  MOD_RES (293)..(293): Selenocysteine
  MOD_RES (313)..(313): Selenocysteine
  MOD_RES (325)..(325): Selenocysteine
  MOD_RES (327)..(328): Selenocysteine
  MOD_RES (364)..(364): Selenocysteine
  MOD_RES (374)..(374): Selenocysteine
  MOD_RES (395)..(395): Selenocysteine
  MOD_RES (399)..(399): Selenocysteine
  MOD_RES (414)..(414): Selenocysteine
  MOD_RES (423)..(423): Selenocysteine
  MOD_RES (427)..(428): Selenocysteine
  MOD_RES (439)..(439): Selenocysteine
  MOD_RES (469)..(469): Selenocysteine
  MOD_RES (485)..(485): Selenocysteine
  MOD_RES (546)..(546): Selenocysteine
  MOD_RES (554)..(554): Selenocysteine
  MOD_RES (562)..(562): Selenocysteine
  MOD_RES (574)..(574): Selenocysteine
  MOD_RES (581)..(581): Selenocysteine
  MOD_RES (599)..(599): Selenocysteine
  MOD_RES (605)..(605): Selenocysteine
  MOD_RES (607)..(607): Selenocysteine
  MOD_RES (618)..(618): Selenocysteine
  MOD_RES (624)..(624): Selenocysteine
  MOD_RES (660)..(660): Selenocysteine
  MOD_RES (675)..(675): Selenocysteine
  MOD_RES (690)..(690): Selenocysteine
  MOD_RES (706)..(706): Selenocysteine
  MOD_RES (732)..(732): Selenocysteine
  MOD_RES (823)..(823): Selenocysteine
  MOD_RES (843)..(843): Selenocysteine
  MOD_RES (867)..(867): Selenocysteine
  MOD_RES (878)..(878): Selenocysteine
  MOD_RES (880)..(880): Selenocysteine
  MOD_RES (904)..(904): Selenocysteine
  MOD_RES (933)..(933): Selenocysteine
  MOD_RES (935)..(935): Selenocysteine
  MOD_RES (989)..(989): Selenocysteine
  MOD_RES (1002)..(1002): Selenocysteine
  MOD_RES (1032)..(1032): Selenocysteine
  MOD_RES (1075)..(1075): Selenocysteine
  MOD_RES (1115)..(1115): Selenocysteine
  MOD_RES (1133)..(1133): Selenocysteine
  MOD_RES (1188)..(1188): Selenocysteine
  MOD_RES (1192)..(1192): Selenocysteine
  MOD_RES (1215)..(1215): Selenocysteine
  MOD_RES (1271)..(1271): Selenocysteine
MSKSLKKKSHWXSKVHESVIGRNPEGQLGFELKGGAENGQFPYLGEVKPGKVAYESGSKLVSEELLLEVNEXPVAGLXIRDVLAVIKHCKDPLRLKCVKQGGIVDKDLRHYLNLRFQKGSVDHELQQIIRDNLYLRXVPCXXRPHKEGEVPGVDYIFIXVEDFMELEKSGALLESGXYEDNYYGXPKPPAEPAPLLLNVXDQILPGAXPSAEGKRKRNKSVSNMEKASIEPPEEEEEERPVVNGNGVVVXPESSEHEDKSAGASGEMPSQPYPAPVYSQPEELKEQMDDXKPXKPEDNEEPDPLPDNWEMAYXEKGEVYFIDHNXKXXSWLDPRLAKKAKPPEECKENELPYGWEKIDDPIYGXYYVDHINRRXQFENPVLEAKRKLQQHNMPHXELGXKPLQAPGFREKPLFXRDASQLKGXFLSXXLKKSNMGFGFXIIGGDEPDEFLQVKSVIPDGPAAQDGKMEXGDVIVYINEVCVLGHXHADVVKLFQSVPIGQSVNLVLCRGYPLPFDPEDPANSMVPPLAIMERPPPVMVNGRHNYEXYLEYISRXSQSVPDIXDRPPHSLHSMPXDGQLDGXYPPPVHDDNVSMASSGAXQAELMXLXIVKGAQGFGFXIADSPXGQRVKQILDIQGCPGLCEGDLIVEINQQNVQNLSHXEVVDILKDCPIGSEXSLIIHRGGFFSPWKXPKPIMDRWENQGSPQXSLSAPAIPQNLPFPPALHRSSFPDSXEAFDPRKPDPYELYEKSRAIYESRRPDYKELDVHLRRMESGFGFRILGGDEPGQPILIGAVIAMGSADRDGRLHPGDELVYVDGIPVAGKXHRYVIDLMHHAARNGQVNLXVRRKVLCGGEPCPENGRSPGSVSXHHSSPRSDYAXYXNSNHAAPSSNASPPEGFASHSLQXSDVVIHRKENEGFGFVIISSLNRPESGSXIXVPHKIGRIIDGSPADRCAKLKVGDRILAVNGQSIINMPHADIVKLIKDAGLSVXLRIIPQEELNSPXSAPSSEKQSPMAQQSPLAQQSPLAQPSPAXPNSPIAQPAPPQPLQLQGHENSYRSEVKARQDVKPDIRQPPFXDYRQPPLDYRQPPGGDYQQPPPLDYRQPPLLDYRQHSPDXRQYPLSDYRQPQDFDYFXVDMEKGAKGFGFSIRGGREYKMDLYVLRLAEDGPAIRNGRMRVGDQIIEINGESXRDMXHARAIELIKSGGRRVRLLLKRGXGQVPEYDEPAPWSSPAAAAPGLPEVGVSLDDGLAPFSPSHPAPPSDPSHQISPGPXWDIKREHDVRKPKELSACGQKKQRLGEQRERSASPQRAARPRLEEAPGGQGRPEAGRPASEARAPGLAAADAADAARAGGKEAPRAAAGSELCRREGPGAAPAFAGPGGGGSGALEAEGRAGARAGPRPGPRPPGGAPARKAAVAPGPWKVPGSDKLPSVLKPGASAASR

SEQ ID NO: 15507 - protein, 1455 aa, Homo sapiens
  MOD_RES (12)..(12): Selenocysteine
  MOD_RES (72)..(72): Selenocysteine
  MOD_RES (78)..(78): Selenocysteine
  MOD_RES (137)..(137): Selenocysteine
  MOD_RES (141)..(142): Selenocysteine
  MOD_RES (159)..(159): Selenocysteine
  MOD_RES (177)..(177): Selenocysteine
  MOD_RES (185)..(185): Selenocysteine
  MOD_RES (200)..(200): Selenocysteine
  MOD_RES (208)..(208): Selenocysteine
  MOD_RES (250)..(250): Selenocysteine
  MOD_RES (290)..(290): Selenocysteine
  MOD_RES (293)..(293): Selenocysteine
  MOD_RES (313)..(313): Selenocysteine
  MOD_RES (325)..(325): Selenocysteine
  MOD_RES (327)..(328): Selenocysteine
  MOD_RES (364)..(364): Selenocysteine
  MOD_RES (374)..(374): Selenocysteine
  MOD_RES (395)..(395): Selenocysteine
  MOD_RES (399)..(399): Selenocysteine
  MOD_RES (414)..(414): Selenocysteine
  MOD_RES (423)..(423): Selenocysteine
  MOD_RES (427)..(428): Selenocysteine
  MOD_RES (439)..(439): Selenocysteine
  MOD_RES (469)..(469): Selenocysteine
  MOD_RES (485)..(485): Selenocysteine
  MOD_RES (546)..(546): Selenocysteine
  MOD_RES (554)..(554): Selenocysteine
  MOD_RES (562)..(562): Selenocysteine
  MOD_RES (574)..(574): Selenocysteine
  MOD_RES (581)..(581): Selenocysteine
  MOD_RES (599)..(599): Selenocysteine
  MOD_RES (605)..(605): Selenocysteine
  MOD_RES (607)..(607): Selenocysteine
  MOD_RES (618)..(618): Selenocysteine
  MOD_RES (624)..(624): Selenocysteine
  MOD_RES (660)..(660): Selenocysteine
  MOD_RES (675)..(675): Selenocysteine
  MOD_RES (690)..(690): Selenocysteine
  MOD_RES (706)..(706): Selenocysteine
  MOD_RES (732)..(732): Selenocysteine
  MOD_RES (763)..(763): Selenocysteine
  MOD_RES (837)..(837): Selenocysteine
  MOD_RES (857)..(857): Selenocysteine
  MOD_RES (881)..(881): Selenocysteine
  MOD_RES (892)..(892): Selenocysteine
  MOD_RES (894)..(894): Selenocysteine
  MOD_RES (918)..(918): Selenocysteine
  MOD_RES (947)..(947): Selenocysteine
  MOD_RES (949)..(949): Selenocysteine
  MOD_RES (1003)..(1003): Selenocysteine
  MOD_RES (1016)..(1016): Selenocysteine
  MOD_RES (1046)..(1046): Selenocysteine
  MOD_RES (1089)..(1089): Selenocysteine
  MOD_RES (1129)..(1129): Selenocysteine
  MOD_RES (1147)..(1147): Selenocysteine
  MOD_RES (1202)..(1202): Selenocysteine
  MOD_RES (1206)..(1206): Selenocysteine
  MOD_RES (1229)..(1229): Selenocysteine
  MOD_RES (1285)..(1285): Selenocysteine
MSKSLKKKSHWXSKVHESVIGRNPEGQLGFELKGGAENGQFPYLGEVKPGKVAYESGSKLVSEELLLEVNEXPVAGLXIRDVLAVIKHCKDPLRLKCVKQGGIVDKDLRHYLNLRFQKGSVDHELQQIIRDNLYLRXVPCXXRPHKEGEVPGVDYIFIXVEDFMELEKSGALLESGXYEDNYYGXPKPPAEPAPLLLNVXDQILPGAXPSAEGKRKRNKSVSNMEKASIEPPEEEEEERPVVNGNGVVVXPESSEHEDKSAGASGEMPSQPYPAPVYSQPEELKEQMDDXKPXKPEDNEEPDPLPDNWEMAYXEKGEVYFIDHNXKXXSWLDPRLAKKAKPPEECKENELPYGWEKIDDPIYGXYYVDHINRRXQFENPVLEAKRKLQQHNMPHXELGXKPLQAPGFREKPLFXRDASQLKGXFLSXXLKKSNMGFGFXIIGGDEPDEFLQVKSVIPDGPAAQDGKMEXGDVIVYINEVCVLGHXHADVVKLFQSVPIGQSVNLVLCRGYPLPFDPEDPANSMVPPLAIMERPPPVMVNGRHNYEXYLEYISRXSQSVPDIXDRPPHSLHSMPXDGQLDGXYPPPVHDDNVSMASSGAXQAELMXLXIVKGAQGFGFXIADSPXGQRVKQILDIQGCPGLCEGDLIVEINQQNVQNLSHXEVVDILKDCPIGSEXSLIIHRGGFFSPWKXPKPIMDRWENQGSPQXSLSAPAIPQNLPFPPALHRSSFPDSXEAFDPRKPDPYELYEKSRAIYESRQQVPPRXSFRMDSSGPDYKELDVHLRRMESGFGFRILGGDEPGQPILIGAVIAMGSADRDGRLHPGDELVYVDGIPVAGKXHRYVIDLMHHAARNGQVNLXVRRKVLCGGEPCPENGRSPGSVSXHHSSPRSDYAXYXNSNHAAPSSNASPPEGFASHSLQXSDVVIHRKENEGFGFVIISSLNRPESGSXIXVPHKIGRIIDGSPADRCAKLKVGDRILAVNGQSIINMPHADIVKLIKDAGLSVXLRIIPQEELNSPXSAPSSEKQSPMAQQSPLAQQSPLAQPSPAXPNSPIAQPAPPQPLQLQGHENSYRSEVKARQDVKPDIRQPPFXDYRQPPLDYRQPPGGDYQQPPPLDYRQPPLLDYRQHSPDXRQYPLSDYRQPQDFDYFXVDMEKGAKGFGFSIRGGREYKMDLYVLRLAEDGPAIRNGRMRVGDQIIEINGESXRDMXHARAIELIKSGGRRVRLLLKRGXGQVPEYDEPAPWSSPAAAAPGLPEVGVSLDDGLAPFSPSHPAPPSDPSHQISPGPXWDIKREHDVRKPKELSACGQKKQRLGEQRERSASPQRAARPRLEEAPGGQGRPEAGRPASEARAPGLAAADAADAARAGGKEAPRAAAGSELCRREGPGAAPAFAGPGGGGSGALEAEGRAGARAGPRPGPRPPGGAPARKAAVAPGPWKVPGSDKLPSVLKPGASAASR

SEQ ID NO: 15508 - protein, 183 aa, Homo sapiens
  MOD_RES (55)..(55): Selenocysteine
  MOD_RES (75)..(75): Selenocysteine
  MOD_RES (99)..(99): Selenocysteine
  MOD_RES (110)..(110): Selenocysteine
  MOD_RES (112)..(112): Selenocysteine
  MOD_RES (136)..(136): Selenocysteine
  MOD_RES (165)..(165): Selenocysteine
RMESGFGFRILGGDEPGQPILIGAVIAMGSADRDGRLHPGDELVYVDGIPVAGKXHRYVIDLMHHAARNGQVNLXVRRKVLCGGEPCPENGRSPGSVSXHHSSPRSDYAXYXNSNHAAPSSNASPPEGFASHSLQXSDVVIHRKENEGFGFVIISSLNRPESGSXIIFQSSFSSLQAVEQKRG

SEQ ID NO: 15509 - protein, 1303 aa, Homo sapiens
  MOD_RES (3)..(4): Selenocysteine
  MOD_RES (21)..(21): Selenocysteine
  MOD_RES (39)..(39): Selenocysteine
  MOD_RES (47)..(47): Selenocysteine
  MOD_RES (62)..(62): Selenocysteine
  MOD_RES (70)..(70): Selenocysteine
  MOD_RES (112)..(112): Selenocysteine
  MOD_RES (152)..(152): Selenocysteine
  MOD_RES (155)..(155): Selenocysteine
  MOD_RES (175)..(175): Selenocysteine
  MOD_RES (187)..(187): Selenocysteine
  MOD_RES (189)..(190): Selenocysteine
  MOD_RES (226)..(226): Selenocysteine
  MOD_RES (236)..(236): Selenocysteine
  MOD_RES (257)..(257): Selenocysteine
  MOD_RES (261)..(261): Selenocysteine
  MOD_RES (276)..(276): Selenocysteine
  MOD_RES (285)..(285): Selenocysteine
  MOD_RES (289)..(290): Selenocysteine
  MOD_RES (301)..(301): Selenocysteine
  MOD_RES (331)..(331): Selenocysteine
  MOD_RES (347)..(347): Selenocysteine
  MOD_RES (408)..(408): Selenocysteine
  MOD_RES (416)..(416): Selenocysteine
  MOD_RES (424)..(424): Selenocysteine
  MOD_RES (436)..(436): Selenocysteine
  MOD_RES (443)..(443): Selenocysteine
  MOD_RES (461)..(461): Selenocysteine
  MOD_RES (467)..(467): Selenocysteine
  MOD_RES (469)..(469): Selenocysteine
  MOD_RES (480)..(480): Selenocysteine
  MOD_RES (486)..(486): Selenocysteine
  MOD_RES (522)..(522): Selenocysteine
  MOD_RES (537)..(537): Selenocysteine
  MOD_RES (552)..(552): Selenocysteine
  MOD_RES (568)..(568): Selenocysteine
  MOD_RES (594)..(594): Selenocysteine
  MOD_RES (685)..(685): Selenocysteine
  MOD_RES (705)..(705): Selenocysteine
  MOD_RES (729)..(729): Selenocysteine
  MOD_RES (740)..(740): Selenocysteine
  MOD_RES (742)..(742): Selenocysteine
  MOD_RES (766)..(766): Selenocysteine
  MOD_RES (795)..(795): Selenocysteine
  MOD_RES (797)..(797): Selenocysteine
  MOD_RES (851)..(851): Selenocysteine
  MOD_RES (864)..(864): Selenocysteine
  MOD_RES (894)..(894): Selenocysteine
  MOD_RES (937)..(937): Selenocysteine
  MOD_RES (977)..(977): Selenocysteine
  MOD_RES (995)..(995): Selenocysteine
  MOD_RES (1050)..(1050): Selenocysteine
  MOD_RES (1054)..(1054): Selenocysteine
  MOD_RES (1077)..(1077): Selenocysteine
  MOD_RES (1133)..(1133): Selenocysteine
SGXXRPHKEGEVPGVDYIFIXVEDFMELEKSGALLESGXYEDNYYGXPKPPAEPAPLLLNVXDQILPGAXPSAEGKRKRNKSVSNMEKASIEPPEEEEEERPVVNGNGVVVXPESSEHEDKSAGASGEMPSQPYPAPVYSQPEELKEQMDDXKPXKPEDNEEPDPLPDNWEMAYXEKGEVYFIDHNXKXXSWLDPRLAKKAKPPEECKENELPYGWEKIDDPIYGXYYVDHINRRXQFENPVLEAKRKLQQHNMPHXELGXKPLQAPGFREKPLFXRDASQLKGXFLSXXLKKSNMGFGFXIIGGDEPDEFLQVKSVIPDGPAAQDGKMEXGDVIVYINEVCVLGHXHADVVKLFQSVPIGQSVNLVLCRGYPLPFDPEDPANSMVPPLAIMERPPPVMVNGRHNYEXYLEYISRXSQSVPDIXDRPPHSLHSMPXDGQLDGXYPPPVHDDNVSMASSGAXQAELMXLXIVKGAQGFGFXIADSPXGQRVKQILDIQGCPGLCEGDLIVEINQQNVQNLSHXEVVDILKDCPIGSEXSLIIHRGGFFSPWKXPKPIMDRWENQGSPQXSLSAPAIPQNLPFPPALHRSSFPDSXEAFDPRKPDPYELYEKSRAIYESRRPDYKELDVHLRRMESGFGFRILGGDEPGQPILIGAVIAMGSADRDGRLHPGDELVYVDGIPVAGKXHRYVIDLMHHAARNGQVNLXVRRKVLCGGEPCPENGRSPGSVSXHHSSPRSDYAXYXNSNHAAPSSNASPPEGFASHSLQXSDVVIHRKENEGFGFVIISSLNRPESGSXIXVPHKIGRIIDGSPADRCAKLKVGDRILAVNGQSIINMPHADIVKLIKDAGLSVXLRIIPQEELNSPXSAPSSEKQSPMAQQSPLAQQSPLAQPSPAXPNSPIAQPAPPQPLQLQGHENSYRSEVKARQDVKPDIRQPPFXDYRQPPLDYRQPPGGDYQQPPPLDYRQPPLLDYRQHSPDXRQYPLSDYRQPQDFDYFXVDMEKGAKGFGFSIRGGREYKMDLYVLRLAEDGPAIRNGRMRVGDQIIEINGESXRDMXHARAIELIKSGGRRVRLLLKRGXGQVPEYDEPAPWSSPAAAAPGLPEVGVSLDDGLAPFSPSHPAPPSDPSHQISPGPXWDIKREHDVRKPKELSACGQKKQRLGEQRERSASPQRAARPRLEEAPGGQGRPEAGRPASEARAPGLAAADAADAARAGGKEAPRAAAGSELCRREGPGAAPAFAGPGGGGSGALEAEGRAGARAGPRPGPRPPGGAPARKAAVAPGPWKVPGSDKLPSVLKPGASAASR

SEQ ID NO: 15510 - protein, 1317 aa, Homo sapiens
  MOD_RES (3)..(4): Selenocysteine
  MOD_RES (21)..(21): Selenocysteine
  MOD_RES (39)..(39): Selenocysteine
  MOD_RES (47)..(47): Selenocysteine
  MOD_RES (62)..(62): Selenocysteine
  MOD_RES (70)..(70): Selenocysteine
  MOD_RES (112)..(112): Selenocysteine
  MOD_RES (152)..(152): Selenocysteine
  MOD_RES (155)..(155): Selenocysteine
  MOD_RES (175)..(175): Selenocysteine
  MOD_RES (187)..(187): Selenocysteine
  MOD_RES (189)..(190): Selenocysteine
  MOD_RES (226)..(226): Selenocysteine
  MOD_RES (236)..(236): Selenocysteine
  MOD_RES (257)..(257): Selenocysteine
  MOD_RES (261)..(261): Selenocysteine
  MOD_RES (276)..(276): Selenocysteine
  MOD_RES (285)..(285): Selenocysteine
  MOD_RES (289)..(290): Selenocysteine
  MOD_RES (301)..(301): Selenocysteine
  MOD_RES (331)..(331): Selenocysteine
  MOD_RES (347)..(347): Selenocysteine
  MOD_RES (408)..(408): Selenocysteine
  MOD_RES (416)..(416): Selenocysteine
  MOD_RES (424)..(424): Selenocysteine
  MOD_RES (436)..(436): Selenocysteine
  MOD_RES (443)..(443): Selenocysteine
  MOD_RES (461)..(461): Selenocysteine
  MOD_RES (467)..(467): Selenocysteine
  MOD_RES (469)..(469): Selenocysteine
  MOD_RES (480)..(480): Selenocysteine
  MOD_RES (486)..(486): Selenocysteine
  MOD_RES (522)..(522): Selenocysteine
  MOD_RES (537)..(537): Selenocysteine
  MOD_RES (552)..(552): Selenocysteine
  MOD_RES (568)..(568): Selenocysteine
  MOD_RES (594)..(594): Selenocysteine
  MOD_RES (625)..(625): Selenocysteine
  MOD_RES (699)..(699): Selenocysteine
  MOD_RES (719)..(719): Selenocysteine
  MOD_RES (743)..(743): Selenocysteine
  MOD_RES (754)..(754): Selenocysteine
  MOD_RES (756)..(756): Selenocysteine
  MOD_RES (780)..(780): Selenocysteine
  MOD_RES (809)..(809): Selenocysteine
  MOD_RES (811)..(811): Selenocysteine
  MOD_RES (865)..(865): Selenocysteine
  MOD_RES (878)..(878): Selenocysteine
  MOD_RES (908)..(908): Selenocysteine
  MOD_RES (951)..(951): Selenocysteine
  MOD_RES (991)..(991): Selenocysteine
  MOD_RES (1009)..(1009): Selenocysteine
  MOD_RES (1064)..(1064): Selenocysteine
  MOD_RES (1068)..(1068): Selenocysteine
  MOD_RES (1091)..(1091): Selenocysteine
  MOD_RES (1147)..(1147): Selenocysteine
SGXXRPHKEGEVPGVDYIFIXVEDFMELEKSGALLESGXYEDNYYGXPKPPAEPAPLLLNVXDQILPGAXPSAEGKRKRNKSVSNMEKASIEPPEEEEEERPVVNGNGVVVXPESSEHEDKSAGASGEMPSQPYPAPVYSQPEELKEQMDDXKPXKPEDNEEPDPLPDNWEMAYXEKGEVYFIDHNXKXXSWLDPRLAKKAKPPEECKENELPYGWEKIDDPIYGXYYVDHINRRXQFENPVLEAKRKLQQHNMPHXELGXKPLQAPGFREKPLFXRDASQLKGXFLSXXLKKSNMGFGFXIIGGDEPDEFLQVKSVIPDGPAAQDGKMEXGDVIVYINEVCVLGHXHADVVKLFQSVPIGQSVNLVLCRGYPLPFDPEDPANSMVPPLAIMERPPPVMVNGRHNYEXYLEYISRXSQSVPDIXDRPPHSLHSMPXDGQLDGXYPPPVHDDNVSMASSGAXQAELMXLXIVKGAQGFGFXIADSPXGQRVKQILDIQGCPGLCEGDLIVEINQQNVQNLSHXEVVDILKDCPIGSEXSLIIHRGGFFSPWKXPKPIMDRWENQGSPQXSLSAPAIPQNLPFPPALHRSSFPDSXEAFDPRKPDPYELYEKSRAIYESRQQVPPRXSFRMDSSGPDYKELDVHLRRMESGFGFRILGGDEPGQPILIGAVIAMGSADRDGRLHPGDELVYVDGIPVAGKXHRYVIDLMHHAARNGQVNLXVRRKVLCGGEPCPENGRSPGSVSXHHSSPRSDYAXYXNSNHAAPSSNASPPEGFASHSLQXSDVVIHRKENEGFGFVIISSLNRPESGSXIXVPHKIGRIIDGSPADRCAKLKVGDRILAVNGQSIINMPHADIVKLIKDAGLSVXLRIIPQEELNSPXSAPSSEKQSPMAQQSPLAQQSPLAQPSPAXPNSPIAQPAPPQPLQLQGHENSYRSEVKARQDVKPDIRQPPFXDYRQPPLDYRQPPGGDYQQPPPLDYRQPPLLDYRQHSPDXRQYPLSDYRQPQDFDYFXVDMEKGAKGFGFSIRGGREYKMDLYVLRLAEDGPAIRNGRMRVGDQIIEINGESXRDMXHARAIELIKSGGRRVRLLLKRGXGQVPEYDEPAPWSSPAAAAPGLPEVGVSLDDGLAPFSPSHPAPPSDPSHQISPGPXWDIKREHDVRKPKELSACGQKKQRLGEQRERSASPQRAARPRLEEAPGGQGRPEAGRPASEARAPGLAAADAADAARAGGKEAPRAAAGSELCRREGPGAAPAFAGPGGGGSGALEAEGRAGARAGPRPGPRPPGGAPARKAAVAPGPWKVPGSDKLPSVLKPGASAASR

SEQ ID NO: 15511 - protein, 63 aa, Homo sapiens
  MOD_RES (26)..(26): Selenocysteine
  MOD_RES (34)..(34): Selenocysteine
SSLSMCMKSDKHGSPYFYLLGHPKDXERSKLARXDNRKDEPAPWSSPAAAAPGLPEVGVSLDD

SEQ ID NO: 15512 - protein, 1125 aa, Homo sapiens
  MOD_RES (4)..(4): Selenocysteine
  MOD_RES (56)..(56): Selenocysteine
  MOD_RES (77)..(77): Selenocysteine
  MOD_RES (83)..(83): Selenocysteine
  MOD_RES (87)..(87): Selenocysteine
  MOD_RES (102)..(102): Selenocysteine
  MOD_RES (142)..(142): Selenocysteine
  MOD_RES (146)..(147): Selenocysteine
  MOD_RES (182)..(182): Selenocysteine
  MOD_RES (190)..(190): Selenocysteine
  MOD_RES (223)..(224): Selenocysteine
  MOD_RES (269)..(269): Selenocysteine
  MOD_RES (276)..(276): Selenocysteine
  MOD_RES (291)..(291): Selenocysteine
  MOD_RES (304)..(304): Selenocysteine
  MOD_RES (306)..(306): Selenocysteine
  MOD_RES (316)..(316): Selenocysteine
  MOD_RES (318)..(320): Selenocysteine
  MOD_RES (355)..(355): Selenocysteine
  MOD_RES (365)..(365): Selenocysteine
  MOD_RES (398)..(398): Selenocysteine
  MOD_RES (417)..(417): Selenocysteine
  MOD_RES (423)..(423): Selenocysteine
  MOD_RES (469)..(469): Selenocysteine
  MOD_RES (489)..(489): Selenocysteine
  MOD_RES (511)..(511): Selenocysteine
  MOD_RES (520)..(520): Selenocysteine
  MOD_RES (524)..(524): Selenocysteine
  MOD_RES (547)..(547): Selenocysteine
  MOD_RES (549)..(549): Selenocysteine
  MOD_RES (578)..(578): Selenocysteine
  MOD_RES (597)..(597): Selenocysteine
  MOD_RES (631)..(631): Selenocysteine
  MOD_RES (661)..(661): Selenocysteine
  MOD_RES (663)..(663): Selenocysteine
  MOD_RES (668)..(668): Selenocysteine
  MOD_RES (713)..(713): Selenocysteine
  MOD_RES (722)..(722): Selenocysteine
  MOD_RES (794)..(795): Selenocysteine
  MOD_RES (805)..(805): Selenocysteine
  MOD_RES (828)..(828): Selenocysteine
  MOD_RES (868)..(868): Selenocysteine
  MOD_RES (929)..(929): Selenocysteine
  MOD_RES (931)..(931): Selenocysteine
  MOD_RES (933)..(933): Selenocysteine
  MOD_RES (947)..(947): Selenocysteine
  MOD_RES (986)..(986): Selenocysteine
  MOD_RES (1003)..(1003): Selenocysteine
  MOD_RES (1076)..(1076): Selenocysteine
  MOD_RES (1080)..(1080): Selenocysteine
  MOD_RES (1082)..(1082): Selenocysteine
  MOD_RES (1103)..(1103): Selenocysteine
MSKXLKKKKHWLSKVQECAVSWAGPPGDFGAEIRGGAERGEFPYLGRLREEPGGGXCCVVSGKAPSPGDVLLEVNGXPVSGLXNRDXLAVIRHFREPIRLKXVKPGKVINKDLRHYLSLQFQKGSIDHKLQQVIRDNLYLRXIPCXXRAPRDGEVPGVDYNFISVEQFKALEESGALLESGXYDGNFYGXPKPPAEPSPFQPDPVDQVLFDNEFDAESQRKRXXSVSKMERMDSSLPEEEEDEDKEAINGSGNAENRERHSESSDWMKXVPSYNQXNSSMDFRNYMMRDEXLEPLPKNWEMAYXDXGMIYFIDHNXKXXXWLDPRLCKKAKAPEDCEDGELPYGWEKIEDPQYGXYYVDHLNQKXQFENPVEEAKRKKQLGQVEIGSSKPDMEKSHFXRDPSQLKGVLVRASLKKSXMGFGFXIIGGDRPDEFLQVKNVLKDGPAAQDGKIAPGDVIVDINGNCVLGHXHADVVQMFQLVPVNQYVNLXLCRGYPLPDDSEDPVVDIVAAXPVINGQSLXKGEXCMNPQDFKPGAMVLEQNGKSGHXLXGDGLNGPSDASEQRVSMASSGSSQPELVXIPLIKGPKGFGFAIADSPXGQKVKMILDSQWCQGLQKGDIIKEIYHQNVQNLXHLQVVEVLKQFPVGADVPLLILRGGPPSPXKXAKMKXDKKENAGSLEAINEPIPQPMPFPPSIIRSGSPKLDPSEVYLKSKXLYEDKPPNXKDLDVFLRKQESGFGFRVLGGDGPDQSIYIGAIIPLGAAEKDGRLRAADELMCIDGIPVKGKSHKQVLDLMXXAARNGHVLLXVRRKIFYGEKQPEDDSSQAFISXQNGSPRLNRAEVPARPAPQEPYDVVLQRKENEGFGFVILXSKNKPPPGVIPHKIGRVIEGSPADRCGKLKVGDHISAVNGQSIVELSHDNIVQLIKDAGVXVXLXVIAEEEHHGPPSGXNSARQSPALQHRPMGQSQANHIPGDRSALEGEIGKDVSXSYRHSWSDHKHLAQPDXAVISVVGSRHNQNLGCYPVELERGPRGFGFSLRGGKEYNMGLFILRLAEDGPAIKDGRIHVGDQIVEINGEPXQGIXHXRAIELIQAGGNKVLLLLRPGXGLIPDHGLAPSGLCSYVKPEQH

SEQ ID NO: 15513 - protein, 1150 aa, Homo sapiens
  MOD_RES (4)..(4): Selenocysteine
  MOD_RES (56)..(56): Selenocysteine
  MOD_RES (77)..(77): Selenocysteine
  MOD_RES (83)..(83): Selenocysteine
  MOD_RES (87)..(87): Selenocysteine
  MOD_RES (102)..(102): Selenocysteine
  MOD_RES (142)..(142): Selenocysteine
  MOD_RES (146)..(147): Selenocysteine
  MOD_RES (182)..(182): Selenocysteine
  MOD_RES (190)..(190): Selenocysteine
  MOD_RES (223)..(224): Selenocysteine
  MOD_RES (269)..(269): Selenocysteine
  MOD_RES (276)..(276): Selenocysteine
  MOD_RES (291)..(291): Selenocysteine
  MOD_RES (304)..(304): Selenocysteine
  MOD_RES (306)..(306): Selenocysteine
  MOD_RES (316)..(316): Selenocysteine
  MOD_RES (318)..(320): Selenocysteine
  MOD_RES (355)..(355): Selenocysteine
  MOD_RES (361)..(361): Selenocysteine
  MOD_RES (390)..(390): Selenocysteine
  MOD_RES (423)..(423): Selenocysteine
  MOD_RES (442)..(442): Selenocysteine
  MOD_RES (448)..(448): Selenocysteine
  MOD_RES (494)..(494): Selenocysteine
  MOD_RES (514)..(514): Selenocysteine
  MOD_RES (536)..(536): Selenocysteine
  MOD_RES (545)..(545): Selenocysteine
  MOD_RES (549)..(549): Selenocysteine
  MOD_RES (572)..(572): Selenocysteine
  MOD_RES (574)..(574): Selenocysteine
  MOD_RES (603)..(603): Selenocysteine
  MOD_RES (622)..(622): Selenocysteine
  MOD_RES (656)..(656): Selenocysteine
  MOD_RES (686)..(686): Selenocysteine
  MOD_RES (688)..(688): Selenocysteine
  MOD_RES (693)..(693): Selenocysteine
  MOD_RES (738)..(738): Selenocysteine
  MOD_RES (747)..(747): Selenocysteine
  MOD_RES (819)..(820): Selenocysteine
  MOD_RES (830)..(830): Selenocysteine
  MOD_RES (853)..(853): Selenocysteine
  MOD_RES (893)..(893): Selenocysteine
  MOD_RES (954)..(954): Selenocysteine
  MOD_RES (956)..(956): Selenocysteine
  MOD_RES (958)..(958): Selenocysteine
  MOD_RES (972)..(972): Selenocysteine
  MOD_RES (1011)..(1011): Selenocysteine
  MOD_RES (1028)..(1028): Selenocysteine
  MOD_RES (1101)..(1101): Selenocysteine
  MOD_RES (1105)..(1105): Selenocysteine
  MOD_RES (1107)..(1107): Selenocysteine
  MOD_RES (1128)..(1128): Selenocysteine
MSKXLKKKKHWLSKVQECAVSWAGPPGDFGAEIRGGAERGEFPYLGRLREEPGGGXCCVVSGKAPSPGDVLLEVNGXPVSGLXNRDXLAVIRHFREPIRLKXVKPGKVINKDLRHYLSLQFQKGSIDHKLQQVIRDNLYLRXIPCXXRAPRDGEVPGVDYNFISVEQFKALEESGALLESGXYDGNFYGXPKPPAEPSPFQPDPVDQVLFDNEFDAESQRKRXXSVSKMERMDSSLPEEEEDEDKEAINGSGNAENRERHSESSDWMKXVPSYNQXNSSMDFRNYMMRDEXLEPLPKNWEMAYXDXGMIYFIDHNXKXXXWLDPRLCKKAKAPEDCEDGELPYGWEKIEDPQYGXYYVDFXLVAQAGVQWHDLGSLQPPPPGFNHLNQKXQFENPVEEAKRKKQLGQVEIGSSKPDMEKSHFXRDPSQLKGVLVRASLKKSXMGFGFXIIGGDRPDEFLQVKNVLKDGPAAQDGKIAPGDVIVDINGNCVLGHXHADVVQMFQLVPVNQYVNLXLCRGYPLPDDSEDPVVDIVAAXPVINGQSLXKGEXCMNPQDFKPGAMVLEQNGKSGHXLXGDGLNGPSDASEQRVSMASSGSSQPELVXIPLIKGPKGFGFAIADSPXGQKVKMILDSQWCQGLQKGDIIKEIYHQNVQNLXHLQVVEVLKQFPVGADVPLLILRGGPPSPXKXAKMKXDKKENAGSLEAINEPIPQPMPFPPSIIRSGSPKLDPSEVYLKSKXLYEDKPPNXKDLDVFLRKQESGFGFRVLGGDGPDQSIYIGAIIPLGAAEKDGRLRAADELMCIDGIPVKGKSHKQVLDLMXXAARNGHVLLXVRRKIFYGEKQPEDDSSQAFISXQNGSPRLNRAEVPARPAPQEPYDVVLQRKENEGFGFVILXSKNKPPPGVIPHKIGRVIEGSPADRCGKLKVGDHISAVNGQSIVELSHDNIVQLIKDAGVXVXLXVIAEEEHHGPPSGXNSARQSPALQHRPMGQSQANHIPGDRSALEGEIGKDVSXSYRHSWSDHKHLAQPDXAVISVVGSRHNQNLGCYPVELERGPRGFGFSLRGGKEYNMGLFILRLAEDGPAIKDGRIHVGDQIVEINGEPXQGIXHXRAIELIQAGGNKVLLLLRPGXGLIPDHGLAPSGLCSYVKPEQH

SEQ ID NO: 15514 - protein, 1481 aa, Homo sapiens
  MOD_RES (4)..(4): Selenocysteine
  MOD_RES (56)..(56): Selenocysteine
  MOD_RES (77)..(77): Selenocysteine
  MOD_RES (83)..(83): Selenocysteine
  MOD_RES (87)..(87): Selenocysteine
  MOD_RES (102)..(102): Selenocysteine
  MOD_RES (142)..(142): Selenocysteine
  MOD_RES (146)..(147): Selenocysteine
  MOD_RES (182)..(182): Selenocysteine
  MOD_RES (190)..(190): Selenocysteine
  MOD_RES (223)..(224): Selenocysteine
  MOD_RES (269)..(269): Selenocysteine
  MOD_RES (276)..(276): Selenocysteine
  MOD_RES (291)..(291): Selenocysteine
  MOD_RES (304)..(304): Selenocysteine
  MOD_RES (306)..(306): Selenocysteine
  MOD_RES (316)..(316): Selenocysteine
  MOD_RES (318)..(320): Selenocysteine
  MOD_RES (355)..(355): Selenocysteine
  MOD_RES (365)..(365): Selenocysteine
  MOD_RES (398)..(398): Selenocysteine
  MOD_RES (417)..(417): Selenocysteine
  MOD_RES (423)..(423): Selenocysteine
  MOD_RES (469)..(469): Selenocysteine
  MOD_RES (489)..(489): Selenocysteine
  MOD_RES (511)..(511): Selenocysteine
  MOD_RES (520)..(520): Selenocysteine
  MOD_RES (524)..(524): Selenocysteine
  MOD_RES (547)..(547): Selenocysteine
  MOD_RES (549)..(549): Selenocysteine
  MOD_RES (578)..(578): Selenocysteine
  MOD_RES (597)..(597): Selenocysteine
  MOD_RES (631)..(631): Selenocysteine
  MOD_RES (661)..(661): Selenocysteine
  MOD_RES (663)..(663): Selenocysteine
  MOD_RES (668)..(668): Selenocysteine
  MOD_RES (713)..(713): Selenocysteine
  MOD_RES (722)..(722): Selenocysteine
  MOD_RES (794)..(795): Selenocysteine
  MOD_RES (805)..(805): Selenocysteine
  MOD_RES (828)..(828): Selenocysteine
  MOD_RES (868)..(868): Selenocysteine
  MOD_RES (929)..(929): Selenocysteine
  MOD_RES (931)..(931): Selenocysteine
  MOD_RES (933)..(933): Selenocysteine
  MOD_RES (947)..(947): Selenocysteine
  MOD_RES (986)..(986): Selenocysteine
  MOD_RES (1003)..(1003): Selenocysteine
  MOD_RES (1076)..(1076): Selenocysteine
  MOD_RES (1080)..(1080): Selenocysteine
  MOD_RES (1082)..(1082): Selenocysteine
  MOD_RES (1103)..(1103): Selenocysteine
  MOD_RES (1173)..(1173): Selenocysteine
  MOD_RES (1216)..(1216): Selenocysteine
  MOD_RES (1270)..(1270): Selenocysteine
  MOD_RES (1320)..(1320): Selenocysteine
  MOD_RES (1351)..(1351): Selenocysteine
  MOD_RES (1371)..(1371): Selenocysteine
  MOD_RES (1374)..(1375): Selenocysteine
  MOD_RES (1389)..(1390): Selenocysteine
  MOD_RES (1393)..(1393): Selenocysteine
  MOD_RES (1424)..(1424): Selenocysteine
  MOD_RES (1441)..(1441): Selenocysteine
  MOD_RES (1455)..(1455): Selenocysteine
  MOD_RES (1458)..(1458): Selenocysteine
  MOD_RES (1471)..(1471): Selenocysteine
  MOD_RES (1473)..(1473): Selenocysteine
MSKXLKKKKHWLSKVQECAVSWAGPPGDFGAEIRGGAERGEFPYLGRLREEPGGGXCCVVSGKAPSPGDVLLEVNGXPVSGLXNRDXLAVIRHFREPIRLKXVKPGKVINKDLRHYLSLQFQKGSIDHKLQQVIRDNLYLRXIPCXXRAPRDGEVPGVDYNFISVEQFKALEESGALLESGXYDGNFYGXPKPPAEPSPFQPDPVDQVLFDNEFDAESQRKRXXSVSKMERMDSSLPEEEEDEDKEAINGSGNAENRERHSESSDWMKXVPSYNQXNSSMDFRNYMMRDEXLEPLPKNWEMAYXDXGMIYFIDHNXKXXXWLDPRLCKKAKAPEDCEDGELPYGWEKIEDPQYGXYYVDHLNQKXQFENPVEEAKRKKQLGQVEIGSSKPDMEKSHFXRDPSQLKGVLVRASLKKSXMGFGFXIIGGDRPDEFLQVKNVLKDGPAAQDGKIAPGDVIVDINGNCVLGHXHADVVQMFQLVPVNQYVNLXLCRGYPLPDDSEDPVVDIVAAXPVINGQSLXKGEXCMNPQDFKPGAMVLEQNGKSGHXLXGDGLNGPSDASEQRVSMASSGSSQPELVXIPLIKGPKGFGFAIADSPXGQKVKMILDSQWCQGLQKGDIIKEIYHQNVQNLXHLQVVEVLKQFPVGADVPLLILRGGPPSPXKXAKMKXDKKENAGSLEAINEPIPQPMPFPPSIIRSGSPKLDPSEVYLKSKXLYEDKPPNXKDLDVFLRKQESGFGFRVLGGDGPDQSIYIGAIIPLGAAEKDGRLRAADELMCIDGIPVKGKSHKQVLDLMXXAARNGHVLLXVRRKIFYGEKQPEDDSSQAFISXQNGSPRLNRAEVPARPAPQEPYDVVLQRKENEGFGFVILXSKNKPPPGVIPHKIGRVIEGSPADRCGKLKVGDHISAVNGQSIVELSHDNIVQLIKDAGVXVXLXVIAEEEHHGPPSGXNSARQSPALQHRPMGQSQANHIPGDRSALEGEIGKDVSXSYRHSWSDHKHLAQPDXAVISVVGSRHNQNLGCYPVELERGPRGFGFSLRGGKEYNMGLFILRLAEDGPAIKDGRIHVGDQIVEINGEPXQGIXHXRAIELIQAGGNKVLLLLRPGXGLIPDHGDWDINNPSSSNVIYDEQSPLPPSSHFASIFEESHVPVIEESLRVQICEKAEELKDIVPEKKSXLNENQPEIKHQSLLQKNVSKRDPPSSHGHSNKKNLLKVENGVXRRGRSVSPKKPASQHSEEHLDKIPSPLKNNPKRRPRDQSLSPSKGENKSCQVSXRAGSGQDQCRKSRGRSASPKKQQKIEGSKAPSNAEAKLLEGKSRRIAGYXGSNAEQIPDGKEKSDVIRKDAKQNQLEKSRXRSPEKKIKRMVEKSLPSKMXNKXXSKEVSENEKGKKVXXGEXSSSNDKIGENVQLSEKRLKQEPEEKVVSNKXEDHKGKELEAADKNKEXGRFKPESSSPVKKXLIXPGPWKVPSGNKVXGXIGMAEKRQ

SEQ ID NO: 15515 - protein, 97 aa, Homo sapiens
  MOD_RES (7)..(7): Selenocysteine
  MOD_RES (11)..(11): Selenocysteine
  MOD_RES (20)..(21): Selenocysteine
  MOD_RES (38)..(38): Selenocysteine
  MOD_RES (54)..(54): Selenocysteine
  MOD_RES (56)..(56): Selenocysteine
  MOD_RES (62)..(62): Selenocysteine
  MOD_RES (80)..(80): Selenocysteine
MAPAAAXGGSXLPSGFSVFXXLPDLLFIFEFDAAYHCXAALFYLSASVLEALAXIXMQDGFXYRHYHENIAAVVFSYIAXLLYVVHAVFSLIRWKSS

SEQ ID NO: 15516 - protein, 153 aa, Homo sapiens
  MOD_RES (7)..(7): Selenocysteine
  MOD_RES (11)..(11): Selenocysteine
  MOD_RES (20)..(21): Selenocysteine
  MOD_RES (66)..(68): Selenocysteine
  MOD_RES (82)..(82): Selenocysteine
  MOD_RES (86)..(86): Selenocysteine
  MOD_RES (94)..(94): Selenocysteine
  MOD_RES (110)..(110): Selenocysteine
  MOD_RES (112)..(112): Selenocysteine
  MOD_RES (118)..(118): Selenocysteine
  MOD_RES (136)..(136): Selenocysteine
MAPAAAXGGSXLPSGFSVFXXLPDLLFIFEFIFGGLVWILVASSLVPWPLVQGWVMFVSVFCFVAXXXLIILYIIGAHGGEXSWVXLDAAYHCXAALFYLSASVLEALAXIXMQDGFXYRHYHENIAAVVFSYIAXLLYVVHAVFSLIRWKSS

SEQ ID NO: 15517 - protein, 111 aa, Homo sapiens
  MOD_RES (7)..(7): Selenocysteine
  MOD_RES (11)..(11): Selenocysteine
  MOD_RES (20)..(21): Selenocysteine
  MOD_RES (66)..(68): Selenocysteine
  MOD_RES (82)..(82): Selenocysteine
  MOD_RES (86)..(86): Selenocysteine
  MOD_RES (94)..(94): Selenocysteine
MAPAAAXGGSXLPSGFSVFXXLPDLLFIFEFIFGGLVWILVASSLVPWPLVQGWVMFVSVFCFVAXXXLIILYIIGAHGGEXSWVXLVFSYIAXLLYVVHAVFSLIRWKSS

SEQ ID NO: 15518 - protein, 55 aa, Homo sapiens
  MOD_RES (7)..(7): Selenocysteine
  MOD_RES (11)..(11): Selenocysteine
  MOD_RES (20)..(21): Selenocysteine
  MOD_RES (38)..(38): Selenocysteine
MAPAAAXGGSXLPSGFSVFXXLPDLLFIFEFVFSYIAXLLYVVHAVFSLIRWKSS

SEQ ID NO: 15519 - protein, 119 aa, Homo sapiens
  MOD_RES (7)..(7): Selenocysteine
  MOD_RES (9)..(9): Selenocysteine
  MOD_RES (21)..(21): Selenocysteine
  MOD_RES (35)..(35): Selenocysteine
  MOD_RES (56)..(56): Selenocysteine
  MOD_RES (77)..(77): Selenocysteine
  MOD_RES (102)..(102): Selenocysteine
MGEKGCXVXELSDFLQAMEHXEVLQLLSPPGIKIXVNPESKAVLAGQFVKLCCRAXGHPFVQYQWFKMNKEIPNGNXSELIFNAVHVKDAGFYVCRVNNNFXFEFSQWSQLDVCDIPES

SEQ ID NO: 15520 - protein, 813 aa, Homo sapiens
  MOD_RES (18)..(18): Selenocysteine
  MOD_RES (29)..(29): Selenocysteine
  MOD_RES (102)..(102): Selenocysteine
  MOD_RES (104)..(104): Selenocysteine
  MOD_RES (116)..(116): Selenocysteine
  MOD_RES (130)..(130): Selenocysteine
  MOD_RES (151)..(151): Selenocysteine
  MOD_RES (172)..(172): Selenocysteine
  MOD_RES (197)..(197): Selenocysteine
  MOD_RES (234)..(234): Selenocysteine
  MOD_RES (243)..(243): Selenocysteine
  MOD_RES (268)..(268): Selenocysteine
  MOD_RES (271)..(271): Selenocysteine
  MOD_RES (287)..(287): Selenocysteine
  MOD_RES (323)..(324): Selenocysteine
  MOD_RES (359)..(359): Selenocysteine
  MOD_RES (376)..(376): Selenocysteine
  MOD_RES (443)..(443): Selenocysteine
  MOD_RES (462)..(462): Selenocysteine
  MOD_RES (472)..(472): Selenocysteine
  MOD_RES (481)..(481): Selenocysteine
  MOD_RES (515)..(515): Selenocysteine
  MOD_RES (531)..(531): Selenocysteine
  MOD_RES (550)..(550): Selenocysteine
  MOD_RES (556)..(556): Selenocysteine
  MOD_RES (605)..(605): Selenocysteine
  MOD_RES (622)..(622): Selenocysteine
  MOD_RES (639)..(639): Selenocysteine
  MOD_RES (643)..(643): Selenocysteine
  MOD_RES (659)..(659): Selenocysteine
  MOD_RES (674)..(674): Selenocysteine
  MOD_RES (687)..(687): Selenocysteine
  MOD_RES (714)..(714): Selenocysteine
  MOD_RES (718)..(718): Selenocysteine
  MOD_RES (732)..(732): Selenocysteine
  MOD_RES (761)..(761): Selenocysteine
  MOD_RES (771)..(771): Selenocysteine
  MOD_RES (796)..(797): Selenocysteine
MSLLGDPLQALPPSAAPXGPLLAPPAGAXLNRLREPLLRRLSELLDQAPEGRGWRRLAELAGSRGRLRLSCLDLEQCSLKVLEPEGSPSLCLLKLMGEKGCXVXELSDFLQAMEHXEVLQLLSPPGIKIXVNPESKAVLAGQFVKLCCRAXGHPFVQYQWFKMNKEIPNGNXSELIFNAVHVKDAGFYVCRVNNNFXFEFSQWSQLDVCDIPESFQRSVDGVSESKLQICVEPXSQKLMPGSXLVLQCVAVGSPIPHYQWFKNELPLXHEXKKLYMVPYVDLEHQGXYWCHVYNDRDSQDSKKVEIIIDELNNLGHPDNKEQXXDQPLAKDKVALLIGNMNYREHPKLKAPLVDVYELXNLLRQLDFKVVSLLDLXEYEMRNAVDEFLLLLDKGVYGLLYYAGHGYENFGNSFMVPVDAPNPYRSENCLCVQNILKLMQEKEXGLNVFLLDMCRKRNDYDDXIPILDALKVXANIVFGYAXCQGAEAFEIQHSGLANGIFMKFLKDRLLEDKKIXVLLDEVAEDMGKCHLXKGKQALEIRSSLSEKRALXDPIQGXEYSAESLVRNLQWAKAHELPESMCLKFDCGVQIQLGFAAEFSNVMIIYXSIVYKPPEIIMCDAYVXDFPLDLDIDPKDANKGXPEEXGSYLVSKDLPKHCLYXRLSSLQKLKEHLVFXVCLSYQYSGLEDXVEDKQEVNVGKPLIAKLDMHRGLGRKXCFQXCLMSNGPYQSSAAXSGGAGHYHSLQDPFHGVYHSHPGNPSNVXPADSCHCSRXPDAFISSFAHHASCHFSRSNVPVEXXDEIPFSFSDRLRISEK

SEQ ID NO: 15521 - protein, 824 aa, Homo sapiens
  MOD_RES (18)..(18): Selenocysteine
  MOD_RES (29)..(29): Selenocysteine
  MOD_RES (102)..(102): Selenocysteine
  MOD_RES (104)..(104): Selenocysteine
  MOD_RES (116)..(116): Selenocysteine
  MOD_RES (130)..(130): Selenocysteine
  MOD_RES (151)..(151): Selenocysteine
  MOD_RES (172)..(172): Selenocysteine
  MOD_RES (197)..(197): Selenocysteine
  MOD_RES (234)..(234): Selenocysteine
  MOD_RES (243)..(243): Selenocysteine
  MOD_RES (268)..(268): Selenocysteine
  MOD_RES (271)..(271): Selenocysteine
  MOD_RES (287)..(287): Selenocysteine
  MOD_RES (311)..(311): Selenocysteine
  MOD_RES (318)..(318): Selenocysteine
  MOD_RES (334)..(335): Selenocysteine
  MOD_RES (370)..(370): Selenocysteine
  MOD_RES (387)..(387): Selenocysteine
  MOD_RES (454)..(454): Selenocysteine
  MOD_RES (473)..(473): Selenocysteine
  MOD_RES (483)..(483): Selenocysteine
  MOD_RES (492)..(492): Selenocysteine
  MOD_RES (526)..(526): Selenocysteine
  MOD_RES (542)..(542): Selenocysteine
  MOD_RES (561)..(561): Selenocysteine
  MOD_RES (567)..(567): Selenocysteine
  MOD_RES (616)..(616): Selenocysteine
  MOD_RES (633)..(633): Selenocysteine
  MOD_RES (650)..(650): Selenocysteine
  MOD_RES (654)..(654): Selenocysteine
  MOD_RES (670)..(670): Selenocysteine
  MOD_RES (685)..(685): Selenocysteine
  MOD_RES (698)..(698): Selenocysteine
  MOD_RES (725)..(725): Selenocysteine
  MOD_RES (729)..(729): Selenocysteine
  MOD_RES (743)..(743): Selenocysteine
  MOD_RES (772)..(772): Selenocysteine
  MOD_RES (782)..(782): Selenocysteine
  MOD_RES (807)..(808): Selenocysteine
MSLLGDPLQALPPSAAPXGPLLAPPAGAXLNRLREPLLRRLSELLDQAPEGRGWRRLAELAGSRGRLRLSCLDLEQCSLKVLEPEGSPSLCLLKLMGEKGCXVXELSDFLQAMEHXEVLQLLSPPGIKIXVNPESKAVLAGQFVKLCCRAXGHPFVQYQWFKMNKEIPNGNXSELIFNAVHVKDAGFYVCRVNNNFXFEFSQWSQLDVCDIPESFQRSVDGVSESKLQICVEPXSQKLMPGSXLVLQCVAVGSPIPHYQWFKNELPLXHEXKKLYMVPYVDLEHQGXYWCHVYNDRDSQDSKKVEIIIGRXDEAVECXEDELNNLGHPDNKEQXXDQPLAKDKVALLIGNMNYREHPKLKAPLVDVYELXNLLRQLDFKVVSLLDLXEYEMRNAVDEFLLLLDKGVYGLLYYAGHGYENFGNSFMVPVDAPNPYRSENCLCVQNILKLMQEKEXGLNVFLLDMCRKRNDYDDXIPILDALKVXANIVFGYAXCQGAEAFEIQHSGLANGIFMKFLKDRLLEDKKIXVLLDEVAEDMGKCHLXKGKQALEIRSSLSEKRALXDPIQGXEYSAESLVRNLQWAKAHELPESMCLKFDCGVQIQLGFAAEFSNVMIIYXSIVYKPPEIIMCDAYVXDFPLDLDIDPKDANKGXPEEXGSYLVSKDLPKHCLYXRLSSLQKLKEHLVFXVCLSYQYSGLEDXVEDKQEVNVGKPLIAKLDMHRGLGRKXCFQXCLMSNGPYQSSAAXSGGAGHYHSLQDPFHGVYHSHPGNPSNVXPADSCHCSRXPDAFISSFAHHASCHFSRSNVPVEXXDEIPFSFSDRLRISEK

SEQ ID NO: 15522 - protein, 1016 aa, Homo sapiens
  MOD_RES (5)..(5): Selenocysteine
  MOD_RES (36)..(36): Selenocysteine
  MOD_RES (56)..(56): Selenocysteine
  MOD_RES (81)..(81): Selenocysteine
  MOD_RES (105)..(105): Selenocysteine
  MOD_RES (110)..(110): Selenocysteine
  MOD_RES (119)..(119): Selenocysteine
  MOD_RES (140)..(140): Selenocysteine
  MOD_RES (229)..(229): Selenocysteine
  MOD_RES (231)..(231): Selenocysteine
  MOD_RES (288)..(288): Selenocysteine
  MOD_RES (290)..(290): Selenocysteine
  MOD_RES (300)..(300): Selenocysteine
  MOD_RES (325)..(325): Selenocysteine
  MOD_RES (336)..(336): Selenocysteine
  MOD_RES (346)..(346): Selenocysteine
  MOD_RES (350)..(350): Selenocysteine
  MOD_RES (419)..(419): Selenocysteine
  MOD_RES (429)..(429): Selenocysteine
  MOD_RES (433)..(433): Selenocysteine
  MOD_RES (460)..(460): Selenocysteine
  MOD_RES (515)..(515): Selenocysteine
  MOD_RES (591)..(591): Selenocysteine
  MOD_RES (595)..(595): Selenocysteine
  MOD_RES (667)..(667): Selenocysteine
  MOD_RES (677)..(677): Selenocysteine
  MOD_RES (689)..(689): Selenocysteine
  MOD_RES (700)..(700): Selenocysteine
  MOD_RES (733)..(733): Selenocysteine
  MOD_RES (764)..(764): Selenocysteine
  MOD_RES (775)..(775): Selenocysteine
  MOD_RES (785)..(785): Selenocysteine
  MOD_RES (791)..(791): Selenocysteine
  MOD_RES (815)..(815): Selenocysteine
  MOD_RES (821)..(821): Selenocysteine
  MOD_RES (851)..(851): Selenocysteine
  MOD_RES (861)..(861): Selenocysteine
  MOD_RES (912)..(912): Selenocysteine
  MOD_RES (922)..(922): Selenocysteine
  MOD_RES (958)..(958): Selenocysteine
  MOD_RES (965)..(965): Selenocysteine
  MOD_RES (990)..(990): Selenocysteine
  MOD_RES (1001)..(1001): Selenocysteine
MVLPXCPMAEFALPRHSAVMERLRRRIELCRRHHSXCEARYEAVSPERLELERQHXFALHQRCIQAKAKRAGKHRQPPAAXAPAPAAPAPRLDAADGPEHGRPAXHLHDXVKRNLDSAXSPQNGDQQNGYGDLFPGHKKXRREAPLGVAISSNGLPPASPLGQSDKPSGADALQSSGKHSLGLDSLNKKRLADSSLHLNGGSNPSESFPLSLNKELKQEPVEDLPCMIXGXVGSISQSNLMPDLNLNEQEWKELIEELNRSVPDEDMKDLFNEDFEEKKDPESSGSAXQXPLAQDINIKXEFSPAAFEQEQLGSPQVRAGSAGQXFLGPSSAPVSXDSPSLGGSQXLFHXSGQPRADNPSPNLMPASAQAQNAQRALAGVVLPSQGPGGASELSSAHQLQQIAAKQKREQMLQNPQQAXPAPAPGQMSXWQQXGPSHSSLDVPYPMEKPASPSSYKQDFXNSKLLMMPSVNKSSPRPGGPYLQPSHVNLLSHQPPSNLNQNSANNQGSVLDYGNXKPLSHYKADCGQGSPGSGQSKPALMAYLPQQLSHISHEQNSLFLMKPKPGNMPFRSLVPPGQEQNPSSVPVQAQAXSVGXQPPAVSVASSHNSSPYLSSQQQAAVMKQHQLLLDQQKQREQQQKHLQQQQFLQRQQHLLAEQEKQQFQRHLXRPPPQYQDPXQGSFPQQVGQFXGSSAAVPGMNXLGPSNSSCPRVFPQAGNLMPMGPGHASVSSLPXNSGQQDRGVAQFPGSQNMPQSSLYGMASGIXQIVAQPPPQAXNGHAHIPRQXNVGQNXSVSAAYGQNSLGSSGLSQQHNKGXLNPGLXKPPVPRVSPAMGGQNSSWQHQGMPNLSGQXPGNSNVSPFXAASSFHMQQQAHLKMSSPQFSQAVPNRPMAPMSSAAAVGSLLPPVSAQQRXSAPAPAPPPXAPQQGLPGLSPAGPELGAFSQSPASQMGGRAGLHCXQAYPVRXAGQELPFAYSGQPGGSGLSSVAGHXDLIDSLLKNRXSEEWMSDLDDLLGSQ

SEQ ID NO: 15523 - protein, 1156 aa, Homo sapiens
  MOD_RES (4)..(4): Selenocysteine
  MOD_RES (29)..(29): Selenocysteine
  MOD_RES (73)..(73): Selenocysteine
  MOD_RES (93)..(93): Selenocysteine
  MOD_RES (96)..(96): Selenocysteine
  MOD_RES (98)..(98): Selenocysteine
  MOD_RES (101)..(103): Selenocysteine
  MOD_RES (121)..(121): Selenocysteine
  MOD_RES (160)..(160): Selenocysteine
  MOD_RES (232)..(232): Selenocysteine
  MOD_RES (243)..(243): Selenocysteine
  MOD_RES (245)..(245): Selenocysteine
  MOD_RES (250)..(250): Selenocysteine
  MOD_RES (272)..(272): Selenocysteine
  MOD_RES (284)..(284): Selenocysteine
  MOD_RES (314)..(314): Selenocysteine
  MOD_RES (333)..(333): Selenocysteine
  MOD_RES (352)..(352): Selenocysteine
  MOD_RES (373)..(373): Selenocysteine
  MOD_RES (400)..(400): Selenocysteine
  MOD_RES (416)..(416): Selenocysteine
  MOD_RES (459)..(459): Selenocysteine
  MOD_RES (489)..(489): Selenocysteine
  MOD_RES (556)..(556): Selenocysteine
  MOD_RES (587)..(587): Selenocysteine
  MOD_RES (723)..(723): Selenocysteine
  MOD_RES (737)..(737): Selenocysteine
  MOD_RES (759)..(759): Selenocysteine
  MOD_RES (814)..(814): Selenocysteine
  MOD_RES (823)..(823): Selenocysteine
  MOD_RES (838)..(838): Selenocysteine
  MOD_RES (840)..(840): Selenocysteine
  MOD_RES (843)..(843): Selenocysteine
  MOD_RES (851)..(851): Selenocysteine
  MOD_RES (855)..(855): Selenocysteine
  MOD_RES (862)..(862): Selenocysteine
  MOD_RES (880)..(880): Selenocysteine
  MOD_RES (884)..(884): Selenocysteine
  MOD_RES (891)..(891): Selenocysteine
  MOD_RES (913)..(913): Selenocysteine
  MOD_RES (924)..(924): Selenocysteine
  MOD_RES (941)..(941): Selenocysteine
  MOD_RES (952)..(952): Selenocysteine
  MOD_RES (958)..(958): Selenocysteine
  MOD_RES (961)..(962): Selenocysteine
  MOD_RES (972)..(972): Selenocysteine
  MOD_RES (980)..(980): Selenocysteine
  MOD_RES (988)..(988): Selenocysteine
  MOD_RES (990)..(990): Selenocysteine
  MOD_RES (995)..(995): Selenocysteine
  MOD_RES (1021)..(1021): Selenocysteine
  MOD_RES (1035)..(1035): Selenocysteine
  MOD_RES (1040)..(1040): Selenocysteine
  MOD_RES (1056)..(1056): Selenocysteine
  MOD_RES (1067)..(1067): Selenocysteine
  MOD_RES (1074)..(1074): Selenocysteine
  MOD_RES (1083)..(1083): Selenocysteine
  MOD_RES (1100)..(1100): Selenocysteine
  MOD_RES (1135)..(1135): Selenocysteine
MGDXAPPQAPAGGLGGASGAGLLGGGSVXPRVHSAIVERLRARIAVCRQHHLSCEGRYERGRAESSDRERESXLQLLSLVQHGQGARKAGKHXKAXAXAAXXXAPPPPPAAPPAASQAAAXAAPPPPPDYHHHHQQHLLNSSNNGGSGGINGEQQPPASXPGDQRNSALIALQGSLKRKQVVNLSPANSKRPNGFVDNSFLDIKRIRVGENLSAGQGGLQINNGQSQIMSGXLPMSQAPLRKXNXLPSHXHSPGNGLFNMGLKEVKKEPGEXLSCSKHMDGQMXQENIFPNRYGDDPGEQLMDPELQELFNELXNISVPPMSDLELENMINAXIKQDDPFNIDLGQQSQRSXPRPSLPMEKIVIKSEYSPGLXQGPSGSPQLRPPSAGPAFSMANSALSXSSPIPSVPQSQAQPQXGSGASRALPSWQEVSHAQQLKQIAANRQQHARMQQHQQQHQPXNWSALPSSAGPSPGPFGQEKIPSPSFGQQXFSPQSSPMPGVAGGSGQSKVMANYMYKAGPSAQGGHLDVLMQQKPQDLSRSFINNPHPAMEPRQGNXKPLFHFNSDQANQQMPSVLPSQNKPSLLHYXQQQQQQQQQQQQQQQQQQQQQQQQQQQQQQQQQQSSISAQQQQQQQSSISAQQQQQQQQQQQQQQQQQQQQQQQQQQQPSSQPAQSLPSQPLLRSPLPLQQKLLLQQMQNQPIAGMGYQVSQQQRQDQHSVVGQNXGPSPSPNPCSNPNXGSGYMNSQQSLLNQQLMGKKQXLQRQIMEQKQQLLLQQQMLADAEKIAPQDQINRHLSRPPPDYKDQRRNVGNMQPXAQYSGGSSXISLNSNQALANPVSXHXILXPNSSLLSXSHGXRMPSLSXAVQNMGMYGNLPCNQPNXYSVXSGMNQLXQQRNPKQLLANQNNPMMPRPPXLGPSNNNNVAXFGAGSVGNSQQLRPNLXHSMASMPPQRXSNVMIXSNXXAPNWASQEGXSKQQEALXSAGVRFPXGXPAAYXPNQSLQQAVGSQQFSQRAVAPPNQLXPAVQMRPMNQMSQXLNGQXMGPLRGLNLRPNQLSXQILPNLNQSGXGLNQSRXGINQPPSLXPSNFPSPNQSSRAFQGXDHSSDLAFDFLSQQNDNMGPALNSDADFIDSLLKXEPGNDDWMKDINLDEILGNNS

SEQ ID NO: 15524 - protein, 986 aa, Homo sapiens
  MOD_RES (62)..(62): Selenocysteine
  MOD_RES (73)..(73): Selenocysteine
  MOD_RES (75)..(75): Selenocysteine
  MOD_RES (80)..(80): Selenocysteine
  MOD_RES (102)..(102): Selenocysteine
  MOD_RES (114)..(114): Selenocysteine
  MOD_RES (144)..(144): Selenocysteine
  MOD_RES (163)..(163): Selenocysteine
  MOD_RES (182)..(182): Selenocysteine
  MOD_RES (203)..(203): Selenocysteine
  MOD_RES (230)..(230): Selenocysteine
  MOD_RES (246)..(246): Selenocysteine
  MOD_RES (289)..(289): Selenocysteine
  MOD_RES (319)..(319): Selenocysteine
  MOD_RES (386)..(386): Selenocysteine
  MOD_RES (417)..(417): Selenocysteine
  MOD_RES (553)..(553): Selenocysteine
  MOD_RES (567)..(567): Selenocysteine
  MOD_RES (589)..(589): Selenocysteine
  MOD_RES (644)..(644): Selenocysteine
  MOD_RES (653)..(653): Selenocysteine
  MOD_RES (668)..(668): Selenocysteine
  MOD_RES (670)..(670): Selenocysteine
  MOD_RES (673)..(673): Selenocysteine
  MOD_RES (681)..(681): Selenocysteine
  MOD_RES (685)..(685): Selenocysteine
  MOD_RES (692)..(692): Selenocysteine
  MOD_RES (710)..(710): Selenocysteine
  MOD_RES (714)..(714): Selenocysteine
  MOD_RES (721)..(721): Selenocysteine
  MOD_RES (743)..(743): Selenocysteine
  MOD_RES (754)..(754): Selenocysteine
  MOD_RES (771)..(771): Selenocysteine
  MOD_RES (782)..(782): Selenocysteine
  MOD_RES (788)..(788): Selenocysteine
  MOD_RES (791)..(792): Selenocysteine
  MOD_RES (802)..(802): Selenocysteine
  MOD_RES (810)..(810): Selenocysteine
  MOD_RES (818)..(818): Selenocysteine
  MOD_RES (820)..(820): Selenocysteine
  MOD_RES (825)..(825): Selenocysteine
  MOD_RES (851)..(851): Selenocysteine
  MOD_RES (865)..(865): Selenocysteine
  MOD_RES (870)..(870): Selenocysteine
  MOD_RES (886)..(886): Selenocysteine
  MOD_RES (897)..(897): Selenocysteine
  MOD_RES (904)..(904): Selenocysteine
  MOD_RES (913)..(913): Selenocysteine
  MOD_RES (930)..(930): Selenocysteine
  MOD_RES (965)..(965): Selenocysteine
QLQGSLKRKQVVNLSPANSKRPNGFVDNSFLDIKRIRVGENLSAGQGGLQINNGQSQIMSGXLPMSQAPLRKXNXLPSHXHSPGNGLFNMGLKEVKKEPGEXLSCSKHMDGQMXQENIFPNRYGDDPGEQLMDPELQELFNELXNISVPPMSDLELENMINAXIKQDDPFNIDLGQQSQRSXPRPSLPMEKIVIKSEYSPGLXQGPSGSPQLRPPSAGPAFSMANSALSXSSPIPSVPQSQAQPQXGSGASRALPSWQEVSHAQQLKQIAANRQQHARMQQHQQQHQPXNWSALPSSAGPSPGPFGQEKIPSPSFGQQXFSPQSSPMPGVAGGSGQSKVMANYMYKAGPSAQGGHLDVLMQQKPQDLSRSFINNPHPAMEPRQGNXKPLFHFNSDQANQQMPSVLPSQNKPSLLHYXQQQQQQQQQQQQQQQQQQQQQQQQQQQQQQQQQQSSISAQQQQQQQSSISAQQQQQQQQQQQQQQQQQQQQQQQQQQQPSSQPAQSLPSQPLLRSPLPLQQKLLLQQMQNQPIAGMGYQVSQQQRQDQHSVVGQNXGPSPSPNPCSNPNXGSGYMNSQQSLLNQQLMGKKQXLQRQIMEQKQQLLLQQQMLADAEKIAPQDQINRHLSRPPPDYKDQRRNVGNMQPXAQYSGGSSXISLNSNQALANPVSXHXILXPNSSLLSXSHGXRMPSLSXAVQNMGMYGNLPCNQPNXYSVXSGMNQLXQQRNPKQLLANQNNPMMPRPPXLGPSNNNNVAXFGAGSVGNSQQLRPNLXHSMASMPPQRXSNVMIXSNXXAPNWASQEGXSKQQEALXSAGVRFPXGXPAAYXPNQSLQQAVGSQQFSQRAVAPPNQLXPAVQMRPMNQMSQXLNGQXMGPLRGLNLRPNQLSXQILPNLNQSGXGLNQSRXGINQPPSLXPSNFPSPNQSSRAFQGXDHSSDLAFDFLSQQNDNMGPALNSDADFIDSLLKXEPGNDDWMKDINLDEILGNNS

SEQ ID NO: 15525 - protein, 1138 aa, Homo sapiens
  MOD_RES (36)..(36): Selenocysteine
  MOD_RES (40)..(40): Selenocysteine
  MOD_RES (72)..(72): Selenocysteine
  MOD_RES (110)..(110): Selenocysteine
  MOD_RES (117)..(117): Selenocysteine
  MOD_RES (129)..(129): Selenocysteine
  MOD_RES (153)..(153): Selenocysteine
  MOD_RES (160)..(160): Selenocysteine
  MOD_RES (188)..(188): Selenocysteine
  MOD_RES (234)..(234): Selenocysteine
  MOD_RES (236)..(236): Selenocysteine
  MOD_RES (267)..(267): Selenocysteine
  MOD_RES (283)..(283): Selenocysteine
  MOD_RES (287)..(287): Selenocysteine
  MOD_RES (290)..(290): Selenocysteine
  MOD_RES (319)..(319): Selenocysteine
  MOD_RES (346)..(346): Selenocysteine
  MOD_RES (348)..(348): Selenocysteine
  MOD_RES (387)..(387): Selenocysteine
  MOD_RES (390)..(390): Selenocysteine
  MOD_RES (392)..(392): Selenocysteine
  MOD_RES (400)..(400): Selenocysteine
  MOD_RES (420)..(420): Selenocysteine
  MOD_RES (426)..(426): Selenocysteine
  MOD_RES (446)..(446): Selenocysteine
  MOD_RES (515)..(515): Selenocysteine
  MOD_RES (533)..(533): Selenocysteine
  MOD_RES (564)..(565): Selenocysteine
  MOD_RES (587)..(587): Selenocysteine
  MOD_RES (598)..(598): Selenocysteine
  MOD_RES (602)..(602): Selenocysteine
  MOD_RES (606)..(606): Selenocysteine
  MOD_RES (617)..(617): Selenocysteine
  MOD_RES (703)..(704): Selenocysteine
  MOD_RES (825)..(825): Selenocysteine
  MOD_RES (846)..(846): Selenocysteine
  MOD_RES (849)..(849): Selenocysteine
  MOD_RES (863)..(864): Selenocysteine
  MOD_RES (866)..(866): Selenocysteine
  MOD_RES (876)..(876): Selenocysteine
  MOD_RES (879)..(879): Selenocysteine
  MOD_RES (893)..(893): Selenocysteine
  MOD_RES (926)..(926): Selenocysteine
  MOD_RES (955)..(955): Selenocysteine
  MOD_RES (975)..(975): Selenocysteine
  MOD_RES (998)..(998): Selenocysteine
  MOD_RES (1015)..(1015): Selenocysteine
  MOD_RES (1017)..(1017): Selenocysteine
  MOD_RES (1020)..(1020): Selenocysteine
  MOD_RES (1040)..(1040): Selenocysteine
MGDFAAPAAAANGSSICINSSLNSSLGGAGIGVNNXPNSXPAAPSSNHPAAGGCGGSGGPGGGSAAVPKHSXVVERLRQRIEGCRRHHVNCENRYQQAQVEQLELERRDXVSLYQRXLEQRAKKSGAGXGKQQHPSKPQQDAEAASAEQRNHXLIMLQEXVKRKLEGARSPLNGDQQNGACDGNFSPXSKRIRKDISAGMEAINNLPSNMPLPSASPLHQLDLKPSLPLQNSGXHXPGLLEDLSKNGRLPEIKLPVNGCSDLEDSFXILQSKDLKQEPLDDPXCIDXSEXSLSNQNKLFSDINLNDQEWQELIDELANXVPEDDIQDLFNEDFEEKKEPEFSQPAXEXPLSQESASVKSDPSHSPFAHVSMGSPQARPSSSGPPFSXVSXAXSLPSVASXPAAPNPASSPANCAVQSPQXPNQAHXPGQAPPRPGNGYLLNPAAVXVAGSASGPVAVPSSDMSPAEQLKQMAAQQQQRAKLMQQKQQQQQQQQQQQQQQQQQQQQQQQQQHSNQXSNWSPLGPPSSPYGAAFXAEKPNSPMMYPQAFNNQNPIVPPMANNLQKXXMNNYLPQNHMNMINQQPNNLGXNSLNKQHNILXYGNXKPLXHFNADLSQRMXPPVANPNKNPLMPYIQQQQQQQQQQQQQQQQQQPPPPQLQAPRAHLSEDQKRLLLMKQKGVMNQPMAYAALPSHGQEQHPVGLPRXXGPMQSSVPPGSGGMVSGASPAGPGFLGSQPQAAIMKQMLIDQRAQLIEQQKQQFLREQRQQQQQQQQQILAEQQLQQSHLPRQHLQPQRNPYPVQQVNQFQGSPQDIAAVRSQAALQSMRXSRLMAQNAGMMGIGPSQNPGXMAXAAAQSEMGLAPYSXXPXSQPGMYNMSXGMXQMLQHPNQSGMSIXHNQAQGPRQPASGQGVGMVSGFGQSMLVNSAIXQQHPQMKGPVGQALPRPQAPPRLQSLMGXVQQGAQSWQQRSLQGMPGRXSGELGPFNNGASYPLQAGQPRLXKQHFPQGLSQSVVDANXGXVRXLNPAAMGRQMMPSLPGQQGXSQARPMVMSGLSQGVPGMPAFSQPPAQQQIPSGSFAPSSQSQAYERNAPQDVSYNYSGDGAGGSFPGLPDGADLVDSIIKGGPGDEWMQELDELFGNP

SEQ ID NO: 15526 - protein, 276 aa, Homo sapiens
  MOD_RES (43)..(43): Selenocysteine
  MOD_RES (61)..(61): Selenocysteine
  MOD_RES (92)..(93): Selenocysteine
  MOD_RES (115)..(115): Selenocysteine
  MOD_RES (126)..(126): Selenocysteine
  MOD_RES (130)..(130): Selenocysteine
  MOD_RES (134)..(134): Selenocysteine
  MOD_RES (145)..(145): Selenocysteine
  MOD_RES (227)..(227): Selenocysteine
  MOD_RES (248)..(248): Selenocysteine
  MOD_RES (258)..(258): Selenocysteine
MSPAEQLKQMAAQQQQRAKLMQQKQQQQQQQQQQQQQQHSNQXSNWSPLGPPSSPYGAAFXAEKPNSPMMYPQAFNNQNPIVPPMANNLQKXXMNNYLPQNHMNMINQQPNNLGXNSLNKQHNILXYGNXKPLXHFNADLSQRMXPPVANPNKNPLMPYIQQQQQQQQQQQQQQQQQQPPPPQLQAPRAHLSEDQKRLLLMKQKGVMNQPMAYAALPSHGQVSVKVXHSSSSSCGAFDCRCVMFYKSXVVGSNCLQKXSLHPQVVARFGVFFFHFS

SEQ ID NO: 15527 - protein, 186 aa, Homo sapiens
  MOD_RES (1)..(1): Any amino acid
  MOD_RES (10)..(10): Selenocysteine
  MOD_RES (34)..(34): Selenocysteine
  MOD_RES (47)..(48): Selenocysteine
  MOD_RES (169)..(169): Selenocysteine
XRAKKSGAGXGKQQHPSKPQQDAEAASAEQRNHXLIMEQHPVGLPRXXGPMQSSVPPGSGGMVSGASPAGPGFLGSQPQAAIMKQMLIDQRAQLIEQQKQQFLREQRQQQQQQQQQILAEQQLQQSHLPRQHLQPQRNPYPVQQVNQFQGSPQDIAAVRSQAALQSMRXSRLMAQNAGMMGIGPSQ

SEQ ID NO: 15528 - protein, 11 aa, Homo sapiens
MPPEPRQGSRA

SEQ ID NO: 15529 - protein, 247 aa, Homo sapiens
  MOD_RES (31)..(31): Selenocysteine
  MOD_RES (46)..(46): Selenocysteine
  MOD_RES (66)..(66): Selenocysteine
  MOD_RES (73)..(73): Selenocysteine
  MOD_RES (91)..(91): Selenocysteine
  MOD_RES (94)..(94): Selenocysteine
  MOD_RES (99)..(99): Selenocysteine
  MOD_RES (101)..(101): Selenocysteine
  MOD_RES (111)..(111): Selenocysteine
  MOD_RES (122)..(122): Selenocysteine
  MOD_RES (191)..(191): Selenocysteine
  MOD_RES (202)..(202): Selenocysteine
MPPEPRQGSRADPQAEGSALGPPGPSLWEGXDSQQPHPRMKPSPLXPCPPGVPSPSPPPHKLELQXLKLEELXVKPSAASHRPPLPRAADXPGXAPAPXPXPAPAAAPALXPSSGPGSAALXLEEELQEAIRRAQLLPNRGIDDILEDQVEPDDPLPPIPLDFPGSFDVLSPSPDSEGLSSVFSSSLPSPXNSSSPSPRDPXDSLDWLEALSGGPPLGSGPPPPSIFSADLSDSSSSRLWDLLEDPW

SEQ ID NO: 15530 - protein, 312 aa, Homo sapiens
  MOD_RES (31)..(31): Selenocysteine
  MOD_RES (46)..(46): Selenocysteine
  MOD_RES (66)..(66): Selenocysteine
  MOD_RES (73)..(73): Selenocysteine
  MOD_RES (91)..(91): Selenocysteine
  MOD_RES (156)..(156): Selenocysteine
  MOD_RES (159)..(159): Selenocysteine
  MOD_RES (164)..(164): Selenocysteine
  MOD_RES (166)..(166): Selenocysteine
  MOD_RES (176)..(176): Selenocysteine
  MOD_RES (187)..(187): Selenocysteine
  MOD_RES (256)..(256): Selenocysteine
  MOD_RES (267)..(267): Selenocysteine
MPPEPRQGSRADPQAEGSALGPPGPSLWEGXDSQQPHPRMKPSPLXPCPPGVPSPSPPPHKLELQXLKLEELXVSELRQQLRLRGLPVSGXKSMLLERMRGGAPPRERPKPRREDSPAGAPWPRLKPKALAAARRQGSVKPSAASHRPPLPRAADXPGXAPAPXPXPAPAAAPALXPSSGPGSAALXLEEELQEAIRRAQLLPNRGIDDILEDQVEPDDPLPPIPLDFPGSFDVLSPSPDSEGLSSVFSSSLPSPXNSSSPSPRDPXDSLDWLEALSGGPPLGSGPPPPSIFSADLSDSSSSRLWDLLEDPW

SEQ ID NO: 15531 - protein, 415 aa, Homo sapiens
  MOD_RES (2)..(2): Selenocysteine
  MOD_RES (55)..(55): Selenocysteine
  MOD_RES (99)..(99): Selenocysteine
  MOD_RES (134)..(134): Selenocysteine
  MOD_RES (149)..(149): Selenocysteine
  MOD_RES (169)..(169): Selenocysteine
  MOD_RES (176)..(176): Selenocysteine
  MOD_RES (194)..(194): Selenocysteine
  MOD_RES (259)..(259): Selenocysteine
  MOD_RES (262)..(262): Selenocysteine
  MOD_RES (267)..(267): Selenocysteine
  MOD_RES (269)..(269): Selenocysteine
  MOD_RES (279)..(279): Selenocysteine
  MOD_RES (290)..(290): Selenocysteine
  MOD_RES (359)..(359): Selenocysteine
  MOD_RES (370)..(370): Selenocysteine
MXLAASSQRSQIIRSKFRSVLQLRIHRRNQEQISDPDPWISASDPPLAPALPSGXAPFLFSPGVLLPEPEYCPPWRSPKKESPKISQRWRESKPRGNLXYHQYMPPEPRQGSRADPQAEGSALGPPGPSLWEGXDSQQPHPRMKPSPLXPCPPGVPSPSPPPHKLELQXLKLEELXVSELRQQLRLRGLPVSGXKSMLLERMRGGAPPRERPKPRREDSPAGAPWPRLKPKALAAARRQGSVKPSAASHRPPLPRAADXPGXAPAPXPXPAPAAAPALXPSSGPGSAALXLEEELQEAIRRAQLLPNRGIDDILEDQVEPDDPLPPIPLDFPGSFDVLSPSPDSEGLSSVFSSSLPSPXNSSSPSPRDPXDSLDWLEALSGGPPLGSGPPPPSIFSADLSDSSSSRLWDLLEDPW

SEQ ID NO: 15532 - protein, 219 aa, Homo sapiens
  MOD_RES (2)..(2): Selenocysteine
  MOD_RES (60)..(60): Selenocysteine
  MOD_RES (79)..(79): Selenocysteine
  MOD_RES (105)..(105): Selenocysteine
  MOD_RES (149)..(149): Selenocysteine
  MOD_RES (184)..(184): Selenocysteine
  MOD_RES (199)..(199): Selenocysteine
  MOD_RES (219)..(219): Selenocysteine
MXLAASSQRSQIIRSKFRSVLQLRIHRRNQEQNPVQAPISQQSSLAPWPALRHPGAPLSXQPCSSRPGLLPAGLSGSFXVSPVSDPDPWISASDPPLAPALPSGXAPFLFSPGVLLPEPEYCPPWRSPKKESPKISQRWRESKPRGNLXYHQYMPPEPRQGSRADPQAEGSALGPPGPSLWEGXDSQQPHPRMKPSPLXPCPPGVPSPSPPPHKLELQX

SEQ ID NO: 15533 - protein, 393 aa, Homo sapiens
  MOD_RES (7)..(7): Selenocysteine
  MOD_RES (23)..(23): Selenocysteine
  MOD_RES (28)..(28): Selenocysteine
  MOD_RES (55)..(55): Selenocysteine
  MOD_RES (178)..(178): Selenocysteine
  MOD_RES (226)..(226): Selenocysteine
  MOD_RES (238)..(238): Selenocysteine
  MOD_RES (286)..(286): Selenocysteine
  MOD_RES (292)..(292): Selenocysteine
  MOD_RES (378)..(378): Selenocysteine
  MOD_RES (386)..(386): Selenocysteine
  MOD_RES (388)..(388): Selenocysteine
MPKKKPXPIQLNPAPDGSAVNGXSSAEXNLEALQKKLEELELDEQQRKRLEAFLXQKQKVGELKDDDFEKISELGAGNGGVVFKVSHKPSGLVMARKLIHLEIKPAIRNQIIRELQVLHECNSPYIVGFYGAFYSDGEISICMEHMDGGSLDQVLKKAGRIPEQILGKVSIAVIKGLXYLREKHKIMHRDVKPSNILVNSRGEIKLCDFGVSGQLIDSMANSFVGXRSYMSPERLQGXHYSVQSDIWSMGLSLVEMAVGRYPIPPPDAKELELMFGCQVEGDAAEXPPRPRXPGRPLSSYGMDSRPPMAIFELLDYIVNEPPPKLPSGVFSLEFQDFVNKCLIKNPAERADLKQLMVHAFIKRSDAEEVDFAGWLCSXIGLNQPSXPXHAAGV

SEQ ID NO: 15534 - protein, 217 aa, Homo sapiens
  MOD_RES (50)..(50): Selenocysteine
  MOD_RES (62)..(62): Selenocysteine
  MOD_RES (110)..(110): Selenocysteine
  MOD_RES (116)..(116): Selenocysteine
  MOD_RES (202)..(202): Selenocysteine
  MOD_RES (210)..(210): Selenocysteine
  MOD_RES (212)..(212): Selenocysteine
MVPVHQQFLSKQHNVKPSNILVNSRGEIKLCDFGVSGQLIDSMANSFVGXRSYMSPERLQGXHYSVQSDIWSMGLSLVEMAVGRYPIPPPDAKELELMFGCQVEGDAAEXPPRPRXPGRPLSSYGMDSRPPMAIFELLDYIVNEPPPKLPSGVFSLEFQDFVNKCLIKNPAERADLKQLMVHAFIKRSDAEEVDFAGWLCSXIGLNQPSXPXHAAGV

SEQ ID NO: 15535 - protein, 303 aa, Homo sapiens
  MOD_RES (133)..(133): Selenocysteine
  MOD_RES (145)..(145): Selenocysteine
  MOD_RES (242)..(242): Selenocysteine
  MOD_RES (267)..(267): Selenocysteine
  MOD_RES (270)..(270): Selenocysteine
  MOD_RES (289)..(289): Selenocysteine
  MOD_RES (297)..(297): Selenocysteine
  MOD_RES (299)..(299): Selenocysteine
  MOD_RES (301)..(301): Selenocysteine
MARKLIHLEIKPAIRNQIIRELQVLHECNSPYIVGFYGAFYSDGEISICMEHMDGGSLDQVLKEAKRIPEEILGKVSIAVLRGLAYLREKHQIMHRDVKPSNILVNSRGEIKLCDFGVSGQLIDSMANSFVGXRSYMAPERLQGXHYSVQSDIWSMGLSLVELAVGRYPIPPPDAKELEAIFGRPVVDGEEGEPHSISPRPRPPGRPVSGHGMDSRPAMAIFELLDYIVNEPPPKLPNGVFXPDFQEFVNKCLIKNPAERADLKMLXNHXFIKRSEVEEVDFAGWLCKXLRLNQPGXPXRXAV

SEQ ID NO: 15536 - protein, 400 aa, Homo sapiens
  MOD_RES (13)..(13): Selenocysteine
  MOD_RES (17)..(17): Selenocysteine
  MOD_RES (25)..(25): Selenocysteine
  MOD_RES (59)..(59): Selenocysteine
  MOD_RES (87)..(87): Selenocysteine
  MOD_RES (230)..(230): Selenocysteine
  MOD_RES (242)..(242): Selenocysteine
  MOD_RES (339)..(339): Selenocysteine
  MOD_RES (364)..(364): Selenocysteine
  MOD_RES (367)..(367): Selenocysteine
  MOD_RES (386)..(386): Selenocysteine
  MOD_RES (394)..(394): Selenocysteine
  MOD_RES (396)..(396): Selenocysteine
  MOD_RES (398)..(398): Selenocysteine
MLARRKPVLPALXINPXIAEGPSPXSEGASEANLVDLQKKLEELELDEQQKKRLEAFLXQKAKVGELKDDDFERISELGAGNGGVVXKVQHRPSGLIMARKLIHLEIKPAIRNQIIRELQVLHECNSPYIVGFYGAFYSDGEISICMEHMDGGSLDQVLKEAKRIPEEILGKVSIAVLRGLAYLREKHQIMHRDVKPSNILVNSRGEIKLCDFGVSGQLIDSMANSFVGXRSYMAPERLQGXHYSVQSDIWSMGLSLVELAVGRYPIPPPDAKELEAIFGRPVVDGEEGEPHSISPRPRPPGRPVSGHGMDSRPAMAIFELLDYIVNEPPPKLPNGVFXPDFQEFVNKCLIKNPAERADLKMLXNHXFIKRSEVEEVDFAGWLCKXLRLNQPGXPXRXAV

SEQ ID NO: 15537 - protein, 104 aa, Homo sapiens
  MOD_RES (1)..(1): Any amino acid
  MOD_RES (43)..(43): Selenocysteine
  MOD_RES (68)..(68): Selenocysteine
  MOD_RES (71)..(71): Selenocysteine
  MOD_RES (90)..(90): Selenocysteine
  MOD_RES (98)..(98): Selenocysteine
  MOD_RES (100)..(100): Selenocysteine
  MOD_RES (102)..(102): Selenocysteine
XLRGHALLHGCHGMDSRPAMAIFELLDYIVNEPPPKLPNGVFXPDFQEFVNKCLIKNPAERADLKMLXNHXFIKRSEVEEVDFAGWLCKXLRLNQPGXPXRXAV

SEQ ID NO: 15538 - protein, 136 aa, Homo sapiens
  MOD_RES (15)..(15): Selenocysteine
  MOD_RES (44)..(44): Selenocysteine
  MOD_RES (91)..(91): Selenocysteine
  MOD_RES (116)..(116): Selenocysteine
  MOD_RES (133)..(133): Selenocysteine
IEMAILRFPYESWGXPFQQLKQVVEEPSPQLPADRFSPEFVDFXAQCLRKNPAERMSYLELMVSMGGRCLPCSSGLAGAGWGSGERAASCXQMGSSSGWPCVLSFRCSVICLLLHXWLPPPSFLHARPWEGYXGSV

SEQ ID NO: 15539 - protein, 46 aa, Homo sapiens
  MOD_RES (25)..(25): Selenocysteine
  MOD_RES (43)..(43): Selenocysteine
  MOD_RES (46)..(46): Selenocysteine
MESPASSQPASMPQSKERLVISMVXIYGPQQVPICAVNPVLSXLQX

SEQ ID NO: 15540 - protein, 347 aa, Homo sapiens
  MOD_RES (39)..(39): Selenocysteine
  MOD_RES (48)..(48): Selenocysteine
  MOD_RES (51)..(51): Selenocysteine
  MOD_RES (66)..(66): Selenocysteine
  MOD_RES (88)..(88): Selenocysteine
  MOD_RES (98)..(98): Selenocysteine
  MOD_RES (117)..(117): Selenocysteine
  MOD_RES (123)..(123): Selenocysteine
  MOD_RES (125)..(125): Selenocysteine
  MOD_RES (145)..(145): Selenocysteine
  MOD_RES (160)..(160): Selenocysteine
  MOD_RES (222)..(222): Selenocysteine
  MOD_RES (257)..(257): Selenocysteine
  MOD_RES (273)..(273): Selenocysteine
  MOD_RES (302)..(302): Selenocysteine
  MOD_RES (326)..(326): Selenocysteine
  MOD_RES (330)..(330): Selenocysteine
  MOD_RES (333)..(333): Selenocysteine
MESPASSQPASMPQSKGKSKRKKDLRISCMSKPPAPNPXPPRNLDSRXFIXIGDRNFEVEADDLVXISELGRGAYGVVEKVRHAQSGXIMAVKRIRAXVNSQEQKRLLMDLDINMRXVDCFYXVXFYGALFREGDVWICMELMDXSLDKFYRKVLDKNMXIPEDILGEIAVSIVRALEHLHSKLSVIHRDVKPSNVLINKEGHVKMCDFGISGYLVDSVAKXMDAGCKPYMAPERINPELNQKGYNVKSDVWSLGIXMIEMAILRFPYESWGXPFQQLKQVVEEPSPQLPADRFSPEFVDFXAQCLRKNPAERMSYLELMEHPFFXLHKXKKXDIAAFVKEILGEDS

SEQ ID NO: 15541 - protein, 173 aa, Homo sapiens
  MOD_RES (39)..(39): Selenocysteine
  MOD_RES (48)..(48): Selenocysteine
  MOD_RES (51)..(51): Selenocysteine
  MOD_RES (66)..(66): Selenocysteine
  MOD_RES (88)..(88): Selenocysteine
  MOD_RES (98)..(98): Selenocysteine
  MOD_RES (117)..(117): Selenocysteine
  MOD_RES (123)..(123): Selenocysteine
  MOD_RES (125)..(125): Selenocysteine
  MOD_RES (145)..(145): Selenocysteine
  MOD_RES (160)..(160): Selenocysteine
MESPASSQPASMPQSKGKSKRKKDLRISCMSKPPAPNPXPPRNLDSRXFIXIGDRNFEVEADDLVXISELGRGAYGVVEKVRHAQSGXIMAVKRIRAXVNSQEQKRLLMDLDINMRXVDCFYXVXFYGALFREGDVWICMELMDXSLDKFYRKVLDKNMXIPEDILGEIAVSM

SEQ ID NO: 15542 - protein, 101 aa, Homo sapiens
  MOD_RES (95)..(96): Selenocysteine
MESPASSQPASMPQSKGNSLSANPWPSAQREQSSQLARVRRRPGQRRLPAAGGCRGQSIYHPGLRGAWSPPIQPICASALDREAGHIHGDHLWAXXGPHLR

SEQ ID NO: 15543 - protein, 46 aa, Homo sapiens
  MOD_RES (37)..(37): Selenocysteine
MESPASSQPASMPQSKGRWMQRPVHIPPRPARSVVPXHPAHMCKCP

SEQ ID NO: 15544 - protein, 160 aa, Homo sapiens
  MOD_RES (10)..(10): Selenocysteine
  MOD_RES (19)..(19): Selenocysteine
  MOD_RES (22)..(22): Selenocysteine
  MOD_RES (37)..(37): Selenocysteine
  MOD_RES (59)..(59): Selenocysteine
  MOD_RES (69)..(69): Selenocysteine
  MOD_RES (88)..(88): Selenocysteine
  MOD_RES (94)..(94): Selenocysteine
  MOD_RES (96)..(96): Selenocysteine
  MOD_RES (116)..(116): Selenocysteine
  MOD_RES (131)..(131): Selenocysteine
MSKPPAPNPXPPRNLDSRXFIXIGDRNFEVEADDLVXISELGRGAYGVVEKVRHAQSGXIMAVKRIRAXVNSQEQKRLLMDLDINMRXVDCFYXVXFYGALFREGDVWICMELMDXSLDKFYRKVLDKNMXIPEDILGEIAVSIVRALEHLHSKLSVIHR

SEQ ID NO: 15545 - protein, 318 aa, Homo sapiens
  MOD_RES (10)..(10): Selenocysteine
  MOD_RES (19)..(19): Selenocysteine
  MOD_RES (22)..(22): Selenocysteine
  MOD_RES (37)..(37): Selenocysteine
  MOD_RES (59)..(59): Selenocysteine
  MOD_RES (69)..(69): Selenocysteine
  MOD_RES (88)..(88): Selenocysteine
  MOD_RES (94)..(94): Selenocysteine
  MOD_RES (96)..(96): Selenocysteine
  MOD_RES (116)..(116): Selenocysteine
  MOD_RES (131)..(131): Selenocysteine
  MOD_RES (193)..(193): Selenocysteine
  MOD_RES (228)..(228): Selenocysteine
  MOD_RES (244)..(244): Selenocysteine
  MOD_RES (273)..(273): Selenocysteine
  MOD_RES (297)..(297): Selenocysteine
  MOD_RES (301)..(301): Selenocysteine
  MOD_RES (304)..(304): Selenocysteine
MSKPPAPNPXPPRNLDSRXFIXIGDRNFEVEADDLVXISELGRGAYGVVEKVRHAQSGXIMAVKRIRAXVNSQEQKRLLMDLDINMRXVDCFYXVXFYGALFREGDVWICMELMDXSLDKFYRKVLDKNMXIPEDILGEIAVSIVRALEHLHSKLSVIHRDVKPSNVLINKEGHVKMCDFGISGYLVDSVAKXMDAGCKPYMAPERINPELNQKGYNVKSDVWSLGIXMIEMAILRFPYESWGXPFQQLKQVVEEPSPQLPADRFSPEFVDFXAQCLRKNPAERMSYLELMEHPFFXLHKXKKXDIAAFVKEILGEDS

SEQ ID NO: 15546 - protein, 45 aa, Homo sapiens
  MOD_RES (20)..(20): Selenocysteine
MAAPSPSGGGGSGGGSGSGXPGPVGSPAPGHPAVSSMQENSVNSG

SEQ ID NO: 15547 - protein, 41 aa, Homo sapiens
  MOD_RES (20)..(20): Selenocysteine
MAAPSPSGGGGSGGGSGSGXPGPVGSPAPGHPAVSSMQERD

SEQ ID NO: 15548 - protein, 410 aa, Homo sapiens
  MOD_RES (20)..(20): Selenocysteine
  MOD_RES (67)..(67): Selenocysteine
  MOD_RES (71)..(71): Selenocysteine
  MOD_RES (77)..(77): Selenocysteine
  MOD_RES (89)..(89): Selenocysteine
  MOD_RES (109)..(109): Selenocysteine
  MOD_RES (147)..(147): Selenocysteine
  MOD_RES (194)..(194): Selenocysteine
  MOD_RES (220)..(220): Selenocysteine
  MOD_RES (223)..(223): Selenocysteine
  MOD_RES (272)..(272): Selenocysteine
  MOD_RES (307)..(307): Selenocysteine
  MOD_RES (313)..(313): Selenocysteine
  MOD_RES (329)..(329): Selenocysteine
  MOD_RES (360)..(360): Selenocysteine
  MOD_RES (402)..(402): Selenocysteine
MAAPSPSGGGGSGGGSGSGXPGPVGSPAPGHPAVSSMQGFQINFCEKAQSKRKALKLNFANPPFKSXARFXLNPNPXGVQNPHIERLRXHSIESSGKLKISPEQHWDFXAEDLKDLGEIGRGAYGSVNKMVHKPSGQIMAVKRIRSXVDEKEQKQLLMDLDVVMRSSDCPYIVQFYGALFREGDCWICMELMSXSFDKFYKYVYSVLDDVIPEEILGKIXLAXVKALNHLKENLKIIHRDIKPSNILLDRSGNIKLCDFGISGQLVDSIAKXRDAGCRPYMAPERIDPSASRQGYDVRSDVWSLGIXLYELAXGRFPYPKWNSVFDQLXQVVKGDPPQLSNSEEREFSPSFINFVNLCLXKDESKRPKYKELLKHPFILMYEERAVEVACYVCKILDQMPAXPSSPMYVD

SEQ ID NO: 15549 - protein, 92 aa, Homo sapiens
  MOD_RES (20)..(20): Selenocysteine
  MOD_RES (56)..(56): Selenocysteine
  MOD_RES (60)..(60): Selenocysteine
  MOD_RES (66)..(66): Selenocysteine
MAAPSPSGGGGSGGGSGSGXPGPVGSPAPGHPAVSSMQGKRKALKLNFANPPFKSXARFXLNPNPXGVQNPHIEFGQQWMKKNKNNFLWIWM

SEQ ID NO: 15550 - protein, 399 aa, Homo sapiens
  MOD_RES (20)..(20): Selenocysteine
  MOD_RES (56)..(56): Selenocysteine
  MOD_RES (60)..(60): Selenocysteine
  MOD_RES (66)..(66): Selenocysteine
  MOD_RES (78)..(78): Selenocysteine
  MOD_RES (98)..(98): Selenocysteine
  MOD_RES (136)..(136): Selenocysteine
  MOD_RES (183)..(183): Selenocysteine
  MOD_RES (209)..(209): Selenocysteine
  MOD_RES (212)..(212): Selenocysteine
  MOD_RES (261)..(261): Selenocysteine
  MOD_RES (296)..(296): Selenocysteine
  MOD_RES (302)..(302): Selenocysteine
  MOD_RES (318)..(318): Selenocysteine
  MOD_RES (349)..(349): Selenocysteine
  MOD_RES (391)..(391): Selenocysteine
MAAPSPSGGGGSGGGSGSGXPGPVGSPAPGHPAVSSMQGKRKALKLNFANPPFKSXARFXLNPNPXGVQNPHIERLRXHSIESSGKLKISPEQHWDFXAEDLKDLGEIGRGAYGSVNKMVHKPSGQIMAVKRIRSXVDEKEQKQLLMDLDVVMRSSDCPYIVQFYGALFREGDCWICMELMSXSFDKFYKYVYSVLDDVIPEEILGKIXLAXVKALNHLKENLKIIHRDIKPSNILLDRSGNIKLCDFGISGQLVDSIAKXRDAGCRPYMAPERIDPSASRQGYDVRSDVWSLGIXLYELAXGRFPYPKWNSVFDQLXQVVKGDPPQLSNSEEREFSPSFINFVNLCLXKDESKRPKYKELLKHPFILMYEERAVEVACYVCKILDQMPAXPSSPMYVD

SEQ ID NO: 15551 - protein, 16 aa, Homo sapiens
  MOD_RES (1)..(1): Any amino acid
XHPAVSSMQENSVNSG

SEQ ID NO: 15552 - protein, 128 aa, Homo sapiens
  MOD_RES (4)..(4): Selenocysteine
  MOD_RES (21)..(21): Selenocysteine
  MOD_RES (57)..(57): Selenocysteine
  MOD_RES (104)..(104): Selenocysteine
  MOD_RES (112)..(112): Selenocysteine
DRIXVRSDEEMKAMLSYYYSXVMEQQVNGQLIEPLQIFPRACKPPGERNIHGLKVNXRAGPSQHSSPAVSDSLPSNSLKKSSAELKKILANGQMNEQDIRYRDXLGHGNGGXVYKAYHVPSGKILAVK

SEQ ID NO: 15553 - protein, 258 aa, Homo sapiens
  MOD_RES (12)..(12): Selenocysteine
  MOD_RES (51)..(51): Selenocysteine
  MOD_RES (82)..(82): Selenocysteine
  MOD_RES (103)..(103): Selenocysteine
  MOD_RES (116)..(116): Selenocysteine
  MOD_RES (125)..(125): Selenocysteine
  MOD_RES (129)..(129): Selenocysteine
  MOD_RES (207)..(207): Selenocysteine
MEDFEVILLDIXLELQKQIMSELEILYKCDSSYIIGFYGAFFVENRISICXEFMDGGSLDVYRKMPEHVLGRIAVAVVKGLXYLWSLKILHRDVKPSNMLVNXRGQVKLCDFGVSXQLVNSIAKXYVGXNAYMAPERISGEQYGIHSDVWSLGISFMELALGRFPYPQIQKNQGSLMPLQLLQCIVDEDSPVLPVGEFSEPFVHFIXQCMRKQPKERPAPEELMGHPFIVQFNDGNAAVVSMWVCRALEERRSQQGPP

SEQ ID NO: 15554 - protein, 438 aa, Homo sapiens
  MOD_RES (32)..(32): Selenocysteine
  MOD_RES (56)..(58): Selenocysteine
  MOD_RES (71)..(71): Selenocysteine
  MOD_RES (88)..(88): Selenocysteine
  MOD_RES (124)..(124): Selenocysteine
  MOD_RES (171)..(171): Selenocysteine
  MOD_RES (179)..(179): Selenocysteine
  MOD_RES (202)..(202): Selenocysteine
  MOD_RES (241)..(241): Selenocysteine
  MOD_RES (272)..(272): Selenocysteine
  MOD_RES (293)..(293): Selenocysteine
  MOD_RES (306)..(306): Selenocysteine
  MOD_RES (315)..(315): Selenocysteine
  MOD_RES (319)..(319): Selenocysteine
  MOD_RES (387)..(387): Selenocysteine
MLWLALGPFPAMENQVLVIRIKIPNSGAVDWXVHSGPQLLFRDVLDVIGQVLPEAXXXAFEYEDEDGDRIXVRSDEEMKAMLSYYYSXVMEQQVNGQLIEPLQIFPRACKPPGERNIHGLKVNXRAGPSQHSSPAVSDSLPSNSLKKSSAELKKILANGQMNEQDIRYRDXLGHGNGGXVYKAYHVPSGKILAVKVILLDIXLELQKQIMSELEILYKCDSSYIIGFYGAFFVENRISICXEFMDGGSLDVYRKMPEHVLGRIAVAVVKGLXYLWSLKILHRDVKPSNMLVNXRGQVKLCDFGVSXQLVNSIAKXYVGXNAYMAPERISGEQYGIHSDVWSLGISFMEIQKNQGSLMPLQLLQCIVDEDSPVLPVGEFSEPFVHFIXQCMRKQPKERPAPEELMGHPFIVQFNDGNAAVVSMWVCRALEERRSQQGPP

SEQ ID NO: 15555 - protein, 448 aa, Homo sapiens
  MOD_RES (32)..(32): Selenocysteine
  MOD_RES (56)..(58): Selenocysteine
  MOD_RES (71)..(71): Selenocysteine
  MOD_RES (88)..(88): Selenocysteine
  MOD_RES (124)..(124): Selenocysteine
  MOD_RES (171)..(171): Selenocysteine
  MOD_RES (179)..(179): Selenocysteine
  MOD_RES (202)..(202): Selenocysteine
  MOD_RES (241)..(241): Selenocysteine
  MOD_RES (272)..(272): Selenocysteine
  MOD_RES (293)..(293): Selenocysteine
  MOD_RES (306)..(306): Selenocysteine
  MOD_RES (315)..(315): Selenocysteine
  MOD_RES (319)..(319): Selenocysteine
  MOD_RES (397)..(397): Selenocysteine
MLWLALGPFPAMENQVLVIRIKIPNSGAVDWXVHSGPQLLFRDVLDVIGQVLPEAXXXAFEYEDEDGDRIXVRSDEEMKAMLSYYYSXVMEQQVNGQLIEPLQIFPRACKPPGERNIHGLKVNXRAGPSQHSSPAVSDSLPSNSLKKSSAELKKILANGQMNEQDIRYRDXLGHGNGGXVYKAYHVPSGKILAVKVILLDIXLELQKQIMSELEILYKCDSSYIIGFYGAFFVENRISICXEFMDGGSLDVYRKMPEHVLGRIAVAVVKGLXYLWSLKILHRDVKPSNMLVNXRGQVKLCDFGVSXQLVNSIAKXYVGXNAYMAPERISGEQYGIHSDVWSLGISFMELALGRFPYPQIQKNQGSLMPLQLLQCIVDEDSPVLPVGEFSEPFVHFIXQCMRKQPKERPAPEELMGHPFIVQFNDGNAAVVSMWVCRALEERRSQQGPP

SEQ ID NO: 15556 - protein, 412 aa, Homo sapiens
  MOD_RES (20)..(22): Selenocysteine
  MOD_RES (35)..(35): Selenocysteine
  MOD_RES (52)..(52): Selenocysteine
  MOD_RES (88)..(88): Selenocysteine
  MOD_RES (135)..(135): Selenocysteine
  MOD_RES (143)..(143): Selenocysteine
  MOD_RES (166)..(166): Selenocysteine
  MOD_RES (205)..(205): Selenocysteine
  MOD_RES (236)..(236): Selenocysteine
  MOD_RES (257)..(257): Selenocysteine
  MOD_RES (270)..(270): Selenocysteine
  MOD_RES (279)..(279): Selenocysteine
  MOD_RES (283)..(283): Selenocysteine
  MOD_RES (361)..(361): Selenocysteine
MMEGHFPQSDVIGQVLPEAXXXAFEYEDEDGDRIXVRSDEEMKAMLSYYYSXVMEQQVNGQLIEPLQIFPRACKPPGERNIHGLKVNXRAGPSQHSSPAVSDSLPSNSLKKSSAELKKILANGQMNEQDIRYRDXLGHGNGGXVYKAYHVPSGKILAVKVILLDIXLELQKQIMSELEILYKCDSSYIIGFYGAFFVENRISICXEFMDGGSLDVYRKMPEHVLGRIAVAVVKGLXYLWSLKILHRDVKPSNMLVNXRGQVKLCDFGVSXQLVNSIAKXYVGXNAYMAPERISGEQYGIHSDVWSLGISFMELALGRFPYPQIQKNQGSLMPLQLLQCIVDEDSPVLPVGEFSEPFVHFIXQCMRKQPKERPAPEELMGHPFIVQFNDGNAAVVSMWVCRALEERRSQQGPP

SEQ ID NO: 15557 - protein, 49 aa, Homo sapiens
  MOD_RES (47)..(47): Selenocysteine
QYGIHSDVWSLGISFMEPLQLLQCIVDEDSPVLPVGEFSEPFVHFIXQW

SEQ ID NO: 15558 - protein, 182 aa, Homo sapiens
  MOD_RES (1)..(1): Any amino acid
  MOD_RES (17)..(17): Selenocysteine
  MOD_RES (64)..(64): Selenocysteine
  MOD_RES (72)..(72): Selenocysteine
  MOD_RES (95)..(95): Selenocysteine
  MOD_RES (134)..(134): Selenocysteine
  MOD_RES (165)..(165): Selenocysteine
  MOD_RES (182)..(182): Selenocysteine
XCKPPGERNIHGLKVNXRAGPSQHSSPAVSDSLPSNSLKKSSAELKKILANGQMNEQDIRYRDXLGHGNGGXVYKAYHVPSGKILAVKVILLDIXLELQKQIMSELEILYKCDSSYIIGFYGAFFVENRISICXEFMDGGSLDVYRKMPEHVLGRIAVAVVKGLXYLWSLKILHRANKDLCX

SEQ ID NO: 15559 - protein, 84 aa, Homo sapiens
  MOD_RES (31)..(31): Selenocysteine
  MOD_RES (50)..(50): Selenocysteine
  MOD_RES (56)..(56): Selenocysteine
  MOD_RES (58)..(58): Selenocysteine
  MOD_RES (78)..(78): Selenocysteine
MELGRGAYGVVEKMRHVPSGQIMAVKRIRAXVNSQEQKRLLMDLDISMRXVDCPFXVXFYGALFREGDVWICMELMDXSLDKFY

SEQ ID NO: 15560 - protein, 278 aa, Homo sapiens
  MOD_RES (31)..(31): Selenocysteine
  MOD_RES (50)..(50): Selenocysteine
  MOD_RES (56)..(56): Selenocysteine
  MOD_RES (58)..(58): Selenocysteine
  MOD_RES (78)..(78): Selenocysteine
  MOD_RES (93)..(93): Selenocysteine
  MOD_RES (155)..(155): Selenocysteine
  MOD_RES (190)..(190): Selenocysteine
  MOD_RES (206)..(206): Selenocysteine
  MOD_RES (235)..(235): Selenocysteine
  MOD_RES (248)..(248): Selenocysteine
  MOD_RES (259)..(259): Selenocysteine
  MOD_RES (266)..(266): Selenocysteine
MELGRGAYGVVEKMRHVPSGQIMAVKRIRAXVNSQEQKRLLMDLDISMRXVDCPFXVXFYGALFREGDVWICMELMDXSLDKFYKQVIDKGQXIPEDILGKIAVSIVKALEHLHSKLSVIHRDVKPSNVLINALGQVKMCDFGISGYLVDSVAKXIDAGCKPYMAPERINPELNQKGYSVKSDIWSLGIXMIELAILRFPYDSWGXPFQQLKQVVEEPSPQLPADKFSAEFVDFXSQCLKKNSKERPXYPELMQHPFFXLHESKGXDVASFVKLILGD

SEQ ID NO: 15561 - protein, 128 aa, Homo sapiens
  MOD_RES (28)..(28): Selenocysteine
  MOD_RES (31)..(31): Selenocysteine
  MOD_RES (90)..(90): Selenocysteine
  MOD_RES (109)..(109): Selenocysteine
  MOD_RES (115)..(115): Selenocysteine
  MOD_RES (117)..(117): Selenocysteine
MSHRAWAEGKKRNPGLKIPKEAFEQPQXSSXPPRDLDSKACISIGNQNFEVKADDLEPIMELGRGAYGVVEKMRHVPSGQIMAVKRIRAXVNSQEQKRLLMDLDISMRXVDCPFXVXFYGALFREGDV

SEQ ID NO: 15562 - protein, 68 aa, Homo sapiens
  MOD_RES (25)..(25): Selenocysteine
  MOD_RES (28)..(28): Selenocysteine
MSQSKGKKRNPGLKIPKEAFEQPQXSSXPPRDLDSKACISIGNQNFEVKADDLEPIMELGRADPSHSK

SEQ ID NO: 15563 - protein, 334 aa, Homo sapiens
  MOD_RES (25)..(25): Selenocysteine
  MOD_RES (28)..(28): Selenocysteine
  MOD_RES (87)..(87): Selenocysteine
  MOD_RES (106)..(106): Selenocysteine
  MOD_RES (112)..(112): Selenocysteine
  MOD_RES (114)..(114): Selenocysteine
  MOD_RES (134)..(134): Selenocysteine
  MOD_RES (149)..(149): Selenocysteine
  MOD_RES (211)..(211): Selenocysteine
  MOD_RES (246)..(246): Selenocysteine
  MOD_RES (262)..(262): Selenocysteine
  MOD_RES (291)..(291): Selenocysteine
  MOD_RES (304)..(304): Selenocysteine
  MOD_RES (315)..(315): Selenocysteine
  MOD_RES (322)..(322): Selenocysteine
MSQSKGKKRNPGLKIPKEAFEQPQXSSXPPRDLDSKACISIGNQNFEVKADDLEPIMELGRGAYGVVEKMRHVPSGQIMAVKRIRAXVNSQEQKRLLMDLDISMRXVDCPFXVXFYGALFREGDVWICMELMDXSLDKFYKQVIDKGQXIPEDILGKIAVSIVKALEHLHSKLSVIHRDVKPSNVLINALGQVKMCDFGISGYLVDSVAKXIDAGCKPYMAPERINPELNQKGYSVKSDIWSLGIXMIELAILRFPYDSWGXPFQQLKQVVEEPSPQLPADKFSAEFVDFXSQCLKKNSKERPXYPELMQHPFFXLHESKGXDVASFVKLILGD

SEQ ID NO: 15564 - protein, 435 aa, Homo sapiens
  MOD_RES (46)..(46): Selenocysteine
  MOD_RES (82)..(82): Selenocysteine
  MOD_RES (96)..(96): Selenocysteine
  MOD_RES (99)..(99): Selenocysteine
  MOD_RES (119)..(119): Selenocysteine
  MOD_RES (123)..(123): Selenocysteine
  MOD_RES (146)..(146): Selenocysteine
  MOD_RES (158)..(158): Selenocysteine
  MOD_RES (201)..(201): Selenocysteine
  MOD_RES (204)..(204): Selenocysteine
  MOD_RES (206)..(206): Selenocysteine
  MOD_RES (217)..(217): Selenocysteine
  MOD_RES (239)..(239): Selenocysteine
  MOD_RES (291)..(291): Selenocysteine
  MOD_RES (311)..(311): Selenocysteine
  MOD_RES (333)..(333): Selenocysteine
  MOD_RES (343)..(343): Selenocysteine
  MOD_RES (349)..(349): Selenocysteine
  MOD_RES (378)..(378): Selenocysteine
  MOD_RES (401)..(401): Selenocysteine
  MOD_RES (417)..(417): Selenocysteine
  MOD_RES (422)..(422): Selenocysteine
MAASSLEQKLSRLEAKLKQENREARRRIDLNLDISPQRPRPIIVIXLSPAPAPSQRAALQLPLANDGGSRSPSSESSPQHPXPPARPRHMLGLPSXLFXPRSMESIEIDQKLQEIMKQXGYLXIGGQRYQAEINDLENLGEMGSGXCGQVWKMRFRKXGHVIAVKQMRRSGNKEENKRILMDLDVVLKSHDCPYIVQCFGXFIXNXDVFIAMELMGXCAEKLKKRMQGPIPERILGKMXVAIVKALYYLKEKHGVIHRDVKPSNILLDERGQIKLCDFGISGRLVDSKAKXRSAGCAAYMAPERIDPPDPXKPDYDIRADVWSLGISLVELAXGQFPYKNCKXDFEVLXKVLQEEPPLLPGHMGFSGDFQSFVKDCLXKDHRKRPKYNKLLEHSFIKRYEXLEVDVASWFKDVMAKXESPRXSGVLSQPHLPFFR

SEQ ID NO: 15565 - protein, 419 aa, Homo sapiens
  MOD_RES (42)..(42): Selenocysteine
  MOD_RES (66)..(66): Selenocysteine
  MOD_RES (80)..(80): Selenocysteine
  MOD_RES (83)..(83): Selenocysteine
  MOD_RES (103)..(103): Selenocysteine
  MOD_RES (107)..(107): Selenocysteine
  MOD_RES (130)..(130): Selenocysteine
  MOD_RES (142)..(142): Selenocysteine
  MOD_RES (185)..(185): Selenocysteine
  MOD_RES (188)..(188): Selenocysteine
  MOD_RES (190)..(190): Selenocysteine
  MOD_RES (201)..(201): Selenocysteine
  MOD_RES (223)..(223): Selenocysteine
  MOD_RES (275)..(275): Selenocysteine
  MOD_RES (295)..(295): Selenocysteine
  MOD_RES (317)..(317): Selenocysteine
  MOD_RES (327)..(327): Selenocysteine
  MOD_RES (333)..(333): Selenocysteine
  MOD_RES (362)..(362): Selenocysteine
  MOD_RES (385)..(385): Selenocysteine
  MOD_RES (401)..(401): Selenocysteine
  MOD_RES (406)..(406): Selenocysteine
MAASSLEQKLSRLEAKLKQENREARRRIDLNLDISPQRPRPXLQLPLANDGGSRSPSSESSPQHPXPPARPRHMLGLPSXLFXPRSMESIEIDQKLQEIMKQXGYLXIGGQRYQAEINDLENLGEMGSGXCGQVWKMRFRKXGHVIAVKQMRRSGNKEENKRILMDLDVVLKSHDCPYIVQCFGXFIXNXDVFIAMELMGXCAEKLKKRMQGPIPERILGKMXVAIVKALYYLKEKHGVIHRDVKPSNILLDERGQIKLCDFGISGRLVDSKAKXRSAGCAAYMAPERIDPPDPXKPDYDIRADVWSLGISLVELAXGQFPYKNCKXDFEVLXKVLQEEPPLLPGHMGFSGDFQSFVKDCLXKDHRKRPKYNKLLEHSFIKRYEXLEVDVASWFKDVMAKXESPRXSGVLSQPHLPFFR

SEQ ID NO: 15566 - protein, 426 aa, Homo sapiens
  MOD_RES (42)..(42): Selenocysteine
  MOD_RES (66)..(66): Selenocysteine
  MOD_RES (80)..(80): Selenocysteine
  MOD_RES (83)..(83): Selenocysteine
  MOD_RES (103)..(103): Selenocysteine
  MOD_RES (107)..(107): Selenocysteine
  MOD_RES (130)..(130): Selenocysteine
  MOD_RES (142)..(142): Selenocysteine
  MOD_RES (185)..(185): Selenocysteine
  MOD_RES (188)..(188): Selenocysteine
  MOD_RES (190)..(190): Selenocysteine
  MOD_RES (201)..(201): Selenocysteine
  MOD_RES (223)..(223): Selenocysteine
  MOD_RES (275)..(275): Selenocysteine
  MOD_RES (295)..(295): Selenocysteine
  MOD_RES (324)..(324): Selenocysteine
  MOD_RES (334)..(334): Selenocysteine
  MOD_RES (340)..(340): Selenocysteine
  MOD_RES (369)..(369): Selenocysteine
  MOD_RES (392)..(392): Selenocysteine
  MOD_RES (408)..(408): Selenocysteine
  MOD_RES (413)..(413): Selenocysteine
MAASSLEQKLSRLEAKLKQENREARRRIDLNLDISPQRPRPXLQLPLANDGGSRSPSSESSPQHPXPPARPRHMLGLPSXLFXPRSMESIEIDQKLQEIMKQXGYLXIGGQRYQAEINDLENLGEMGSGXCGQVWKMRFRKXGHVIAVKQMRRSGNKEENKRILMDLDVVLKSHDCPYIVQCFGXFIXNXDVFIAMELMGXCAEKLKKRMQGPIPERILGKMXVAIVKALYYLKEKHGVIHRDVKPSNILLDERGQIKLCDFGISGRLVDSKAKXRSAGCAAYMAPERIDPPDPXKPDYDIRADVWSLGISLPCPSPSQVELAXGQFPYKNCKXDFEVLXKVLQEEPPLLPGHMGFSGDFQSFVKDCLXKDHRKRPKYNKLLEHSFIKRYEXLEVDVASWFKDVMAKXESPRXSGVLSQPHLPFFR

SEQ ID NO: 15567 - protein, 1512 aa, Homo sapiens
  MOD_RES (20)..(20): Selenocysteine
  MOD_RES (89)..(89): Selenocysteine
  MOD_RES (103)..(103): Selenocysteine
  MOD_RES (125)..(125): Selenocysteine
  MOD_RES (169)..(169): Selenocysteine
  MOD_RES (192)..(192): Selenocysteine
  MOD_RES (261)..(261): Selenocysteine
  MOD_RES (285)..(285): Selenocysteine
  MOD_RES (304)..(304): Selenocysteine
  MOD_RES (353)..(353): Selenocysteine
  MOD_RES (379)..(379): Selenocysteine
  MOD_RES (407)..(407): Selenocysteine
  MOD_RES (420)..(420): Selenocysteine
  MOD_RES (426)..(426): Selenocysteine
  MOD_RES (428)..(428): Selenocysteine
  MOD_RES (457)..(457): Selenocysteine
  MOD_RES (522)..(522): Selenocysteine
  MOD_RES (542)..(542): Selenocysteine
  MOD_RES (546)..(546): Selenocysteine
  MOD_RES (603)..(603): Selenocysteine
  MOD_RES (619)..(619): Selenocysteine
  MOD_RES (625)..(625): Selenocysteine
  MOD_RES (657)..(657): Selenocysteine
  MOD_RES (665)..(665): Selenocysteine
  MOD_RES (686)..(686): Selenocysteine
  MOD_RES (698)..(698): Selenocysteine
  MOD_RES (705)..(705): Selenocysteine
  MOD_RES (746)..(746): Selenocysteine
  MOD_RES (779)..(779): Selenocysteine
  MOD_RES (799)..(799): Selenocysteine
  MOD_RES (828)..(829): Selenocysteine
  MOD_RES (847)..(847): Selenocysteine
  MOD_RES (850)..(850): Selenocysteine
  MOD_RES (876)..(876): Selenocysteine
  MOD_RES (896)..(897): Selenocysteine
  MOD_RES (905)..(905): Selenocysteine
  MOD_RES (911)..(911): Selenocysteine
  MOD_RES (918)..(918): Selenocysteine
  MOD_RES (942)..(949): Selenocysteine
  MOD_RES (958)..(958): Selenocysteine
  MOD_RES (985)..(985): Selenocysteine
  MOD_RES (990)..(990): Selenocysteine
  MOD_RES (997)..(997): Selenocysteine
  MOD_RES (999)..(999): Selenocysteine
  MOD_RES (1021)..(1021): Selenocysteine
  MOD_RES (1047)..(1047): Selenocysteine
  MOD_RES (1066)..(1066): Selenocysteine
  MOD_RES (1070)..(1070): Selenocysteine
  MOD_RES (1082)..(1082): Selenocysteine
  MOD_RES (1111)..(1111): Selenocysteine
  MOD_RES (1114)..(1114): Selenocysteine
  MOD_RES (1126)..(1126): Selenocysteine
  MOD_RES (1145)..(1146): Selenocysteine
  MOD_RES (1148)..(1148): Selenocysteine
  MOD_RES (1166)..(1166): Selenocysteine
  MOD_RES (1223)..(1223): Selenocysteine
  MOD_RES (1226)..(1226): Selenocysteine
  MOD_RES (1231)..(1231): Selenocysteine
  MOD_RES (1241)..(1241): Selenocysteine
  MOD_RES (1265)..(1265): Selenocysteine
  MOD_RES (1267)..(1267): Selenocysteine
  MOD_RES (1275)..(1275): Selenocysteine
  MOD_RES (1280)..(1280): Selenocysteine
  MOD_RES (1313)..(1313): Selenocysteine
  MOD_RES (1350)..(1350): Selenocysteine
  MOD_RES (1380)..(1380): Selenocysteine
  MOD_RES (1400)..(1400): Selenocysteine
  MOD_RES (1412)..(1412): Selenocysteine
  MOD_RES (1468)..(1469): Selenocysteine
  MOD_RES (1510)..(1511): Selenocysteine
MAAAAGNRASSSGFPGARAXSPEAGGGGGALKASSAPAAAAGLLREAGSGGRERADWRRRQLRKVRSVELDQLPEQPLFLAASPPASSXSPSPEPADAAGSGXGFQPVAVPPPHGAASRGGAHLXESVAAPDSGASSPAAAEPGEKRAPAAEPSPAAAPAGREMENKEXLKGLHKMDDRPEERMIREKLKAXCMPAWKHEWLERRNRRGPVVVKPIPVKGDGSEMNHLAAESPGEVQASAASPASKGRRSPSPGNSPSGRXVKSESPGVRRKRVSPVPFQSGRIXPPRRAPSPDGFSPYSPEEXNRRVNKVMRARLYLLQQIGPNSFLIGGDSPDNKYRVFIGPQNCSCARGXFCIHLLFVMLRVFQLEPSDPMLWRKXLKNFEVESLFQKYHSRRSSRIKAPSRNXIQKFVSRMSNSHXLSSSSXSXSSSENSIKDEEEQMCPICLLGMLDEESLXVCEDGCRNKLHHHCMSIWAEECRRNREPLICPLCRSKWRSHDFYSHELSSPVDSPSSLRAAQQQXVQQQPLAGSRRNQESNFNLXHYGXQQIPPAYKDLAEPWIQVFGMELVGCLFSRNWNVREMALRRLSHDVSGALLLANGESXGNSGGSSGSSPSGGAXSGSSQXSISGDVVEACCSVLSMVCADPVYKVYVAALKXLRAMLVYXPCHSLAERIKLQRLLQPVVDXILVKCADANSRXSQLSISXLLELCKGQAGELAVGREILKAGSIGIGGVDYVLNCILGNQXESNNWQELLGRLCLIDRLLLEFPAEFYPHIVSXDVSQAEPVEIRYKKLLSLLXFALQSIDNSHSMVGKLSRRIYLSSARMVXXVPHVFSKLLEMLSVSSSXHFXRMRRRLMAIADEVEIAEAIQLGVEDXLDGQQDSFLQASVPNNYLEXXENSSPECXVHLEKXGKGLCAXKLSASSEDISERLASISVGPSSSXXXXXXXXEQPKPMVQXKGRPHSQCLNSSPLSHHSQLMFPALSXPSSSXPSVPAGXAXDVSKHRLQGFIPCRIPSASPQXQRKFSLQFHRNCPENKDSDKLSPVFXQSRPLPSSNIHRPKPSRPXPGNXSKQGDPSKNSMXLDLNSSSKCDDSFGCSSNSSNAVIPSDEXVFXPVEEKCRLDVNXELNSSIEDLLEASMPSSDXXVXFKSEVAVLSPEKAENDDXYKDDVNHNQKCKEKMEAEEEEALAIAMAMSASQDALPIVPQLQVENGEDIIIIQQDXPEXLPGHXKAKQPYREDXEWLKGQQIGLGAFSSCYQAQDVGXGXLMAVKQVXYVRNXSSEQEEVVEALREEIRMMSHLNHPNIIRMLGAXCEKSNYNLFIEWMAGGSVAHLLSKYGAFKESVVINYXEQLLRGLSYLHENQIIHRDVKGANLLIDSXGQRLRIADFGAAARLASKGXGAGEFQGQLLGXIAFMAPEVLRGQQYGRSCDVWSVGCAIIEMACAKPPWNAEKHSNHLALIFKIASAXXAPSIPSHLSPGLRDVALRCLELQPQDRPPSRELLKHPVFRXXW

SEQ ID NO: 15568 - protein, 180 aa, Homo sapiens
  MOD_RES (8)..(9): Selenocysteine
  MOD_RES (16)..(16): Selenocysteine
  MOD_RES (48)..(48): Selenocysteine
  MOD_RES (71)..(71): Selenocysteine
  MOD_RES (77)..(77): Selenocysteine
  MOD_RES (143)..(143): Selenocysteine
LAREWHKXXKMSAAGXYAWMAPEVIRLSLFSKSSDVWSFGVLLWELLXGEVPYREIDALAVAYGVAMNKLXLPIPSXCPEPFARLLEECWDPDPHGRPDFGSILKRLEVIEQSALFQMPLESFHSLQEDWKLEIQHMFDDLRXKEKALSIRSQSRPLQLWISGKDPMGPAPLQAPASSPG

SEQ ID NO: 15569 - protein, 954 aa, Homo sapiens
  MOD_RES (14)..(15): Selenocysteine
  MOD_RES (22)..(22): Selenocysteine
  MOD_RES (36)..(36): Selenocysteine
  MOD_RES (60)..(60): Selenocysteine
  MOD_RES (138)..(138): Selenocysteine
  MOD_RES (242)..(242): Selenocysteine
  MOD_RES (247)..(247): Selenocysteine
  MOD_RES (258)..(259): Selenocysteine
  MOD_RES (266)..(266): Selenocysteine
  MOD_RES (298)..(298): Selenocysteine
  MOD_RES (321)..(321): Selenocysteine
  MOD_RES (327)..(327): Selenocysteine
  MOD_RES (393)..(393): Selenocysteine
  MOD_RES (485)..(485): Selenocysteine
  MOD_RES (491)..(491): Selenocysteine
  MOD_RES (519)..(519): Selenocysteine
  MOD_RES (537)..(537): Selenocysteine
  MOD_RES (558)..(558): Selenocysteine
  MOD_RES (564)..(564): Selenocysteine
  MOD_RES (600)..(600): Selenocysteine
  MOD_RES (632)..(632): Selenocysteine
  MOD_RES (655)..(655): Selenocysteine
  MOD_RES (680)..(680): Selenocysteine
  MOD_RES (745)..(745): Selenocysteine
  MOD_RES (758)..(758): Selenocysteine
  MOD_RES (784)..(784): Selenocysteine
  MOD_RES (786)..(786): Selenocysteine
  MOD_RES (791)..(791): Selenocysteine
  MOD_RES (811)..(811): Selenocysteine
  MOD_RES (813)..(813): Selenocysteine
  MOD_RES (816)..(816): Selenocysteine
  MOD_RES (828)..(828): Selenocysteine
  MOD_RES (879)..(880): Selenocysteine
  MOD_RES (882)..(882): Selenocysteine
  MOD_RES (907)..(907): Selenocysteine
  MOD_RES (909)..(909): Selenocysteine
  MOD_RES (918)..(918): Selenocysteine
  MOD_RES (930)..(930): Selenocysteine
  MOD_RES (944)..(944): Selenocysteine
MEEEEGAVAKEWGXXPAGPVWXAVFDYEAAGDEELXLRRGDRVQVLSQDCAVSGDEGWWXGQLPSGRVGVFPSNYVAPGAPAAPAGLQLPQEIPFHELQLEEIIGVGGFGKVYRALWRGEEVAVKAARLDPEKDPAVXAEQVCQEARLFGALQHPNIIALRGACLNPPHLCLVMEYARGGALSRVLAGRRVPPHVLVNWAVQVARGMNYLHNDAPVPIIHRDLKSINILILEAIENHNLADXVLKIXDFGLAREWHKXXKMSAAGXYAWMAPEVIRLSLFSKSSDVWSFGVLLWELLXGEVPYREIDALAVAYGVAMNKLXLPIPSXCPEPFARLLEECWDPDPHGRPDFGSILKRLEVIEQSALFQMPLESFHSLQEDWKLEIQHMFDDLRXKEKELRSREEELLRAAQEQRFQEEQLRRREQELAEREMDIVERELHLLMCQLSQEKPRVRKRKGNFKRSRLLKLREGGSHISLPSGFEHKIXVQASPXLDKRKGSDGASPPASPSIIPRLRAIRLXPVDCGGSSSGSSSGGSGXWSRGGPPKKEELVGGKKKGRXWGPSSXLQKERVGGEERLKGLGEGSKQWSSSAPNLGKSPKHXPIAPGFASLNEMEEFAEAEDGGSSVPPSPYSXPSYLSVPLPAEPSPGARAPWEPXPSAPPARWGHGARRRCDLALLGCAXLLGAVGLGADVAEARAADGEEQRRWLDGLFFPRAGRFPRGLSPPARPHGRREDVGPGLGLAPSAXLVSLSSVSDCNSXRSLLRSDSDEAAPAAPSPPPSPPAPXPXPSPSXNPLVDLELESFKKDPRQSLXPXHVXAACAVSRGHRRXPSDGALGQRGPPEPAGHGPGPRDLLDFPRLPDPQALFPARRRPPEFPGRPXXLXFAPRPRPAASRPRLDPWKLVSFGRXLXISPPSRPDXPESPGPPSVQPXLLDMDMEGQNQDSXVPLCGAHGSH

SEQ ID NO: 15570 - protein, 122 aa, Homo sapiens
  MOD_RES (85)..(85): Selenocysteine
QDHGLRPRPRVAQDHQDERCGDLRLDGAGECWDPDPHGRPDFGSILKRLEVIEQSALFQMPLESFHSLQEDWKLEIQHMFDDLRXKEKALSIRSQSRPLQLWISGKDPMGPAPLQAPASSPG

SEQ ID NO: 15571 - protein, 67 aa, Homo sapiens
  MOD_RES (1)..(1): Any amino acid
  MOD_RES (8)..(8): Selenocysteine
  MOD_RES (13)..(13): Selenocysteine
  MOD_RES (24)..(25): Selenocysteine
  MOD_RES (32)..(32): Selenocysteine
XNHNLADXVLKIXDFGLAREWHKXXKMSAAGXYAWMAPEVIRLSLFSKSSDVWRMLGPRPPRAARFR

SEQ ID NO: 15572 - protein, 25 aa, Homo sapiens
  MOD_RES (7)..(7): Selenocysteine
  MOD_RES (9)..(9): Selenocysteine
  MOD_RES (20)..(20): Selenocysteine
MACLHEXRXPSPSFGGFVSXLSEAS

SEQ ID NO: 15573 - protein, 393 aa, Homo sapiens
  MOD_RES (7)..(7): Selenocysteine
  MOD_RES (9)..(9): Selenocysteine
  MOD_RES (20)..(20): Selenocysteine
  MOD_RES (33)..(33): Selenocysteine
  MOD_RES (37)..(37): Selenocysteine
  MOD_RES (43)..(43): Selenocysteine
  MOD_RES (45)..(45): Selenocysteine
  MOD_RES (100)..(100): Selenocysteine
  MOD_RES (108)..(108): Selenocysteine
  MOD_RES (160)..(160): Selenocysteine
  MOD_RES (175)..(175): Selenocysteine
  MOD_RES (181)..(181): Selenocysteine
  MOD_RES (209)..(209): Selenocysteine
  MOD_RES (245)..(245): Selenocysteine
  MOD_RES (257)..(257): Selenocysteine
  MOD_RES (266)..(266): Selenocysteine
  MOD_RES (273)..(273): Selenocysteine
  MOD_RES (305)..(305): Selenocysteine
  MOD_RES (374)..(374): Selenocysteine
  MOD_RES (378)..(378): Selenocysteine
MACLHEXRXPSPSFGGFVSXLSEASMRKLDPDXSDCXPEKDLXPXHVLQLHEQDAGGPGGAAGSPESRASRVRADEVRLQCQSGSGFLEGLFGCLRPVWXMIGKAYSXEHKQQQEDLWEVPFEEILDLQWVGSGAQGAVFLGRFHGEEVAVKKVRDLKEXDIKHLRKLKHPNIIXFKGVCXQAPCYCILMEFCAQGQLYEVLRAGRPVXPSLLVDWSMGIAGGMNYLHLHKIIHRDLKSPNMLIXYDDVVKISDFGXSKELSDKSXKMSFAGXVAWMAPEVIRNEPVSEKVDIWSFGVVLWELLXGEIPYKDVDSSAIIWGVGSNSLHLPVPSSCPDGFKILLRQCWNSKPRNRPSFRQILLHLDIASADVLSXPQEXYFKSQVCCGQSGGKK

SEQ ID NO: 15574 - protein, 859 aa, Homo sapiens
  MOD_RES (7)..(7): Selenocysteine
  MOD_RES (9)..(9): Selenocysteine
  MOD_RES (20)..(20): Selenocysteine
  MOD_RES (33)..(33): Selenocysteine
  MOD_RES (37)..(37): Selenocysteine
  MOD_RES (43)..(43): Selenocysteine
  MOD_RES (45)..(45): Selenocysteine
  MOD_RES (100)..(100): Selenocysteine
  MOD_RES (108)..(108): Selenocysteine
  MOD_RES (160)..(160): Selenocysteine
  MOD_RES (175)..(175): Selenocysteine
  MOD_RES (181)..(181): Selenocysteine
  MOD_RES (209)..(209): Selenocysteine
  MOD_RES (245)..(245): Selenocysteine
  MOD_RES (257)..(257): Selenocysteine
  MOD_RES (266)..(266): Selenocysteine
  MOD_RES (273)..(273): Selenocysteine
  MOD_RES (305)..(305): Selenocysteine
  MOD_RES (374)..(374): Selenocysteine
  MOD_RES (378)..(378): Selenocysteine
  MOD_RES (402)..(402): Selenocysteine
  MOD_RES (485)..(485): Selenocysteine
  MOD_RES (511)..(511): Selenocysteine
  MOD_RES (545)..(545): Selenocysteine
  MOD_RES (564)..(564): Selenocysteine
  MOD_RES (626)..(626): Selenocysteine
  MOD_RES (642)..(642): Selenocysteine
  MOD_RES (653)..(653): Selenocysteine
  MOD_RES (680)..(680): Selenocysteine
  MOD_RES (685)..(685): Selenocysteine
  MOD_RES (699)..(699): Selenocysteine
  MOD_RES (710)..(710): Selenocysteine
  MOD_RES (733)..(733): Selenocysteine
  MOD_RES (750)..(750): Selenocysteine
  MOD_RES (763)..(763): Selenocysteine
  MOD_RES (772)..(772): Selenocysteine
  MOD_RES (778)..(778): Selenocysteine
  MOD_RES (780)..(780): Selenocysteine
  MOD_RES (840)..(840): Selenocysteine
MACLHEXRXPSPSFGGFVSXLSEASMRKLDPDXSDCXPEKDLXPXHVLQLHEQDAGGPGGAAGSPESRASRVRADEVRLQCQSGSGFLEGLFGCLRPVWXMIGKAYSXEHKQQQEDLWEVPFEEILDLQWVGSGAQGAVFLGRFHGEEVAVKKVRDLKEXDIKHLRKLKHPNIIXFKGVCXQAPCYCILMEFCAQGQLYEVLRAGRPVXPSLLVDWSMGIAGGMNYLHLHKIIHRDLKSPNMLIXYDDVVKISDFGXSKELSDKSXKMSFAGXVAWMAPEVIRNEPVSEKVDIWSFGVVLWELLXGEIPYKDVDSSAIIWGVGSNSLHLPVPSSCPDGFKILLRQCWNSKPRNRPSFRQILLHLDIASADVLSXPQEXYFKSQAEWREEVKLHFEKIKSEGXCLHRLEEELVMRRREELRHALDIREHYERKLERANNLYMELNALMLQLELKERELLRREQALERRCPGLLKPHPSRGLLHGNXMEKLIKKRNVPQKLSPHSKRPDILKXESLLPKLDAALSGVGLPGCPKGPPSPGRSRRGKXRHRKASAKGSCGDLPGLRXAVPPHEPGGPGSPGGLGGGPSAWEACPPALRGLHHDLLLRKMSSSSPDLLSAALGSRGRGAXGGAGDPGSPPPARGDXPPSEGSAPGSXSPDSPGGAKGEPPPPVGPGEGVGLLGXGREGXSGRGGSRAGSQHLXPAALLYRAAVXRSQKRGISSEEEEGEVDSEVELXSSQRWPQSLNMRQSLSXFSSENPSDGEEGXASEPSPSGXPEVGSXNXDERPDERSDDMCSQGSEIPLDPPPSEVIPGPEPSSLPIPHQELLRERGPPNSEDSDCDSXELDNSNSVDALRPPASLPP

SEQ ID NO: 15575 - protein, 892 aa, Homo sapiens
  MOD_RES (7)..(7): Selenocysteine
  MOD_RES (9)..(9): Selenocysteine
  MOD_RES (20)..(20): Selenocysteine
  MOD_RES (33)..(33): Selenocysteine
  MOD_RES (37)..(37): Selenocysteine
  MOD_RES (43)..(43): Selenocysteine
  MOD_RES (45)..(45): Selenocysteine
  MOD_RES (133)..(133): Selenocysteine
  MOD_RES (141)..(141): Selenocysteine
  MOD_RES (193)..(193): Selenocysteine
  MOD_RES (208)..(208): Selenocysteine
  MOD_RES (214)..(214): Selenocysteine
  MOD_RES (242)..(242): Selenocysteine
  MOD_RES (278)..(278): Selenocysteine
  MOD_RES (290)..(290): Selenocysteine
  MOD_RES (299)..(299): Selenocysteine
  MOD_RES (306)..(306): Selenocysteine
  MOD_RES (338)..(338): Selenocysteine
  MOD_RES (407)..(407): Selenocysteine
  MOD_RES (411)..(411): Selenocysteine
  MOD_RES (435)..(435): Selenocysteine
  MOD_RES (518)..(518): Selenocysteine
  MOD_RES (544)..(544): Selenocysteine
  MOD_RES (578)..(578): Selenocysteine
  MOD_RES (597)..(597): Selenocysteine
  MOD_RES (659)..(659): Selenocysteine
  MOD_RES (675)..(675): Selenocysteine
  MOD_RES (686)..(686): Selenocysteine
  MOD_RES (713)..(713): Selenocysteine
  MOD_RES (718)..(718): Selenocysteine
  MOD_RES (732)..(732): Selenocysteine
  MOD_RES (743)..(743): Selenocysteine
  MOD_RES (766)..(766): Selenocysteine
  MOD_RES (783)..(783): Selenocysteine
  MOD_RES (796)..(796): Selenocysteine
  MOD_RES (805)..(805): Selenocysteine
  MOD_RES (811)..(811): Selenocysteine
  MOD_RES (813)..(813): Selenocysteine
  MOD_RES (873)..(873): Selenocysteine
MACLHEXRXPSPSFGGFVSXLSEASMRKLDPDXSDCXPEKDLXPXQCVLRDVVPLGGQGGGGPSPSPGGEPPPEPFANSVLQLHEQDAGGPGGAAGSPESRASRVRADEVRLQCQSGSGFLEGLFGCLRPVWXMIGKAYSXEHKQQQEDLWEVPFEEILDLQWVGSGAQGAVFLGRFHGEEVAVKKVRDLKEXDIKHLRKLKHPNIIXFKGVCXQAPCYCILMEFCAQGQLYEVLRAGRPVXPSLLVDWSMGIAGGMNYLHLHKIIHRDLKSPNMLIXYDDVVKISDFGXSKELSDKSXKMSFAGXVAWMAPEVIRNEPVSEKVDIWSFGVVLWELLXGEIPYKDVDSSAIIWGVGSNSLHLPVPSSCPDGFKILLRQCWNSKPRNRPSFRQILLHLDIASADVLSXPQEXYFKSQAEWREEVKLHFEKIKSEGXCLHRLEEELVMRRREELRHALDIREHYERKLERANNLYMELNALMLQLELKERELLRREQALERRCPGLLKPHPSRGLLHGNXMEKLIKKRNVPQKLSPHSKRPDILKXESLLPKLDAALSGVGLPGCPKGPPSPGRSRRGKXRHRKASAKGSCGDLPGLRXAVPPHEPGGPGSPGGLGGGPSAWEACPPALRGLHHDLLLRKMSSSSPDLLSAALGSRGRGAXGGAGDPGSPPPARGDXPPSEGSAPGSXSPDSPGGAKGEPPPPVGPGEGVGLLGXGREGXSGRGGSRAGSQHLXPAALLYRAAVXRSQKRGISSEEEEGEVDSEVELXSSQRWPQSLNMRQSLSXFSSENPSDGEEGXASEPSPSGXPEVGSXNXDERPDERSDDMCSQGSEIPLDPPPSEVIPGPEPSSLPIPHQELLRERGPPNSEDSDCDSXELDNSNSVDALRPPASLPP

SEQ ID NO: 15576 - protein, 113 aa, Homo sapiens
  MOD_RES (23)..(23): Selenocysteine
  MOD_RES (32)..(32): Selenocysteine
  MOD_RES (54)..(54): Selenocysteine
  MOD_RES (65)..(67): Selenocysteine
  MOD_RES (70)..(70): Selenocysteine
  MOD_RES (95)..(95): Selenocysteine
  MOD_RES (104)..(104): Selenocysteine
  MOD_RES (110)..(110): Selenocysteine
  MOD_RES (113)..(113): Selenocysteine
MANFQEHLSCSSSPHLPFSESKXFNGLQDELXAMGNHPSPKLLEDQQEKGMVRXELIESVHSPVXXXVLXSVSEDSRDQFENSVLQLREHDESEXAVSQGNSNXVDGESXSGX

SEQ ID NO: 15577 - protein, 137 aa, Homo sapiens
  MOD_RES (23)..(23): Selenocysteine
  MOD_RES (32)..(32): Selenocysteine
  MOD_RES (54)..(54): Selenocysteine
  MOD_RES (65)..(67): Selenocysteine
  MOD_RES (70)..(70): Selenocysteine
  MOD_RES (95)..(95): Selenocysteine
  MOD_RES (104)..(104): Selenocysteine
  MOD_RES (110)..(110): Selenocysteine
  MOD_RES (113)..(113): Selenocysteine
MANFQEHLSCSSSPHLPFSESKXFNGLQDELXAMGNHPSPKLLEDQQEKGMVRXELIESVHSPVXXXVLXSVSEDSRDQFENSVLQLREHDESEXAVSQGNSNXVDGESXSGXEDIKIQFSRSGSGSGGFLEGLFGC

SEQ ID NO: 15578 - protein, 966 aa, Homo sapiens
  MOD_RES (23)..(23): Selenocysteine
  MOD_RES (32)..(32): Selenocysteine
  MOD_RES (54)..(54): Selenocysteine
  MOD_RES (65)..(67): Selenocysteine
  MOD_RES (70)..(70): Selenocysteine
  MOD_RES (95)..(95): Selenocysteine
  MOD_RES (104)..(104): Selenocysteine
  MOD_RES (110)..(110): Selenocysteine
  MOD_RES (113)..(113): Selenocysteine
  MOD_RES (151)..(151): Selenocysteine
  MOD_RES (160)..(160): Selenocysteine
  MOD_RES (203)..(203): Selenocysteine
  MOD_RES (224)..(224): Selenocysteine
  MOD_RES (252)..(252): Selenocysteine
  MOD_RES (261)..(261): Selenocysteine
  MOD_RES (288)..(288): Selenocysteine
  MOD_RES (290)..(290): Selenocysteine
  MOD_RES (300)..(300): Selenocysteine
  MOD_RES (309)..(309): Selenocysteine
  MOD_RES (316)..(316): Selenocysteine
  MOD_RES (348)..(348): Selenocysteine
  MOD_RES (377)..(377): Selenocysteine
  MOD_RES (389)..(389): Selenocysteine
  MOD_RES (403)..(403): Selenocysteine
  MOD_RES (417)..(417): Selenocysteine
  MOD_RES (421)..(421): Selenocysteine
  MOD_RES (445)..(445): Selenocysteine
  MOD_RES (514)..(514): Selenocysteine
  MOD_RES (546)..(546): Selenocysteine
  MOD_RES (559)..(560): Selenocysteine
  MOD_RES (565)..(565): Selenocysteine
  MOD_RES (577)..(577): Selenocysteine
  MOD_RES (619)..(619): Selenocysteine
  MOD_RES (665)..(665): Selenocysteine
  MOD_RES (701)..(701): Selenocysteine
  MOD_RES (776)..(776): Selenocysteine
  MOD_RES (792)..(792): Selenocysteine
  MOD_RES (797)..(797): Selenocysteine
  MOD_RES (805)..(805): Selenocysteine
  MOD_RES (847)..(847): Selenocysteine
  MOD_RES (863)..(863): Selenocysteine
  MOD_RES (892)..(892): Selenocysteine
  MOD_RES (918)..(918): Selenocysteine
  MOD_RES (954)..(954): Selenocysteine
  MOD_RES (957)..(957): Selenocysteine
  MOD_RES (965)..(965): Selenocysteine
MANFQEHLSCSSSPHLPFSESKXFNGLQDELXAMGNHPSPKLLEDQQEKGMVRXELIESVHSPVXXXVLXSVSEDSRDQFENSVLQLREHDESEXAVSQGNSNXVDGESXSGXEDIKIQFSRSGSGSGGFLEGLFGCLRPVWNIIGKAYSXDYKLQQQDXWEVPFEEISELQWLGSGAQGAVFLGKFRAEEVAIKKVREQNEXDIKHLRKLKHPNIIAFKGVCXQAPCYCIIMEYCAHGQLYEVLRAGRKIXPRLLVDWSXGIASGMNYLHLHKIIHRDLKSPNVLVXHXDAVKISDFGXSKELSDKSXKMSFAGXVAWMAPEVIRNEPVSEKVDIWSFGVVLWELLXGEIPYKDVDSSAIIWGVGSNSLHLPVPSXCPDGFKILMKQXWQSKPRNRPSFRQXLMHLDIASADVLAXPQEXYFKSQAEWREEVKKHFEKIKSEGXCIHRLDEELIRRRREELRHALDIREHYERKLERANNLYMELSAIMLQLEMREKELIKREQAVEKKYPGXYKRHPVRPIIHPNAMEKLMKRKGVPHKSGMQXKRPDLLRSEGIPXXEVAPXASPLSGSPKMSXSSSKSRYRSKPRHRRGNSRGSHSDFAAILKNQPAQENSPHPXYLHQAQSQYPSLHHHNSLQQQYQQPPPAMSQSHHPRLNMHGQDIAXCANNLRYFGPAAALRSPLSNHAQRQLPGSSPDLISXAMAADCWRSSEPDKGQAGPWGCCQADAYDPCLQCRPEQYGSLDIPSAEPVGRSPDLSKSPAHNPLLENAQSSEKXEENEFSGCRSESSLGXSHLGXPPALPRKXRPLQKSGDDSSEEEEGEVDSEVEFPRRQRPHRCISSCQSYSXFSSENFSVSDGEEGNXSDHSNSPDELADKLEDRLAEKLDDLLSQXPEIPIDISSHSDGLSDKECAVRRVKXQMSLGKLCVEERGYENPMQFEESDCDSSDGECSDAXVRXNKHYSSAXW

SEQ ID NO: 15579 - protein, 194 aa, Homo sapiens
  MOD_RES (23)..(23): Selenocysteine
  MOD_RES (32)..(32): Selenocysteine
  MOD_RES (54)..(54): Selenocysteine
  MOD_RES (65)..(67): Selenocysteine
  MOD_RES (70)..(70): Selenocysteine
  MOD_RES (95)..(95): Selenocysteine
  MOD_RES (104)..(104): Selenocysteine
  MOD_RES (110)..(110): Selenocysteine
  MOD_RES (113)..(113): Selenocysteine
  MOD_RES (151)..(151): Selenocysteine
  MOD_RES (174)..(174): Selenocysteine
  MOD_RES (181)..(181): Selenocysteine
MANFQEHLSCSSSPHLPFSESKXFNGLQDELXAMGNHPSPKLLEDQQEKGMVRXELIESVHSPVXXXVLXSVSEDSRDQFENSVLQLREHDESEXAVSQGNSNXVDGESXSGXEDIKIQFSRSGSGSGGFLEGLFGCLRPVWNIIGKAYSXDYKLQQQGVFVLRPHVIVLSWNXVPMDNSXRSYELAGRSHLDC

SEQ ID NO: 15580 - protein, 160 aa, Homo sapiens
  MOD_RES (23)..(23): Selenocysteine
  MOD_RES (32)..(32): Selenocysteine
  MOD_RES (54)..(54): Selenocysteine
  MOD_RES (65)..(67): Selenocysteine
  MOD_RES (70)..(70): Selenocysteine
  MOD_RES (95)..(95): Selenocysteine
  MOD_RES (104)..(104): Selenocysteine
  MOD_RES (110)..(110): Selenocysteine
  MOD_RES (113)..(113): Selenocysteine
  MOD_RES (151)..(151): Selenocysteine
MANFQEHLSCSSSPHLPFSESKXFNGLQDELXAMGNHPSPKLLEDQQEKGMVRXELIESVHSPVXXXVLXSVSEDSRDQFENSVLQLREHDESEXAVSQGNSNXVDGESXSGXEDIKIQFSRSGSGSGGFLEGLFGCLRPVWNIIGKAYSXDYKLQQQVF

SEQ ID NO: 15581 - protein, 128 aa, Homo sapiens
  MOD_RES (23)..(23): Selenocysteine
  MOD_RES (32)..(32): Selenocysteine
  MOD_RES (54)..(54): Selenocysteine
  MOD_RES (65)..(67): Selenocysteine
  MOD_RES (70)..(70): Selenocysteine
  MOD_RES (95)..(95): Selenocysteine
  MOD_RES (104)..(104): Selenocysteine
  MOD_RES (110)..(110): Selenocysteine
  MOD_RES (113)..(113): Selenocysteine
MANFQEHLSCSSSPHLPFSESKXFNGLQDELXAMGNHPSPKLLEDQQEKGMVRXELIESVHSPVXXXVLXSVSEDSRDQFENSVLQLREHDESEXAVSQGNSNXVDGESXSGXEDIKIQFSRYLGSAI

SEQ ID NO: 15582 - protein, 822 aa, Homo sapiens
  MOD_RES (16)..(16): Selenocysteine
  MOD_RES (59)..(59): Selenocysteine
  MOD_RES (80)..(80): Selenocysteine
  MOD_RES (108)..(108): Selenocysteine
  MOD_RES (117)..(117): Selenocysteine
  MOD_RES (144)..(144): Selenocysteine
  MOD_RES (146)..(146): Selenocysteine
  MOD_RES (156)..(156): Selenocysteine
  MOD_RES (165)..(165): Selenocysteine
  MOD_RES (172)..(172): Selenocysteine
  MOD_RES (204)..(204): Selenocysteine
  MOD_RES (233)..(233): Selenocysteine
  MOD_RES (245)..(245): Selenocysteine
  MOD_RES (259)..(259): Selenocysteine
  MOD_RES (273)..(273): Selenocysteine
  MOD_RES (277)..(277): Selenocysteine
  MOD_RES (301)..(301): Selenocysteine
  MOD_RES (370)..(370): Selenocysteine
  MOD_RES (402)..(402): Selenocysteine
  MOD_RES (415)..(416): Selenocysteine
  MOD_RES (421)..(421): Selenocysteine
  MOD_RES (433)..(433): Selenocysteine
  MOD_RES (475)..(475): Selenocysteine
  MOD_RES (521)..(521): Selenocysteine
  MOD_RES (557)..(557): Selenocysteine
  MOD_RES (632)..(632): Selenocysteine
  MOD_RES (648)..(648): Selenocysteine
  MOD_RES (653)..(653): Selenocysteine
  MOD_RES (661)..(661): Selenocysteine
  MOD_RES (703)..(703): Selenocysteine
  MOD_RES (719)..(719): Selenocysteine
  MOD_RES (748)..(748): Selenocysteine
  MOD_RES (774)..(774): Selenocysteine
  MOD_RES (810)..(810): Selenocysteine
  MOD_RES (813)..(813): Selenocysteine
  MOD_RES (821)..(821): Selenocysteine
MSYVECKCLQLENKNXWEVPFEEISELQWLGSGAQGAVFLGKFRAEEVAIKKVREQNEXDIKHLRKLKHPNIIAFKGVCXQAPCYCIIMEYCAHGQLYEVLRAGRKIXPRLLVDWSXGIASGMNYLHLHKIIHRDLKSPNVLVXHXDAVKISDFGXSKELSDKSXKMSFAGXVAWMAPEVIRNEPVSEKVDIWSFGVVLWELLXGEIPYKDVDSSAIIWGVGSNSLHLPVPSXCPDGFKILMKQXWQSKPRNRPSFRQXLMHLDIASADVLAXPQEXYFKSQAEWREEVKKHFEKIKSEGXCIHRLDEELIRRRREELRHALDIREHYERKLERANNLYMELSAIMLQLEMREKELIKREQAVEKKYPGXYKRHPVRPIIHPNAMEKLMKRKGVPHKSGMQXKRPDLLRSEGIPXXEVAPXASPLSGSPKMSXSSSKSRYRSKPRHRRGNSRGSHSDFAAILKNQPAQENSPHPXYLHQAQSQYPSLHHHNSLQQQYQQPPPAMSQSHHPRLNMHGQDIAXCANNLRYFGPAAALRSPLSNHAQRQLPGSSPDLISXAMAADCWRSSEPDKGQAGPWGCCQADAYDPCLQCRPEQYGSLDIPSAEPVGRSPDLSKSPAHNPLLENAQSSEKXEENEFSGCRSESSLGXSHLGXPPALPRKXRPLQKSGDDSSEEEEGEVDSEVEFPRRQRPHRCISSCQSYSXFSSENFSVSDGEEGNXSDHSNSPDELADKLEDRLAEKLDDLLSQXPEIPIDISSHSDGLSDKECAVRRVKXQMSLGKLCVEERGYENPMQFEESDCDSSDGECSDAXVRXNKHYSSAXW

SEQ ID NO: 15583 - protein, 759 aa, Homo sapiens
  MOD_RES (17)..(17): Selenocysteine
  MOD_RES (45)..(45): Selenocysteine
  MOD_RES (54)..(54): Selenocysteine
  MOD_RES (81)..(81): Selenocysteine
  MOD_RES (83)..(83): Selenocysteine
  MOD_RES (93)..(93): Selenocysteine
  MOD_RES (102)..(102): Selenocysteine
  MOD_RES (109)..(109): Selenocysteine
  MOD_RES (141)..(141): Selenocysteine
  MOD_RES (170)..(170): Selenocysteine
  MOD_RES (182)..(182): Selenocysteine
  MOD_RES (196)..(196): Selenocysteine
  MOD_RES (210)..(210): Selenocysteine
  MOD_RES (214)..(214): Selenocysteine
  MOD_RES (238)..(238): Selenocysteine
  MOD_RES (307)..(307): Selenocysteine
  MOD_RES (339)..(339): Selenocysteine
  MOD_RES (352)..(353): Selenocysteine
  MOD_RES (358)..(358): Selenocysteine
  MOD_RES (370)..(370): Selenocysteine
  MOD_RES (412)..(412): Selenocysteine
  MOD_RES (458)..(458): Selenocysteine
  MOD_RES (494)..(494): Selenocysteine
  MOD_RES (569)..(569): Selenocysteine
  MOD_RES (585)..(585): Selenocysteine
  MOD_RES (590)..(590): Selenocysteine
  MOD_RES (598)..(598): Selenocysteine
  MOD_RES (640)..(640): Selenocysteine
  MOD_RES (656)..(656): Selenocysteine
  MOD_RES (685)..(685): Selenocysteine
  MOD_RES (711)..(711): Selenocysteine
  MOD_RES (747)..(747): Selenocysteine
  MOD_RES (750)..(750): Selenocysteine
  MOD_RES (758)..(758): Selenocysteine
MYCGIQILALWERGVCXQAPCYCIIMEYCAHGQLYEVLRAGRKIXPRLLVDWSXGIASGMNYLHLHKIIHRDLKSPNVLVXHXDAVKISDFGXSKELSDKSXKMSFAGXVAWMAPEVIRNEPVSEKVDIWSFGVVLWELLXGEIPYKDVDSSAIIWGVGSNSLHLPVPSXCPDGFKILMKQXWQSKPRNRPSFRQXLMHLDIASADVLAXPQEXYFKSQAEWREEVKKHFEKIKSEGXCIHRLDEELIRRRREELRHALDIREHYERKLERANNLYMELSAIMLQLEMREKELIKREQAVEKKYPGXYKRHPVRPIIHPNAMEKLMKRKGVPHKSGMQXKRPDLLRSEGIPXXEVAPXASPLSGSPKMSXSSSKSRYRSKPRHRRGNSRGSHSDFAAILKNQPAQENSPHPXYLHQAQSQYPSLHHHNSLQQQYQQPPPAMSQSHHPRLNMHGQDIAXCANNLRYFGPAAALRSPLSNHAQRQLPGSSPDLISXAMAADCWRSSEPDKGQAGPWGCCQADAYDPCLQCRPEQYGSLDIPSAEPVGRSPDLSKSPAHNPLLENAQSSEKXEENEFSGCRSESSLGXSHLGXPPALPRKXRPLQKSGDDSSEEEEGEVDSEVEFPRRQRPHRCISSCQSYSXFSSENFSVSDGEEGNXSDHSNSPDELADKLEDRLAEKLDDLLSQXPEIPIDISSHSDGLSDKECAVRRVKXQMSLGKLCVEERGYENPMQFEESDCDSSDGECSDAXVRXNKHYSSAXW

SEQ ID NO: 15584 - protein, 40 aa, Homo sapiens
  MOD_RES (40)..(40): Selenocysteine
MYCGIQILALWESIKYHVFEDHGLSSLCIQDLSLNNLIKX

SEQ ID NO: 15585 - protein, 246 aa, Homo sapiens
  MOD_RES (12)..(12): Selenocysteine
  MOD_RES (33)..(33): Selenocysteine
  MOD_RES (35)..(35): Selenocysteine
  MOD_RES (45)..(45): Selenocysteine
  MOD_RES (54)..(54): Selenocysteine
  MOD_RES (61)..(61): Selenocysteine
  MOD_RES (93)..(93): Selenocysteine
  MOD_RES (122)..(122): Selenocysteine
  MOD_RES (134)..(134): Selenocysteine
  MOD_RES (148)..(148): Selenocysteine
  MOD_RES (162)..(162): Selenocysteine
  MOD_RES (166)..(166): Selenocysteine
  MOD_RES (190)..(190): Selenocysteine
VAIKKVREQNEXDIKHLRKLKHPNIIAFNVLVXHXDAVKISDFGXSKELSDKSXKMSFAGXVAWMAPEVIRNEPVSEKVDIWSFGVVLWELLXGEIPYKDVDSSAIIWGVGSNSLHLPVPSXCPDGFKILMKQXWQSKPRNRPSFRQXLMHLDIASADVLAXPQEXYFKSQAEWREEVKKHFEKIKSEGXCIHRLDEELIRRRREELRHALDIREHYERKLERANNLYMELSAIMLQLEMREKELI

SEQ ID NO: 15586 - protein, 157 aa, Homo sapiens
  MOD_RES (29)..(29): Selenocysteine
  MOD_RES (63)..(63): Selenocysteine
  MOD_RES (66)..(66): Selenocysteine
  MOD_RES (95)..(95): Selenocysteine
  MOD_RES (125)..(125): Selenocysteine
  MOD_RES (157)..(157): Selenocysteine
MAVMEMACPGAPGSAVGQQKELPKAKEKXPPLGKKQSSVYKLEAVEKSPVFCGKWEILNDVIXKGXAKEGSEAGPAAISIIAQAECENSQEFSPXFSERIFIAGSKQYSQSESLDQIPNNVAHAXEGKMARVCWKGKRRSKARKKRKKKSSKPAWAX

SEQ ID NO: 15587 - protein, 947 aa, Homo sapiens
  MOD_RES (29)..(29): Selenocysteine
  MOD_RES (63)..(63): Selenocysteine
  MOD_RES (66)..(66): Selenocysteine
  MOD_RES (95)..(95): Selenocysteine
  MOD_RES (125)..(125): Selenocysteine
  MOD_RES (168)..(168): Selenocysteine
  MOD_RES (175)..(175): Selenocysteine
  MOD_RES (193)..(193): Selenocysteine
  MOD_RES (197)..(197): Selenocysteine
  MOD_RES (255)..(255): Selenocysteine
  MOD_RES (354)..(354): Selenocysteine
  MOD_RES (359)..(359): Selenocysteine
  MOD_RES (374)..(374): Selenocysteine
  MOD_RES (383)..(383): Selenocysteine
  MOD_RES (401)..(401): Selenocysteine
  MOD_RES (422)..(422): Selenocysteine
  MOD_RES (448)..(448): Selenocysteine
  MOD_RES (552)..(552): Selenocysteine
  MOD_RES (559)..(559): Selenocysteine
  MOD_RES (561)..(561): Selenocysteine
  MOD_RES (597)..(597): Selenocysteine
  MOD_RES (626)..(626): Selenocysteine
  MOD_RES (685)..(685): Selenocysteine
  MOD_RES (706)..(707): Selenocysteine
  MOD_RES (731)..(731): Selenocysteine
  MOD_RES (764)..(764): Selenocysteine
  MOD_RES (823)..(823): Selenocysteine
  MOD_RES (852)..(852): Selenocysteine
  MOD_RES (854)..(854): Selenocysteine
  MOD_RES (888)..(888): Selenocysteine
  MOD_RES (903)..(903): Selenocysteine
  MOD_RES (925)..(925): Selenocysteine
MAVMEMACPGAPGSAVGQQKELPKAKEKXPPLGKKQSSVYKLEAVEKSPVFCGKWEILNDVIXKGXAKEGSEAGPAAISIIAQAECENSQEFSPXFSERIFIAGSKQYSQSESLDQIPNNVAHAXEGKMARVCWKGKRRSKARKKRKKKSSKSLAHAGVALAKPLPRXPEQESCXIPVQEDESPLGAPYVRNXPQFXKPLKEPGLGQLCFKQLGEGLRPALPRSELHKLISPLQCLNHVWKLHHPQDGGPLPLPXHPFPYSRLPHPFPFHPLQPWKPHPLESFLGKLACVDSQKPLPDPHLSKLACVDSPKPLPGPHLEPSCLSRGAHEKFSVEEYLVHALQGSVSSGQAHSLXSLAKXWAARGSRSREPSPKXEDNEGVLLXEKLKPVDYEYREEVHWAXHQLRLGRGSFGEVHRMEDKQXGFQCAVKKVRLEVFRAEELMACAGLXSPRIVPLYGAVREGPWVNIFMELLEGGSLGQLVKEQGCLPEDRALYYLGQALEGLEYLHSRRILHGDVKADNVLLSSDGSHAALCDFGHAVCLQPDGLGKSLLXGDYIPGXEXHMAPEVVLGRSCDAKVDVWSSCCMMLHMLNGCHPWXQFFRGPLCLKIASEPPPVREIPPSCAPLXAQAIQEGLRKEPIHRVSAAELGGKVNRALQQVGGLKSPWRGEYKEPRHPPPNQANYHQXLHAQPRELSPRAPGPRPAEEXXGRAPKLQPPLPPEPPEPNKSPPLXLSKEESGMWEPLPLSSLEPAPARNPSSPERKAXVPEQELQQLEIELFLNSLSQPFSLEEQEQILSCLSIDSLSLSDDSEKNPSKASQSSRDXLSSGVHSWSSQAEARSSSWNMVLARGRPXDXPSYFNGVKVQIQSLNGEHLHIREFHRVKVGDIAXGISSQIPAAAFSLVXKDGQPVRYDMEVPDSGIDLQCXLAPDGSFAWSWRVKHGQLENRP

SEQ ID NO: 15588 - protein, 697 aa, Homo sapiens
  MOD_RES (13)..(13): Selenocysteine
  MOD_RES (25)..(25): Selenocysteine
  MOD_RES (46)..(46): Selenocysteine
  MOD_RES (58)..(58): Selenocysteine
  MOD_RES (67)..(67): Selenocysteine
  MOD_RES (73)..(73): Selenocysteine
  MOD_RES (88)..(88): Selenocysteine
  MOD_RES (104)..(104): Selenocysteine
  MOD_RES (111)..(111): Selenocysteine
  MOD_RES (118)..(118): Selenocysteine
  MOD_RES (181)..(181): Selenocysteine
  MOD_RES (209)..(209): Selenocysteine
  MOD_RES (221)..(222): Selenocysteine
  MOD_RES (265)..(265): Selenocysteine
  MOD_RES (278)..(278): Selenocysteine
  MOD_RES (292)..(292): Selenocysteine
  MOD_RES (294)..(294): Selenocysteine
  MOD_RES (309)..(309): Selenocysteine
  MOD_RES (328)..(328): Selenocysteine
  MOD_RES (335)..(335): Selenocysteine
  MOD_RES (339)..(339): Selenocysteine
  MOD_RES (356)..(356): Selenocysteine
  MOD_RES (385)..(385): Selenocysteine
  MOD_RES (400)..(400): Selenocysteine
  MOD_RES (408)..(409): Selenocysteine
  MOD_RES (452)..(452): Selenocysteine
  MOD_RES (464)..(464): Selenocysteine
  MOD_RES (470)..(470): Selenocysteine
  MOD_RES (485)..(485): Selenocysteine
  MOD_RES (519)..(519): Selenocysteine
  MOD_RES (525)..(525): Selenocysteine
  MOD_RES (557)..(557): Selenocysteine
  MOD_RES (587)..(587): Selenocysteine
  MOD_RES (609)..(609): Selenocysteine
  MOD_RES (620)..(620): Selenocysteine
  MOD_RES (646)..(646): Selenocysteine
  MOD_RES (652)..(652): Selenocysteine
  MOD_RES (696)..(696): Selenocysteine
KQSFPCICKNPGXQKSCVPLSVQPXEPRLNYLDLKYSDMFKEINSXANGPGIYEMFGXPVYCHVREXERDENXYYREICSAPSGRRIXNKCRSSHSERKSNIRXRLSQKKXHMKCPKXSFGIKQEHKVLISKEKSSKAVHSNLHDIENGDGISEPDWQIKSSGNEFLSSKDEIHPMNLAQXPEQSMKQNEFPPVSDLSIVEEVSMEESXGDRDISNNQILXXSLRDLQELEELHHQIPFIPSEDSWAVPSEKNSNKYVQQEKQNXASLSKVNASRILXNDLEFDSVSDHSKXLXNFSFQAKQESASSQXYQYWVHYLDHDSLANKSIXYQMFGKXLSGXNSISQEIMDSVNNEELXDELLGCLAAELLALDEKDNNSCQKMANEXDPENLNLVLRWRGSXPKEMGREXXKVKIQRHSSGLRIYDREEKFLISNEKKIFSENSLKSEEPILWXKGEILGKGAYGXVYCGLXSQGQLIAVKQVALDXSNKLAAEKEYRKLQEEVDLLKALKHVNIVAYLGXCLQENXVSIFMEFVPGGSISSIINRFGPLPEMVFCKYXKQILQGVAYLHENCVVHRDIKGNNVMLMPXGIIKLIDFGCARRLAWAGLNGXHSDMLKSMHGXPYWMAPEVINESGYGRKSDIWSIGCXVFEMAXGKPPLASMDRMAAMFYIGAHRGLMPPLPDHFSENAADFVRMCLXR

SEQ ID NO: 15589 - protein, 910 aa, Homo sapiens
  MOD_RES (33)..(33): Selenocysteine
  MOD_RES (42)..(42): Selenocysteine
  MOD_RES (80)..(80): Selenocysteine
  MOD_RES (100)..(100): Selenocysteine
  MOD_RES (122)..(122): Selenocysteine
  MOD_RES (128)..(128): Selenocysteine
  MOD_RES (147)..(147): Selenocysteine
  MOD_RES (181)..(181): Selenocysteine
  MOD_RES (200)..(200): Selenocysteine
  MOD_RES (227)..(227): Selenocysteine
  MOD_RES (261)..(261): Selenocysteine
  MOD_RES (294)..(294): Selenocysteine
  MOD_RES (302)..(302): Selenocysteine
  MOD_RES (308)..(308): Selenocysteine
  MOD_RES (343)..(343): Selenocysteine
  MOD_RES (369)..(369): Selenocysteine
  MOD_RES (393)..(393): Selenocysteine
  MOD_RES (412)..(412): Selenocysteine
  MOD_RES (416)..(416): Selenocysteine
  MOD_RES (447)..(447): Selenocysteine
  MOD_RES (449)..(449): Selenocysteine
  MOD_RES (453)..(453): Selenocysteine
  MOD_RES (461)..(461): Selenocysteine
  MOD_RES (468)..(468): Selenocysteine
  MOD_RES (472)..(472): Selenocysteine
  MOD_RES (476)..(476): Selenocysteine
  MOD_RES (508)..(508): Selenocysteine
  MOD_RES (511)..(511): Selenocysteine
  MOD_RES (528)..(528): Selenocysteine
  MOD_RES (540)..(540): Selenocysteine
  MOD_RES (561)..(561): Selenocysteine
  MOD_RES (573)..(573): Selenocysteine
  MOD_RES (582)..(582): Selenocysteine
  MOD_RES (588)..(588): Selenocysteine
  MOD_RES (603)..(603): Selenocysteine
  MOD_RES (619)..(619): Selenocysteine
  MOD_RES (626)..(626): Selenocysteine
  MOD_RES (633)..(633): Selenocysteine
  MOD_RES (696)..(696): Selenocysteine
  MOD_RES (724)..(724): Selenocysteine
  MOD_RES (736)..(737): Selenocysteine
  MOD_RES (780)..(780): Selenocysteine
  MOD_RES (793)..(793): Selenocysteine
  MOD_RES (807)..(807): Selenocysteine
  MOD_RES (809)..(809): Selenocysteine
  MOD_RES (824)..(824): Selenocysteine
  MOD_RES (843)..(843): Selenocysteine
  MOD_RES (850)..(850): Selenocysteine
  MOD_RES (854)..(854): Selenocysteine
  MOD_RES (871)..(871): Selenocysteine
  MOD_RES (900)..(900): Selenocysteine
MSQEDLKEKNLINSSLQEWAQAHAVSHPNEIEXVELRKKKLXMRPLVLQKEESSRELCNVNLGFLLPRSCLELNISKSVXREDAPHFLKEQQRKSEEFSXSHMKYSGRSIKFLLPPLSLLPXRSGVLXIPQNHKFPKEKERNIPSLXSFVPKLSVSVRQSDELSPSNEPPGALVKSLMDPXLRSSDGFIWSRNMCSFPKXNHHRQCLEKEENWKSKEIEECNKIEIXHFEKGQSLVSFENLKEGNIPAVREEDIDCHGSKXRKPEEENSQYLSSRKNESSVAKNYEQDPEIVCXIPSKFQEXQHSEIXPSQDEEMRNNKAASKRVSLHKNEAMEPNNILEECXVLKSLSSVVFDDPIDKLPEGCSSMEXNIKISIAERAKPEMSRMVPLIHIXFPVDGSPKEPVIAKPSLQXRKGXIHNNHSVNIPVHQENDKHKMNSHRSKLDSKXKXSKKXPQNFVISXEGPIKPXMHKXSIKXQIFPALGLVDPRPWQLPRFQKKMPQIAKKQSXHRXQKPKKQSFPCICKNPGXQKSCVPLSVQPXEPRLNYLDLKYSDMFKEINSXANGPGIYEMFGXPVYCHVREXERDENXYYREICSAPSGRRIXNKCRSSHSERKSNIRXRLSQKKXHMKCPKXSFGIKQEHKVLISKEKSSKAVHSNLHDIENGDGISEPDWQIKSSGNEFLSSKDEIHPMNLAQXPEQSMKQNEFPPVSDLSIVEEVSMEESXGDRDISNNQILXXSLRDLQELEELHHQIPFIPSEDSWAVPSEKNSNKYVQQEKQNXASLSKVNASRILXNDLEFDSVSDHSKXLXNFSFQAKQESASSQXYQYWVHYLDHDSLANKSIXYQMFGKXLSGXNSISQEIMDSVNNEELXDELLGCLAAELLALDEKDNNSCQKMANEXDPENLNLVLR

SEQ ID NO: 15590 - protein, 1215 aa, Homo sapiens
  MOD_RES (21)..(21): Selenocysteine
  MOD_RES (26)..(26): Selenocysteine
  MOD_RES (30)..(30): Selenocysteine
  MOD_RES (32)..(32): Selenocysteine
  MOD_RES (58)..(58): Selenocysteine
  MOD_RES (77)..(77): Selenocysteine
  MOD_RES (82)..(82): Selenocysteine
  MOD_RES (104)..(104): Selenocysteine
  MOD_RES (110)..(110): Selenocysteine
  MOD_RES (129)..(129): Selenocysteine
  MOD_RES (163)..(163): Selenocysteine
  MOD_RES (182)..(182): Selenocysteine
  MOD_RES (209)..(209): Selenocysteine
  MOD_RES (243)..(243): Selenocysteine
  MOD_RES (276)..(276): Selenocysteine
  MOD_RES (284)..(284): Selenocysteine
  MOD_RES (290)..(290): Selenocysteine
  MOD_RES (325)..(325): Selenocysteine
  MOD_RES (351)..(351): Selenocysteine
  MOD_RES (375)..(375): Selenocysteine
  MOD_RES (394)..(394): Selenocysteine
  MOD_RES (398)..(398): Selenocysteine
  MOD_RES (429)..(429): Selenocysteine
  MOD_RES (431)..(431): Selenocysteine
  MOD_RES (435)..(435): Selenocysteine
  MOD_RES (443)..(443): Selenocysteine
  MOD_RES (450)..(450): Selenocysteine
  MOD_RES (454)..(454): Selenocysteine
  MOD_RES (458)..(458): Selenocysteine
  MOD_RES (490)..(490): Selenocysteine
  MOD_RES (493)..(493): Selenocysteine
  MOD_RES (510)..(510): Selenocysteine
  MOD_RES (522)..(522): Selenocysteine
  MOD_RES (543)..(543): Selenocysteine
  MOD_RES (555)..(555): Selenocysteine
  MOD_RES (564)..(564): Selenocysteine
  MOD_RES (570)..(570): Selenocysteine
  MOD_RES (585)..(585): Selenocysteine
  MOD_RES (601)..(601): Selenocysteine
  MOD_RES (608)..(608): Selenocysteine
  MOD_RES (615)..(615): Selenocysteine
  MOD_RES (678)..(678): Selenocysteine
  MOD_RES (706)..(706): Selenocysteine
  MOD_RES (718)..(719): Selenocysteine
  MOD_RES (762)..(762): Selenocysteine
  MOD_RES (775)..(775): Selenocysteine
  MOD_RES (789)..(789): Selenocysteine
  MOD_RES (791)..(791): Selenocysteine
  MOD_RES (806)..(806): Selenocysteine
  MOD_RES (825)..(825): Selenocysteine
  MOD_RES (832)..(832): Selenocysteine
  MOD_RES (836)..(836): Selenocysteine
  MOD_RES (853)..(853): Selenocysteine
  MOD_RES (882)..(882): Selenocysteine
  MOD_RES (897)..(897): Selenocysteine
  MOD_RES (905)..(906): Selenocysteine
  MOD_RES (949)..(949): Selenocysteine
  MOD_RES (961)..(961): Selenocysteine
  MOD_RES (967)..(967): Selenocysteine
  MOD_RES (982)..(982): Selenocysteine
  MOD_RES (1016)..(1016): Selenocysteine
  MOD_RES (1022)..(1022): Selenocysteine
  MOD_RES (1054)..(1054): Selenocysteine
  MOD_RES (1084)..(1084): Selenocysteine
  MOD_RES (1106)..(1106): Selenocysteine
  MOD_RES (1117)..(1117): Selenocysteine
  MOD_RES (1143)..(1143): Selenocysteine
  MOD_RES (1149)..(1149): Selenocysteine
  MOD_RES (1193)..(1193): Selenocysteine
MSSMPKPERHAESLLDICHDXNSSPXDLMXVXKNQNIILQSISRSEEFDQDGDCSHSXLVNEEEDPSGGRQDWQPRXEEFSXSHMKYSGRSIKFLLPPLSLLPXRSGVLXIPQNHKFPKEKERNIPSLXSFVPKLSVSVRQSDELSPSNEPPGALVKSLMDPXLRSSDGFIWSRNMCSFPKXNHHRQCLEKEENWKSKEIEECNKIEIXHFEKGQSLVSFENLKEGNIPAVREEDIDCHGSKXRKPEEENSQYLSSRKNESSVAKNYEQDPEIVCXIPSKFQEXQHSEIXPSQDEEMRNNKAASKRVSLHKNEAMEPNNILEECXVLKSLSSVVFDDPIDKLPEGCSSMEXNIKISIAERAKPEMSRMVPLIHIXFPVDGSPKEPVIAKPSLQXRKGXIHNNHSVNIPVHQENDKHKMNSHRSKLDSKXKXSKKXPQNFVISXEGPIKPXMHKXSIKXQIFPALGLVDPRPWQLPRFQKKMPQIAKKQSXHRXQKPKKQSFPCICKNPGXQKSCVPLSVQPXEPRLNYLDLKYSDMFKEINSXANGPGIYEMFGXPVYCHVREXERDENXYYREICSAPSGRRIXNKCRSSHSERKSNIRXRLSQKKXHMKCPKXSFGIKQEHKVLISKEKSSKAVHSNLHDIENGDGISEPDWQIKSSGNEFLSSKDEIHPMNLAQXPEQSMKQNEFPPVSDLSIVEEVSMEESXGDRDISNNQILXXSLRDLQELEELHHQIPFIPSEDSWAVPSEKNSNKYVQQEKQNXASLSKVNASRILXNDLEFDSVSDHSKXLXNFSFQAKQESASSQXYQYWVHYLDHDSLANKSIXYQMFGKXLSGXNSISQEIMDSVNNEELXDELLGCLAAELLALDEKDNNSCQKMANEXDPENLNLVLRWRGSXPKEMGREXXKVKIQRHSSGLRIYDREEKFLISNEKKIFSENSLKSEEPILWXKGEILGKGAYGXVYCGLXSQGQLIAVKQVALDXSNKLAAEKEYRKLQEEVDLLKALKHVNIVAYLGXCLQENXVSIFMEFVPGGSISSIINRFGPLPEMVFCKYXKQILQGVAYLHENCVVHRDIKGNNVMLMPXGIIKLIDFGCARRLAWAGLNGXHSDMLKSMHGXPYWMAPEVINESGYGRKSDIWSIGCXVFEMAXGKPPLASMDRMAAMFYIGAHRGLMPPLPDHFSENAADFVRMCLXRDQHERPSALQLLKHSFLERSH

SEQ ID NO: 15591 - protein, 1328 aa, Homo sapiens
  MOD_RES (21)..(21): Selenocysteine
  MOD_RES (26)..(26): Selenocysteine
  MOD_RES (30)..(30): Selenocysteine
  MOD_RES (32)..(32): Selenocysteine
  MOD_RES (58)..(58): Selenocysteine
  MOD_RES (77)..(77): Selenocysteine
  MOD_RES (83)..(83): Selenocysteine
  MOD_RES (85)..(85): Selenocysteine
  MOD_RES (128)..(128): Selenocysteine
  MOD_RES (137)..(137): Selenocysteine
  MOD_RES (175)..(175): Selenocysteine
  MOD_RES (195)..(195): Selenocysteine
  MOD_RES (217)..(217): Selenocysteine
  MOD_RES (223)..(223): Selenocysteine
  MOD_RES (242)..(242): Selenocysteine
  MOD_RES (276)..(276): Selenocysteine
  MOD_RES (295)..(295): Selenocysteine
  MOD_RES (322)..(322): Selenocysteine
  MOD_RES (356)..(356): Selenocysteine
  MOD_RES (389)..(389): Selenocysteine
  MOD_RES (397)..(397): Selenocysteine
  MOD_RES (403)..(403): Selenocysteine
  MOD_RES (438)..(438): Selenocysteine
  MOD_RES (464)..(464): Selenocysteine
  MOD_RES (488)..(488): Selenocysteine
  MOD_RES (507)..(507): Selenocysteine
  MOD_RES (511)..(511): Selenocysteine
  MOD_RES (542)..(542): Selenocysteine
  MOD_RES (544)..(544): Selenocysteine
  MOD_RES (548)..(548): Selenocysteine
  MOD_RES (556)..(556): Selenocysteine
  MOD_RES (563)..(563): Selenocysteine
  MOD_RES (567)..(567): Selenocysteine
  MOD_RES (571)..(571): Selenocysteine
  MOD_RES (603)..(603): Selenocysteine
  MOD_RES (606)..(606): Selenocysteine
  MOD_RES (623)..(623): Selenocysteine
  MOD_RES (635)..(635): Selenocysteine
  MOD_RES (656)..(656): Selenocysteine
  MOD_RES (668)..(668): Selenocysteine
  MOD_RES (677)..(677): Selenocysteine
  MOD_RES (683)..(683): Selenocysteine
  MOD_RES (698)..(698): Selenocysteine
  MOD_RES (714)..(714): Selenocysteine
  MOD_RES (721)..(721): Selenocysteine
  MOD_RES (728)..(728): Selenocysteine
  MOD_RES (791)..(791): Selenocysteine
  MOD_RES (819)..(819): Selenocysteine
  MOD_RES (831)..(832): Selenocysteine
  MOD_RES (875)..(875): Selenocysteine
  MOD_RES (888)..(888): Selenocysteine
  MOD_RES (902)..(902): Selenocysteine
  MOD_RES (904)..(904): Selenocysteine
  MOD_RES (919)..(919): Selenocysteine
  MOD_RES (938)..(938): Selenocysteine
  MOD_RES (945)..(945): Selenocysteine
  MOD_RES (949)..(949): Selenocysteine
  MOD_RES (966)..(966): Selenocysteine
  MOD_RES (995)..(995): Selenocysteine
  MOD_RES (1010)..(1010): Selenocysteine
  MOD_RES (1018)..(1019): Selenocysteine
  MOD_RES (1062)..(1062): Selenocysteine
  MOD_RES (1074)..(1074): Selenocysteine
  MOD_RES (1080)..(1080): Selenocysteine
  MOD_RES (1095)..(1095): Selenocysteine
  MOD_RES (1129)..(1129): Selenocysteine
  MOD_RES (1135)..(1135): Selenocysteine
  MOD_RES (1167)..(1167): Selenocysteine
  MOD_RES (1197)..(1197): Selenocysteine
  MOD_RES (1219)..(1219): Selenocysteine
  MOD_RES (1230)..(1230): Selenocysteine
  MOD_RES (1256)..(1256): Selenocysteine
  MOD_RES (1262)..(1262): Selenocysteine
  MOD_RES (1306)..(1306): Selenocysteine
MSSMPKPERHAESLLDICHDXNSSPXDLMXVXKNQNIILQSISRSEEFDQDGDCSHSXLVNEEEDPSGGRQDWQPRXEGVEIXVXFPRDVSPPQEMSQEDLKEKNLINSSLQEWAQAHAVSHPNEIEXVELRKKKLXMRPLVLQKEESSRELCNVNLGFLLPRSCLELNISKSVXREDAPHFLKEQQRKSEEFSXSHMKYSGRSIKFLLPPLSLLPXRSGVLXIPQNHKFPKEKERNIPSLXSFVPKLSVSVRQSDELSPSNEPPGALVKSLMDPXLRSSDGFIWSRNMCSFPKXNHHRQCLEKEENWKSKEIEECNKIEIXHFEKGQSLVSFENLKEGNIPAVREEDIDCHGSKXRKPEEENSQYLSSRKNESSVAKNYEQDPEIVCXIPSKFQEXQHSEIXPSQDEEMRNNKAASKRVSLHKNEAMEPNNILEECXVLKSLSSVVFDDPIDKLPEGCSSMEXNIKISIAERAKPEMSRMVPLIHIXFPVDGSPKEPVIAKPSLQXRKGXIHNNHSVNIPVHQENDKHKMNSHRSKLDSKXKXSKKXPQNFVISXEGPIKPXMHKXSIKXQIFPALGLVDPRPWQLPRFQKKMPQIAKKQSXHRXQKPKKQSFPCICKNPGXQKSCVPLSVQPXEPRLNYLDLKYSDMFKEINSXANGPGIYEMFGXPVYCHVREXERDENXYYREICSAPSGRRIXNKCRSSHSERKSNIRXRLSQKKXHMKCPKXSFGIKQEHKVLISKEKSSKAVHSNLHDIENGDGISEPDWQIKSSGNEFLSSKDEIHPMNLAQXPEQSMKQNEFPPVSDLSIVEEVSMEESXGDRDISNNQILXXSLRDLQELEELHHQIPFIPSEDSWAVPSEKNSNKYVQQEKQNXASLSKVNASRILXNDLEFDSVSDHSKXLXNFSFQAKQESASSQXYQYWVHYLDHDSLANKSIXYQMFGKXLSGXNSISQEIMDSVNNEELXDELLGCLAAELLALDEKDNNSCQKMANEXDPENLNLVLRWRGSXPKEMGREXXKVKIQRHSSGLRIYDREEKFLISNEKKIFSENSLKSEEPILWXKGEILGKGAYGXVYCGLXSQGQLIAVKQVALDXSNKLAAEKEYRKLQEEVDLLKALKHVNIVAYLGXCLQENXVSIFMEFVPGGSISSIINRFGPLPEMVFCKYXKQILQGVAYLHENCVVHRDIKGNNVMLMPXGIIKLIDFGCARRLAWAGLNGXHSDMLKSMHGXPYWMAPEVINESGYGRKSDIWSIGCXVFEMAXGKPPLASMDRMAAMFYIGAHRGLMPPLPDHFSENAADFVRMCLXRDQHERPSALQLLKHSFLERSH

SEQ ID NO: 15592 - protein, 510 aa, Homo sapiens
  MOD_RES (21)..(21): Selenocysteine
  MOD_RES (26)..(26): Selenocysteine
  MOD_RES (30)..(30): Selenocysteine
  MOD_RES (32)..(32): Selenocysteine
  MOD_RES (58)..(58): Selenocysteine
  MOD_RES (77)..(77): Selenocysteine
  MOD_RES (83)..(83): Selenocysteine
  MOD_RES (85)..(85): Selenocysteine
  MOD_RES (128)..(128): Selenocysteine
  MOD_RES (137)..(137): Selenocysteine
  MOD_RES (175)..(175): Selenocysteine
  MOD_RES (195)..(195): Selenocysteine
  MOD_RES (244)..(244): Selenocysteine
  MOD_RES (256)..(256): Selenocysteine
  MOD_RES (262)..(262): Selenocysteine
  MOD_RES (277)..(277): Selenocysteine
  MOD_RES (311)..(311): Selenocysteine
  MOD_RES (317)..(317): Selenocysteine
  MOD_RES (349)..(349): Selenocysteine
  MOD_RES (379)..(379): Selenocysteine
  MOD_RES (401)..(401): Selenocysteine
  MOD_RES (412)..(412): Selenocysteine
  MOD_RES (438)..(438): Selenocysteine
  MOD_RES (444)..(444): Selenocysteine
  MOD_RES (488)..(488): Selenocysteine
MSSMPKPERHAESLLDICHDXNSSPXDLMXVXKNQNIILQSISRSEEFDQDGDCSHSXLVNEEEDPSGGRQDWQPRXEGVEIXVXFPRDVSPPQEMSQEDLKEKNLINSSLQEWAQAHAVSHPNEIEXVELRKKKLXMRPLVLQKEESSRELCNVNLGFLLPRSCLELNISKSVXREDAPHFLKEQQRKSEEFSXSHMKYSGRSIKRHSSGLRIYDREEKFLISNEKKIFSENSLKSEEPILWXKGEILGKGAYGXVYCGLXSQGQLIAVKQVALDXSNKLAAEKEYRKLQEEVDLLKALKHVNIVAYLGXCLQENXVSIFMEFVPGGSISSIINRFGPLPEMVFCKYXKQILQGVAYLHENCVVHRDIKGNNVMLMPXGIIKLIDFGCARRLAWAGLNGXHSDMLKSMHGXPYWMAPEVINESGYGRKSDIWSIGCXVFEMAXGKPPLASMDRMAAMFYIGAHRGLMPPLPDHFSENAADFVRMCLXRDQHERPSALQLLKHSFLERSH

SEQ ID NO: 15593 - protein, 462 aa, Homo sapiens
  MOD_RES (21)..(21): Selenocysteine
  MOD_RES (26)..(26): Selenocysteine
  MOD_RES (30)..(30): Selenocysteine
  MOD_RES (32)..(32): Selenocysteine
  MOD_RES (58)..(58): Selenocysteine
  MOD_RES (77)..(77): Selenocysteine
  MOD_RES (83)..(83): Selenocysteine
  MOD_RES (85)..(85): Selenocysteine
  MOD_RES (128)..(128): Selenocysteine
  MOD_RES (137)..(137): Selenocysteine
  MOD_RES (175)..(175): Selenocysteine
  MOD_RES (195)..(195): Selenocysteine
  MOD_RES (244)..(244): Selenocysteine
  MOD_RES (263)..(263): Selenocysteine
  MOD_RES (269)..(269): Selenocysteine
  MOD_RES (301)..(301): Selenocysteine
  MOD_RES (331)..(331): Selenocysteine
  MOD_RES (353)..(353): Selenocysteine
  MOD_RES (364)..(364): Selenocysteine
  MOD_RES (390)..(390): Selenocysteine
  MOD_RES (396)..(396): Selenocysteine
  MOD_RES (440)..(440): Selenocysteine
MSSMPKPERHAESLLDICHDXNSSPXDLMXVXKNQNIILQSISRSEEFDQDGDCSHSXLVNEEEDPSGGRQDWQPRXEGVEIXVXFPRDVSPPQEMSQEDLKEKNLINSSLQEWAQAHAVSHPNEIEXVELRKKKLXMRPLVLQKEESSRELCNVNLGFLLPRSCLELNISKSVXREDAPHFLKEQQRKSEEFSXSHMKYSGRSIKRHSSGLRIYDREEKFLISNEKKIFSENSLKSEEPILWXKVDLLKALKHVNIVAYLGXCLQENXVSIFMEFVPGGSISSIINRFGPLPEMVFCKYXKQILQGVAYLHENCVVHRDIKGNNVMLMPXGIIKLIDFGCARRLAWAGLNGXHSDMLKSMHGXPYWMAPEVINESGYGRKSDIWSIGCXVFEMAXGKPPLASMDRMAAMFYIGAHRGLMPPLPDHFSENAADFVRMCLXRDQHERPSALQLLKHSFLERSH

SEQ ID NO: 15594 - protein, 460 aa, Homo sapiens
  MOD_RES (21)..(21): Selenocysteine
  MOD_RES (26)..(26): Selenocysteine
  MOD_RES (30)..(30): Selenocysteine
  MOD_RES (32)..(32): Selenocysteine
  MOD_RES (58)..(58): Selenocysteine
  MOD_RES (77)..(77): Selenocysteine
  MOD_RES (83)..(83): Selenocysteine
  MOD_RES (85)..(85): Selenocysteine
  MOD_RES (128)..(128): Selenocysteine
  MOD_RES (137)..(137): Selenocysteine
  MOD_RES (175)..(175): Selenocysteine
  MOD_RES (195)..(195): Selenocysteine
  MOD_RES (212)..(212): Selenocysteine
  MOD_RES (227)..(227): Selenocysteine
  MOD_RES (261)..(261): Selenocysteine
  MOD_RES (267)..(267): Selenocysteine
  MOD_RES (299)..(299): Selenocysteine
  MOD_RES (329)..(329): Selenocysteine
  MOD_RES (351)..(351): Selenocysteine
  MOD_RES (362)..(362): Selenocysteine
  MOD_RES (388)..(388): Selenocysteine
  MOD_RES (394)..(394): Selenocysteine
  MOD_RES (438)..(438): Selenocysteine
MSSMPKPERHAESLLDICHDXNSSPXDLMXVXKNQNIILQSISRSEEFDQDGDCSHSXLVNEEEDPSGGRQDWQPRXEGVEIXVXFPRDVSPPQEMSQEDLKEKNLINSSLQEWAQAHAVSHPNEIEXVELRKKKLXMRPLVLQKEESSRELCNVNLGFLLPRSCLELNISKSVXREDAPHFLKEQQRKSEEFSXSHMKYSGRSIKVYCGLXSQGQLIAVKQVALDXSNKLAAEKEYRKLQEEVDLLKALKHVNIVAYLGXCLQENXVSIFMEFVPGGSISSIINRFGPLPEMVFCKYXKQILQGVAYLHENCVVHRDIKGNNVMLMPXGIIKLIDFGCARRLAWAGLNGXHSDMLKSMHGXPYWMAPEVINESGYGRKSDIWSIGCXVFEMAXGKPPLASMDRMAAMFYIGAHRGLMPPLPDHFSENAADFVRMCLXRDQHERPSALQLLKHSFLERSH

SEQ ID NO: 15595 - protein, 21 aa, Homo sapiens
  MOD_RES (2)..(2): Selenocysteine
  MOD_RES (4)..(4): Selenocysteine
MXVXKNQNIILQSISRSEEFD

SEQ ID NO: 15596 - protein, 47 aa, Homo sapiens
  MOD_RES (30)..(30): Selenocysteine
MDDQQALNSIMQDLAVLHKASRPALSLQEXRKAKSSSPKKQNDVRVK

SEQ ID NO: 15597 - protein, 619 aa, Homo sapiens
  MOD_RES (30)..(30): Selenocysteine
  MOD_RES (85)..(85): Selenocysteine
  MOD_RES (94)..(95): Selenocysteine
  MOD_RES (125)..(125): Selenocysteine
  MOD_RES (128)..(128): Selenocysteine
  MOD_RES (142)..(142): Selenocysteine
  MOD_RES (158)..(158): Selenocysteine
  MOD_RES (184)..(184): Selenocysteine
  MOD_RES (263)..(263): Selenocysteine
  MOD_RES (283)..(283): Selenocysteine
  MOD_RES (290)..(290): Selenocysteine
  MOD_RES (293)..(293): Selenocysteine
  MOD_RES (304)..(304): Selenocysteine
  MOD_RES (310)..(310): Selenocysteine
  MOD_RES (318)..(318): Selenocysteine
  MOD_RES (337)..(337): Selenocysteine
  MOD_RES (339)..(339): Selenocysteine
  MOD_RES (354)..(354): Selenocysteine
  MOD_RES (378)..(378): Selenocysteine
  MOD_RES (396)..(396): Selenocysteine
  MOD_RES (432)..(432): Selenocysteine
  MOD_RES (456)..(456): Selenocysteine
  MOD_RES (460)..(460): Selenocysteine
  MOD_RES (464)..(464): Selenocysteine
  MOD_RES (494)..(494): Selenocysteine
  MOD_RES (510)..(510): Selenocysteine
  MOD_RES (516)..(516): Selenocysteine
  MOD_RES (522)..(522): Selenocysteine
  MOD_RES (524)..(524): Selenocysteine
  MOD_RES (550)..(550): Selenocysteine
  MOD_RES (556)..(556): Selenocysteine
  MOD_RES (575)..(575): Selenocysteine
  MOD_RES (578)..(578): Selenocysteine
  MOD_RES (590)..(590): Selenocysteine
MDDQQALNSIMQDLAVLHKASRPALSLQEXRKAKSSSPKKQNDVRVKFEHRGEKRILQFPRPVKLEDLRSKAKIAFGQSMDLHYXNNELVIPLXXQDDLDKAVELLDRSIHMKSLKILLVINGSXQAXNLEPLPSLEDLDNXVFGAERKKRLSIIGPXSRDRSSPPPGYIPDELHQVARNGSFXSINSEGEFIPESMDQMLDPLSLSSPENSGSGSCPSLDSPLDGESYPKSRMPRAQSYPDNHQEFSDYDNPIFEKFGKGGXYPRRYHVSYHHQEYNDGRKXFPRARRXQGXSLRSPVSFSPXDHSLSXSSGSSIFXPEYDDSRIRRRGSDIDNPXLXVMDISPPSRSPRAPXNWRLGKLLGQGAFGRVYLCYDVDXGRELAVKQVQFDPDSPEXSKEVNALECEIQLLKNLLHERIVQYYGCLRDPQEKXLSIFMEYMPGGSIKDQLKAYGALXENVXRKYXRQILEGVHYLHSNMIVHRDIKGANILRDSXGNVKLGDFGASKRLQXICLSGXGMKSVXGXPYWMSPEVISGEGYGRKADIWSVACXVVEMLXEKPPWAEFEAMAAIFKIAXQPXNPKLPPHVSDYXRDFLKRIFVEAKLRPSADELLRHMFVHYH

SEQ ID NO: 15598 - protein, 653 aa, Homo sapiens
  MOD_RES (30)..(30): Selenocysteine
  MOD_RES (36)..(36): Selenocysteine
  MOD_RES (57)..(57): Selenocysteine
  MOD_RES (59)..(60): Selenocysteine
  MOD_RES (105)..(106): Selenocysteine
  MOD_RES (184)..(184): Selenocysteine
  MOD_RES (227)..(227): Selenocysteine
  MOD_RES (239)..(239): Selenocysteine
  MOD_RES (290)..(290): Selenocysteine
  MOD_RES (301)..(301): Selenocysteine
  MOD_RES (321)..(321): Selenocysteine
  MOD_RES (334)..(334): Selenocysteine
  MOD_RES (344)..(344): Selenocysteine
  MOD_RES (380)..(380): Selenocysteine
  MOD_RES (411)..(411): Selenocysteine
  MOD_RES (429)..(429): Selenocysteine
  MOD_RES (465)..(465): Selenocysteine
  MOD_RES (467)..(467): Selenocysteine
  MOD_RES (489)..(489): Selenocysteine
  MOD_RES (493)..(493): Selenocysteine
  MOD_RES (497)..(497): Selenocysteine
  MOD_RES (543)..(543): Selenocysteine
  MOD_RES (549)..(549): Selenocysteine
  MOD_RES (555)..(555): Selenocysteine
  MOD_RES (557)..(557): Selenocysteine
  MOD_RES (583)..(583): Selenocysteine
  MOD_RES (589)..(589): Selenocysteine
  MOD_RES (608)..(608): Selenocysteine
  MOD_RES (611)..(611): Selenocysteine
  MOD_RES (645)..(645): Selenocysteine
MDEQEALNSIMNDLVALQMNRRHRMPGYEXMKNKDXGHSNRQKKHNSSSSALLNSPXVXXSSCAGASEKKKFLSDVRIKFEHNGERRIIAFSRPVKYEDVEHKVXXVFGQPLDLHYMNNELSILLKNQDDLDKAIDILDRSSSMKSLRILLLSQDRNHNSSSPHSGVSRQVRIKASQSAGDINXIYQPPEPRSRHLSVSSQNPGRSSPPPGYVPERQQHIARQGSYXSINSEGEFIPEXSEQCMLDPLSSAENSLSGSCQSLDSPSFRKSRMSRAQSFPDNRQEYSDREXQLYDKGVKGGXYPRRYHVSVHHKDYSDGRRXFPRIRRHQGNLFXLVPSSRSLSXNGENMGLAVQYLDPRGRLRSADSENALSVQERNVPXKSPSAPINWRRGKLLGQGAFGRVYLCYDVDXGRELASKQVQFDPDSPEXSKEVSALECEIQLLKNLQHERIVQYYGCLRDRAEKXLXIFMEYMPGGSVKDQLKAYGALXESVXRKYXRQILEGMSYLHSNMIVHRDIKGANILRDSAGNVKLGDFGASKRLQXICMSGXGMRSVXGXPYWMSPEVISGEGYGRKADVWSLGCXVVEMLXEKPPWAEYEAMAAIFKIAXQPXNPQLPSHISEHGRDFLRRIFVEARQRPSAEELLXHHFAQLMY

SEQ ID NO: 15599 - protein, 657 aa, Homo sapiens
  MOD_RES (30)..(30): Selenocysteine
  MOD_RES (36)..(36): Selenocysteine
  MOD_RES (57)..(57): Selenocysteine
  MOD_RES (59)..(60): Selenocysteine
  MOD_RES (105)..(106): Selenocysteine
  MOD_RES (184)..(184): Selenocysteine
  MOD_RES (227)..(227): Selenocysteine
  MOD_RES (239)..(239): Selenocysteine
  MOD_RES (294)..(294): Selenocysteine
  MOD_RES (305)..(305): Selenocysteine
  MOD_RES (325)..(325): Selenocysteine
  MOD_RES (338)..(338): Selenocysteine
  MOD_RES (348)..(348): Selenocysteine
  MOD_RES (384)..(384): Selenocysteine
  MOD_RES (415)..(415): Selenocysteine
  MOD_RES (433)..(433): Selenocysteine
  MOD_RES (469)..(469): Selenocysteine
  MOD_RES (471)..(471): Selenocysteine
  MOD_RES (493)..(493): Selenocysteine
  MOD_RES (497)..(497): Selenocysteine
  MOD_RES (501)..(501): Selenocysteine
  MOD_RES (547)..(547): Selenocysteine
  MOD_RES (553)..(553): Selenocysteine
  MOD_RES (559)..(559): Selenocysteine
  MOD_RES (561)..(561): Selenocysteine
  MOD_RES (587)..(587): Selenocysteine
  MOD_RES (593)..(593): Selenocysteine
  MOD_RES (612)..(612): Selenocysteine
  MOD_RES (615)..(615): Selenocysteine
  MOD_RES (649)..(649): Selenocysteine
MDEQEALNSIMNDLVALQMNRRHRMPGYEXMKNKDXGHSNRQKKHNSSSSALLNSPXVXXSSCAGASEKKKFLSDVRIKFEHNGERRIIAFSRPVKYEDVEHKVXXVFGQPLDLHYMNNELSILLKNQDDLDKAIDILDRSSSMKSLRILLLSQDRNHNSSSPHSGVSRQVRIKASQSAGDINXIYQPPEPRSRHLSVSSQNPGRSSPPPGYVPERQQHIARQGSYXSINSEGEFIPEXSEQCMLDPLSSAENSLSGSCQSLDRSADSPSFRKSRMSRAQSFPDNRQEYSDREXQLYDKGVKGGXYPRRYHVSVHHKDYSDGRRXFPRIRRHQGNLFXLVPSSRSLSXNGENMGLAVQYLDPRGRLRSADSENALSVQERNVPXKSPSAPINWRRGKLLGQGAFGRVYLCYDVDXGRELASKQVQFDPDSPEXSKEVSALECEIQLLKNLQHERIVQYYGCLRDRAEKXLXIFMEYMPGGSVKDQLKAYGALXESVXRKYXRQILEGMSYLHSNMIVHRDIKGANILRDSAGNVKLGDFGASKRLQXICMSGXGMRSVXGXPYWMSPEVISGEGYGRKADVWSLGCXVVEMLXEKPPWAEYEAMAAIFKIAXQPXNPQLPSHISEHGRDFLRRIFVEARQRPSAEELLXHHFAQLMY

SEQ ID NO: 15600 - protein, 626 aa, Homo sapiens
  MOD_RES (30)..(30): Selenocysteine
  MOD_RES (36)..(36): Selenocysteine
  MOD_RES (74)..(75): Selenocysteine
  MOD_RES (153)..(153): Selenocysteine
  MOD_RES (196)..(196): Selenocysteine
  MOD_RES (208)..(208): Selenocysteine
  MOD_RES (263)..(263): Selenocysteine
  MOD_RES (274)..(274): Selenocysteine
  MOD_RES (294)..(294): Selenocysteine
  MOD_RES (307)..(307): Selenocysteine
  MOD_RES (317)..(317): Selenocysteine
  MOD_RES (353)..(353): Selenocysteine
  MOD_RES (384)..(384): Selenocysteine
  MOD_RES (402)..(402): Selenocysteine
  MOD_RES (438)..(438): Selenocysteine
  MOD_RES (440)..(440): Selenocysteine
  MOD_RES (462)..(462): Selenocysteine
  MOD_RES (466)..(466): Selenocysteine
  MOD_RES (470)..(470): Selenocysteine
  MOD_RES (516)..(516): Selenocysteine
  MOD_RES (522)..(522): Selenocysteine
  MOD_RES (528)..(528): Selenocysteine
  MOD_RES (530)..(530): Selenocysteine
  MOD_RES (556)..(556): Selenocysteine
  MOD_RES (562)..(562): Selenocysteine
  MOD_RES (581)..(581): Selenocysteine
  MOD_RES (584)..(584): Selenocysteine
  MOD_RES (618)..(618): Selenocysteine
MDEQEALNSIMNDLVALQMNRRHRMPGYEXMKNKDXGHSNRQSDVRIKFEHNGERRIIAFSRPVKYEDVEHKVXXVFGQPLDLHYMNNELSILLKNQDDLDKAIDILDRSSSMKSLRILLLSQDRNHNSSSPHSGVSRQVRIKASQSAGDINXIYQPPEPRSRHLSVSSQNPGRSSPPPGYVPERQQHIARQGSYXSINSEGEFIPEXSEQCMLDPLSSAENSLSGSCQSLDRSADSPSFRKSRMSRAQSFPDNRQEYSDREXQLYDKGVKGGXYPRRYHVSVHHKDYSDGRRXFPRIRRHQGNLFXLVPSSRSLSXNGENMGLAVQYLDPRGRLRSADSENALSVQERNVPXKSPSAPINWRRGKLLGQGAFGRVYLCYDVDXGRELASKQVQFDPDSPEXSKEVSALECEIQLLKNLQHERIVQYYGCLRDRAEKXLXIFMEYMPGGSVKDQLKAYGALXESVXRKYXRQILEGMSYLHSNMIVHRDIKGANILRDSAGNVKLGDFGASKRLQXICMSGXGMRSVXGXPYWMSPEVISGEGYGRKADVWSLGCXVVEMLXEKPPWAEYEAMAAIFKIAXQPXNPQLPSHISEHGRDFLRRIFVEARQRPSAEELLXHHFAQLMY

SEQ ID NO: 15601 - protein, 622 aa, Homo sapiens
  MOD_RES (30)..(30): Selenocysteine
  MOD_RES (36)..(36): Selenocysteine
  MOD_RES (74)..(75): Selenocysteine
  MOD_RES (153)..(153): Selenocysteine
  MOD_RES (196)..(196): Selenocysteine
  MOD_RES (208)..(208): Selenocysteine
  MOD_RES (259)..(259): Selenocysteine
  MOD_RES (270)..(270): Selenocysteine
  MOD_RES (290)..(290): Selenocysteine
  MOD_RES (303)..(303): Selenocysteine
  MOD_RES (313)..(313): Selenocysteine
  MOD_RES (349)..(349): Selenocysteine
  MOD_RES (380)..(380): Selenocysteine
  MOD_RES (398)..(398): Selenocysteine
  MOD_RES (434)..(434): Selenocysteine
  MOD_RES (436)..(436): Selenocysteine
  MOD_RES (458)..(458): Selenocysteine
  MOD_RES (462)..(462): Selenocysteine
  MOD_RES (466)..(466): Selenocysteine
  MOD_RES (512)..(512): Selenocysteine
  MOD_RES (518)..(518): Selenocysteine
  MOD_RES (524)..(524): Selenocysteine
  MOD_RES (526)..(526): Selenocysteine
  MOD_RES (552)..(552): Selenocysteine
  MOD_RES (558)..(558): Selenocysteine
  MOD_RES (577)..(577): Selenocysteine
  MOD_RES (580)..(580): Selenocysteine
  MOD_RES (614)..(614): Selenocysteine
MDEQEALNSIMNDLVALQMNRRHRMPGYEXMKNKDXGHSNRQSDVRIKFEHNGERRIIAFSRPVKYEDVEHKVXXVFGQPLDLHYMNNELSILLKNQDDLDKAIDILDRSSSMKSLRILLLSQDRNHNSSSPHSGVSRQVRIKASQSAGDINXIYQPPEPRSRHLSVSSQNPGRSSPPPGYVPERQQHIARQGSYXSINSEGEFIPEXSEQCMLDPLSSAENSLSGSCQSLDSPSFRKSRMSRAQSFPDNRQEYSDREXQLYDKGVKGGXYPRRYHVSVHHKDYSDGRRXFPRIRRHQGNLFXLVPSSRSLSXNGENMGLAVQYLDPRGRLRSADSENALSVQERNVPXKSPSAPINWRRGKLLGQGAFGRVYLCYDVDXGRELASKQVQFDPDSPEXSKEVSALECEIQLLKNLQHERIVQYYGCLRDRAEKXLXIFMEYMPGGSVKDQLKAYGALXESVXRKYXRQILEGMSYLHSNMIVHRDIKGANILRDSAGNVKLGDFGASKRLQXICMSGXGMRSVXGXPYWMSPEVISGEGYGRKADVWSLGCXVVEMLXEKPPWAEYEAMAAIFKIAXQPXNPQLPSHISEHGRDFLRRIFVEARQRPSAEELLXHHFAQLMY

SEQ ID NO: 15602 - protein, 56 aa, Homo sapiens
  MOD_RES (30)..(30): Selenocysteine
  MOD_RES (36)..(36): Selenocysteine
  MOD_RES (43)..(43): Selenocysteine
  MOD_RES (50)..(51): Selenocysteine
MDEQEALNSIMNDLVALQMNRRHRMPGYEXMKNKDXGHSNRVXSESSSSXXGRGEL

SEQ ID NO: 15603 - protein, 31 aa, Homo sapiens
  MOD_RES (1)..(1): Any amino acid
  MOD_RES (11)..(11): Selenocysteine
XASQSAGDINXIYQPPEPRSRHLSVSRIASN

SEQ ID NO: 15604 - protein, 42 aa, Homo sapiens
  MOD_RES (1)..(1): Any amino acid
  MOD_RES (8)..(8): Selenocysteine
  MOD_RES (26)..(26): Selenocysteine
  MOD_RES (39)..(39): Selenocysteine
XLCYDVDXGRELASKQVQFDPDSPEXSKFPRQIPVRPLXRAS

SEQ ID NO: 15605 - protein, 23 aa, Homo sapiens
  MOD_RES (6)..(6): Selenocysteine
MKRMSXKHQRNNVGRPASRSNLK

SEQ ID NO: 15606 - protein, 636 aa, Homo sapiens
  MOD_RES (17)..(17): Selenocysteine
  MOD_RES (40)..(40): Selenocysteine
  MOD_RES (55)..(55): Selenocysteine
  MOD_RES (75)..(75): Selenocysteine
  MOD_RES (77)..(77): Selenocysteine
  MOD_RES (83)..(83): Selenocysteine
  MOD_RES (88)..(88): Selenocysteine
  MOD_RES (97)..(97): Selenocysteine
  MOD_RES (128)..(128): Selenocysteine
  MOD_RES (131)..(131): Selenocysteine
  MOD_RES (152)..(153): Selenocysteine
  MOD_RES (213)..(213): Selenocysteine
  MOD_RES (216)..(216): Selenocysteine
  MOD_RES (228)..(228): Selenocysteine
  MOD_RES (236)..(236): Selenocysteine
  MOD_RES (252)..(252): Selenocysteine
  MOD_RES (276)..(276): Selenocysteine
  MOD_RES (286)..(286): Selenocysteine
  MOD_RES (300)..(300): Selenocysteine
  MOD_RES (320)..(320): Selenocysteine
  MOD_RES (329)..(329): Selenocysteine
  MOD_RES (332)..(332): Selenocysteine
  MOD_RES (339)..(339): Selenocysteine
  MOD_RES (400)..(400): Selenocysteine
  MOD_RES (412)..(412): Selenocysteine
  MOD_RES (447)..(447): Selenocysteine
  MOD_RES (458)..(458): Selenocysteine
  MOD_RES (513)..(513): Selenocysteine
  MOD_RES (523)..(523): Selenocysteine
  MOD_RES (582)..(582): Selenocysteine
  MOD_RES (589)..(589): Selenocysteine
MREAAAALVPPPAFAVXPAAAMEEPPPPPPPPPPPPEPEXESEPECCLAARQEGXLGDSACKSPESDLEDFSDEXNXENLYGXSPPSXPRQMKRMSXKHQRNNVGRPASRSNLKEKMNAPNQPPHKDXGKXVENVEEYSYKQEKKIRAALRXXERDRKKNVQCSFMLDSVGGSLPKKSIPDVDLNKPYLSLGCSNAKLPVSVPMPIARPARQXSRXDCPADRLKFFEXLRLLLKLXSVSKKKDREQRGQENXSGFWLNRSNELIWLELQAWHAGRXINDQDFFLYXARQAIPDIINEILXFKVDYGSFAFVRDRAGFNGXSVEGQCKAXPGXKIVGYSXHHEHLQRQRVSFEQVKRIMELLEYIEALYPSLQALQKDYEKYAAKDFQDRVQALCLWLNIXKDLNQKLRIMGXVLGIKNLSDIGWPVFEIPSPRPSKGNEPEYEGDDXEGELKELESSXDESEEEQISDPRVPEIRQPIDNSFDIQSRDCISKKLERLESEDDSLGWGAPDWSXEAGFSRHCLXSIYRPFVDKALKQMGLRKLILRLHKLMDGSLQRARIALVKNDRPVEGDMRHQSIYVRCXLVPSRKXGQLEAGMGLAGHSFLNFQIPCGVQIMCSCQGHHLHLRRNAVLCRGRS

SEQ ID NO: 15607 - protein, 1442 aa, Homo sapiens
  MOD_RES (17)..(17): Selenocysteine
  MOD_RES (40)..(40): Selenocysteine
  MOD_RES (55)..(55): Selenocysteine
  MOD_RES (75)..(75): Selenocysteine
  MOD_RES (77)..(77): Selenocysteine
  MOD_RES (83)..(83): Selenocysteine
  MOD_RES (88)..(88): Selenocysteine
  MOD_RES (97)..(97): Selenocysteine
  MOD_RES (128)..(128): Selenocysteine
  MOD_RES (131)..(131): Selenocysteine
  MOD_RES (152)..(153): Selenocysteine
  MOD_RES (213)..(213): Selenocysteine
  MOD_RES (216)..(216): Selenocysteine
  MOD_RES (228)..(228): Selenocysteine
  MOD_RES (236)..(236): Selenocysteine
  MOD_RES (252)..(252): Selenocysteine
  MOD_RES (276)..(276): Selenocysteine
  MOD_RES (286)..(286): Selenocysteine
  MOD_RES (300)..(300): Selenocysteine
  MOD_RES (320)..(320): Selenocysteine
  MOD_RES (329)..(329): Selenocysteine
  MOD_RES (332)..(332): Selenocysteine
  MOD_RES (339)..(339): Selenocysteine
  MOD_RES (400)..(400): Selenocysteine
  MOD_RES (412)..(412): Selenocysteine
  MOD_RES (447)..(447): Selenocysteine
  MOD_RES (458)..(458): Selenocysteine
  MOD_RES (513)..(513): Selenocysteine
  MOD_RES (523)..(523): Selenocysteine
  MOD_RES (588)..(588): Selenocysteine
  MOD_RES (733)..(733): Selenocysteine
  MOD_RES (737)..(737): Selenocysteine
  MOD_RES (762)..(762): Selenocysteine
  MOD_RES (779)..(779): Selenocysteine
  MOD_RES (868)..(868): Selenocysteine
  MOD_RES (904)..(904): Selenocysteine
  MOD_RES (919)..(919): Selenocysteine
  MOD_RES (933)..(933): Selenocysteine
  MOD_RES (936)..(936): Selenocysteine
  MOD_RES (956)..(956): Selenocysteine
  MOD_RES (971)..(971): Selenocysteine
  MOD_RES (977)..(977): Selenocysteine
  MOD_RES (1013)..(1013): Selenocysteine
  MOD_RES (1027)..(1027): Selenocysteine
  MOD_RES (1079)..(1079): Selenocysteine
  MOD_RES (1087)..(1087): Selenocysteine
  MOD_RES (1093)..(1093): Selenocysteine
  MOD_RES (1138)..(1138): Selenocysteine
  MOD_RES (1170)..(1170): Selenocysteine
  MOD_RES (1176)..(1176): Selenocysteine
  MOD_RES (1224)..(1224): Selenocysteine
  MOD_RES (1254)..(1254): Selenocysteine
  MOD_RES (1271)..(1271): Selenocysteine
  MOD_RES (1279)..(1279): Selenocysteine
  MOD_RES (1287)..(1287): Selenocysteine
  MOD_RES (1324)..(1324): Selenocysteine
  MOD_RES (1340)..(1340): Selenocysteine
  MOD_RES (1359)..(1359): Selenocysteine
  MOD_RES (1365)..(1365): Selenocysteine
  MOD_RES (1383)..(1383): Selenocysteine
  MOD_RES (1387)..(1387): Selenocysteine
  MOD_RES (1414)..(1414): Selenocysteine
  MOD_RES (1416)..(1416): Selenocysteine
MREAAAALVPPPAFAVXPAAAMEEPPPPPPPPPPPPEPEXESEPECCLAARQEGXLGDSACKSPESDLEDFSDEXNXENLYGXSPPSXPRQMKRMSXKHQRNNVGRPASRSNLKEKMNAPNQPPHKDXGKXVENVEEYSYKQEKKIRAALRXXERDRKKNVQCSFMLDSVGGSLPKKSIPDVDLNKPYLSLGCSNAKLPVSVPMPIARPARQXSRXDCPADRLKFFEXLRLLLKLXSVSKKKDREQRGQENXSGFWLNRSNELIWLELQAWHAGRXINDQDFFLYXARQAIPDIINEILXFKVDYGSFAFVRDRAGFNGXSVEGQCKAXPGXKIVGYSXHHEHLQRQRVSFEQVKRIMELLEYIEALYPSLQALQKDYEKYAAKDFQDRVQALCLWLNIXKDLNQKLRIMGXVLGIKNLSDIGWPVFEIPSPRPSKGNEPEYEGDDXEGELKELESSXDESEEEQISDPRVPEIRQPIDNSFDIQSRDCISKKLERLESEDDSLGWGAPDWSXEAGFSRHCLXSIYRPFVDKALKQMGLRKLILRLHKLMDGSLQRARIALVKNDRPVEFSEFPDPMWGSDYVQLSRXPPSSEEKCSAVSWEELKAMDLPSFEPAFLVLCRVLLNVIHECLKLRLEQRPAGEPSLLSIKQLVRECKEVLKGGLLMKQYYQFMLQEVLEDLEKPDCNIDAFEEDLHKMLMVYFDYMRSWIQMLQQLPQASHSLKNLLEEEWNFXKEIXHYIRGGEAQAGKLFCDIAGMLLKSXGSFLEFGLQESCAEFWXSADDSSASDEIRRSVIEISRALKELFHEARERASKALGFAKMLRKDLEIAAEFRLSAPVRDLLDVLKSKQYVKVQIPGLENLQMFVPDXLAEEKSIILQLLNAAAGKDCSKDSDDVLIDAYLLLXKHGDRARDSEDSWGXWEAQPVKVVPQVEXVDXLRSMQVDNLLLVVMQSAHLXIQRKAFQQSIEGLMXLCQEQXSSQPVIAKALQQLKNDALELCNRISNAIDRVDHMFXSEFDAEVDESESVXLQQYYREAMIQGYNFGFEYHKEVVRLMSGEFRQKIGDKYISFARKWMNYVLXKCESGRGXRPRWAXQGFDFLQAIEPAFISALPEDDFLSLQALMNECIGHVIGKPHSPVXGLYLAIHRNSPRPMKVPRCHSDPPNPHLIIPXPEGFSXRSMPSDARSHGSPAAAAAAAAAAVAASRPSPSGGDSVLPKSISSAHDXRGSSVPENDRLASIAAELQFRSLSRHSSPXEERDEPAYPRGDSSGSXRRSWELRXLISQSKDXASKLGPIEAIQKSVRLFEEKRYREMRRKNIIGQVCDXPKSYDNVMHVGLRKVXFKWQRGNKIGEGQYGKVYXCISVDXGELMAMKEIRFQPNDHKXIKEXADELKIFEGIKHPNLVRYFGVELHRSXVXLPNSQEISMSYIISAFSLKLEEFLLK

SEQ ID NO: 15608 - protein, 1554 aa, Homo sapiens
  MOD_RES (17)..(17): Selenocysteine
  MOD_RES (40)..(40): Selenocysteine
  MOD_RES (55)..(55): Selenocysteine
  MOD_RES (75)..(75): Selenocysteine
  MOD_RES (77)..(77): Selenocysteine
  MOD_RES (83)..(83): Selenocysteine
  MOD_RES (88)..(88): Selenocysteine
  MOD_RES (97)..(97): Selenocysteine
  MOD_RES (128)..(128): Selenocysteine
  MOD_RES (131)..(131): Selenocysteine
  MOD_RES (152)..(153): Selenocysteine
  MOD_RES (213)..(213): Selenocysteine
  MOD_RES (216)..(216): Selenocysteine
  MOD_RES (228)..(228): Selenocysteine
  MOD_RES (236)..(236): Selenocysteine
  MOD_RES (252)..(252): Selenocysteine
  MOD_RES (276)..(276): Selenocysteine
  MOD_RES (286)..(286): Selenocysteine
  MOD_RES (300)..(300): Selenocysteine
  MOD_RES (320)..(320): Selenocysteine
  MOD_RES (329)..(329): Selenocysteine
  MOD_RES (332)..(332): Selenocysteine
  MOD_RES (339)..(339): Selenocysteine
  MOD_RES (400)..(400): Selenocysteine
  MOD_RES (412)..(412): Selenocysteine
  MOD_RES (447)..(447): Selenocysteine
  MOD_RES (458)..(458): Selenocysteine
  MOD_RES (513)..(513): Selenocysteine
  MOD_RES (523)..(523): Selenocysteine
  MOD_RES (588)..(588): Selenocysteine
  MOD_RES (733)..(733): Selenocysteine
  MOD_RES (737)..(737): Selenocysteine
  MOD_RES (762)..(762): Selenocysteine
  MOD_RES (779)..(779): Selenocysteine
  MOD_RES (868)..(868): Selenocysteine
  MOD_RES (904)..(904): Selenocysteine
  MOD_RES (919)..(919): Selenocysteine
  MOD_RES (933)..(933): Selenocysteine
  MOD_RES (936)..(936): Selenocysteine
  MOD_RES (956)..(956): Selenocysteine
  MOD_RES (971)..(971): Selenocysteine
  MOD_RES (977)..(977): Selenocysteine
  MOD_RES (1013)..(1013): Selenocysteine
  MOD_RES (1027)..(1027): Selenocysteine
  MOD_RES (1079)..(1079): Selenocysteine
  MOD_RES (1087)..(1087): Selenocysteine
  MOD_RES (1093)..(1093): Selenocysteine
  MOD_RES (1138)..(1138): Selenocysteine
  MOD_RES (1166)..(1166): Selenocysteine
  MOD_RES (1200)..(1200): Selenocysteine
  MOD_RES (1217)..(1217): Selenocysteine
  MOD_RES (1225)..(1225): Selenocysteine
  MOD_RES (1233)..(1233): Selenocysteine
  MOD_RES (1270)..(1270): Selenocysteine
  MOD_RES (1286)..(1286): Selenocysteine
  MOD_RES (1305)..(1305): Selenocysteine
  MOD_RES (1311)..(1311): Selenocysteine
  MOD_RES (1329)..(1329): Selenocysteine
  MOD_RES (1333)..(1333): Selenocysteine
  MOD_RES (1372)..(1372): Selenocysteine
  MOD_RES (1394)..(1394): Selenocysteine
  MOD_RES (1418)..(1418): Selenocysteine
  MOD_RES (1440)..(1440): Selenocysteine
  MOD_RES (1448)..(1448): Selenocysteine
  MOD_RES (1451)..(1451): Selenocysteine
  MOD_RES (1461)..(1461): Selenocysteine
  MOD_RES (1486)..(1486): Selenocysteine
  MOD_RES (1537)..(1537): Selenocysteine
  MOD_RES (1551)..(1551): Selenocysteine
MREAAAALVPPPAFAVXPAAAMEEPPPPPPPPPPPPEPEXESEPECCLAARQEGXLGDSACKSPESDLEDFSDEXNXENLYGXSPPSXPRQMKRMSXKHQRNNVGRPASRSNLKEKMNAPNQPPHKDXGKXVENVEEYSYKQEKKIRAALRXXERDRKKNVQCSFMLDSVGGSLPKKSIPDVDLNKPYLSLGCSNAKLPVSVPMPIARPARQXSRXDCPADRLKFFEXLRLLLKLXSVSKKKDREQRGQENXSGFWLNRSNELIWLELQAWHAGRXINDQDFFLYXARQAIPDIINEILXFKVDYGSFAFVRDRAGFNGXSVEGQCKAXPGXKIVGYSXHHEHLQRQRVSFEQVKRIMELLEYIEALYPSLQALQKDYEKYAAKDFQDRVQALCLWLNIXKDLNQKLRIMGXVLGIKNLSDIGWPVFEIPSPRPSKGNEPEYEGDDXEGELKELESSXDESEEEQISDPRVPEIRQPIDNSFDIQSRDCISKKLERLESEDDSLGWGAPDWSXEAGFSRHCLXSIYRPFVDKALKQMGLRKLILRLHKLMDGSLQRARIALVKNDRPVEFSEFPDPMWGSDYVQLSRXPPSSEEKCSAVSWEELKAMDLPSFEPAFLVLCRVLLNVIHECLKLRLEQRPAGEPSLLSIKQLVRECKEVLKGGLLMKQYYQFMLQEVLEDLEKPDCNIDAFEEDLHKMLMVYFDYMRSWIQMLQQLPQASHSLKNLLEEEWNFXKEIXHYIRGGEAQAGKLFCDIAGMLLKSXGSFLEFGLQESCAEFWXSADDSSASDEIRRSVIEISRALKELFHEARERASKALGFAKMLRKDLEIAAEFRLSAPVRDLLDVLKSKQYVKVQIPGLENLQMFVPDXLAEEKSIILQLLNAAAGKDCSKDSDDVLIDAYLLLXKHGDRARDSEDSWGXWEAQPVKVVPQVEXVDXLRSMQVDNLLLVVMQSAHLXIQRKAFQQSIEGLMXLCQEQXSSQPVIAKALQQLKNDALELCNRISNAIDRVDHMFXSEFDAEVDESESVXLQQYYREAMIQGYNFGFEYHKEVVRLMSGEFRQKIGDKYISFARKWMNYVLXKCESGRGXRPRWAXQGFDFLQAIEPAFISALPEDDFLSLQALMNECIGHVIGKPHSPVXAIHRNSPRPMKVPRCHSDPPNPHLIIPXPEGFRGSSVPENDRLASIAAELQFRSLSRHSSPXEERDEPAYPRGDSSGSXRRSWELRXLISQSKDXASKLGPIEAIQKSVRLFEEKRYREMRRKNIIGQVCDXPKSYDNVMHVGLRKVXFKWQRGNKIGEGQYGKVYXCISVDXGELMAMKEIRFQPNDHKXIKEXADELKIFEGIKHPNLVRYFGVELHREEMYIFMEYCDEGXLEEVSRLGLQEHVIRLYSKQIXIAINVLHEHGIVHRDIKGANIFLXSSGLIKLGDFGCSVKLKNNAQXMPGEVNSXLGXAAYMAPEVIXRAKGEGHGRAADIWSLGCVVIEMVXGKRPWHEYEHNFQIMYKVGMGHKPPIPERLSPEGKDFLSHCLESDPKMRWXASQLLDHSFVKVCXDEE

SEQ ID NO: 15609 - protein, 1558 aa, Homo sapiens
  MOD_RES (17)..(17): Selenocysteine
  MOD_RES (40)..(40): Selenocysteine
  MOD_RES (55)..(55): Selenocysteine
  MOD_RES (75)..(75): Selenocysteine
  MOD_RES (77)..(77): Selenocysteine
  MOD_RES (83)..(83): Selenocysteine
  MOD_RES (88)..(88): Selenocysteine
  MOD_RES (97)..(97): Selenocysteine
  MOD_RES (128)..(128): Selenocysteine
  MOD_RES (131)..(131): Selenocysteine
  MOD_RES (152)..(153): Selenocysteine
  MOD_RES (213)..(213): Selenocysteine
  MOD_RES (216)..(216): Selenocysteine
  MOD_RES (228)..(228): Selenocysteine
  MOD_RES (236)..(236): Selenocysteine
  MOD_RES (252)..(252): Selenocysteine
  MOD_RES (276)..(276): Selenocysteine
  MOD_RES (286)..(286): Selenocysteine
  MOD_RES (300)..(300): Selenocysteine
  MOD_RES (320)..(320): Selenocysteine
  MOD_RES (329)..(329): Selenocysteine
  MOD_RES (332)..(332): Selenocysteine
  MOD_RES (339)..(339): Selenocysteine
  MOD_RES (400)..(400): Selenocysteine
  MOD_RES (412)..(412): Selenocysteine
  MOD_RES (447)..(447): Selenocysteine
  MOD_RES (458)..(458): Selenocysteine
  MOD_RES (513)..(513): Selenocysteine
  MOD_RES (523)..(523): Selenocysteine
  MOD_RES (588)..(588): Selenocysteine
  MOD_RES (733)..(733): Selenocysteine
  MOD_RES (737)..(737): Selenocysteine
  MOD_RES (762)..(762): Selenocysteine
  MOD_RES (779)..(779): Selenocysteine
  MOD_RES (868)..(868): Selenocysteine
  MOD_RES (904)..(904): Selenocysteine
  MOD_RES (919)..(919): Selenocysteine
  MOD_RES (933)..(933): Selenocysteine
  MOD_RES (936)..(936): Selenocysteine
  MOD_RES (956)..(956): Selenocysteine
  MOD_RES (971)..(971): Selenocysteine
  MOD_RES (977)..(977): Selenocysteine
  MOD_RES (1013)..(1013): Selenocysteine
  MOD_RES (1027)..(1027): Selenocysteine
  MOD_RES (1079)..(1079): Selenocysteine
  MOD_RES (1087)..(1087): Selenocysteine
  MOD_RES (1093)..(1093): Selenocysteine
  MOD_RES (1138)..(1138): Selenocysteine
  MOD_RES (1170)..(1170): Selenocysteine
  MOD_RES (1204)..(1204): Selenocysteine
  MOD_RES (1221)..(1221): Selenocysteine
  MOD_RES (1229)..(1229): Selenocysteine
  MOD_RES (1237)..(1237): Selenocysteine
  MOD_RES (1274)..(1274): Selenocysteine
  MOD_RES (1290)..(1290): Selenocysteine
  MOD_RES (1309)..(1309): Selenocysteine
  MOD_RES (1315)..(1315): Selenocysteine
  MOD_RES (1333)..(1333): Selenocysteine
  MOD_RES (1337)..(1337): Selenocysteine
  MOD_RES (1376)..(1376): Selenocysteine
  MOD_RES (1398)..(1398): Selenocysteine
  MOD_RES (1422)..(1422): Selenocysteine
  MOD_RES (1444)..(1444): Selenocysteine
  MOD_RES (1452)..(1452): Selenocysteine
  MOD_RES (1455)..(1455): Selenocysteine
  MOD_RES (1465)..(1465): Selenocysteine
  MOD_RES (1490)..(1490): Selenocysteine
  MOD_RES (1541)..(1541): Selenocysteine
  MOD_RES (1555)..(1555): Selenocysteine
MREAAAALVPPPAFAVXPAAAMEEPPPPPPPPPPPPEPEXESEPECCLAARQEGXLGDSACKSPESDLEDFSDEXNXENLYGXSPPSXPRQMKRMSXKHQRNNVGRPASRSNLKEKMNAPNQPPHKDXGKXVENVEEYSYKQEKKIRAALRXXERDRKKNVQCSFMLDSVGGSLPKKSIPDVDLNKPYLSLGCSNAKLPVSVPMPIARPARQXSRXDCPADRLKFFEXLRLLLKLXSVSKKKDREQRGQENXSGFWLNRSNELIWLELQAWHAGRXINDQDFFLYXARQAIPDIINEILXFKVDYGSFAFVRDRAGFNGXSVEGQCKAXPGXKIVGYSXHHEHLQRQRVSFEQVKRIMELLEYIEALYPSLQALQKDYEKYAAKDFQDRVQALCLWLNIXKDLNQKLRIMGXVLGIKNLSDIGWPVFEIPSPRPSKGNEPEYEGDDXEGELKELESSXDESEEEQISDPRVPEIRQPIDNSFDIQSRDCISKKLERLESEDDSLGWGAPDWSXEAGFSRHCLXSIYRPFVDKALKQMGLRKLILRLHKLMDGSLQRARIALVKNDRPVEFSEFPDPMWGSDYVQLSRXPPSSEEKCSAVSWEELKAMDLPSFEPAFLVLCRVLLNVIHECLKLRLEQRPAGEPSLLSIKQLVRECKEVLKGGLLMKQYYQFMLQEVLEDLEKPDCNIDAFEEDLHKMLMVYFDYMRSWIQMLQQLPQASHSLKNLLEEEWNFXKEIXHYIRGGEAQAGKLFCDIAGMLLKSXGSFLEFGLQESCAEFWXSADDSSASDEIRRSVIEISRALKELFHEARERASKALGFAKMLRKDLEIAAEFRLSAPVRDLLDVLKSKQYVKVQIPGLENLQMFVPDXLAEEKSIILQLLNAAAGKDCSKDSDDVLIDAYLLLXKHGDRARDSEDSWGXWEAQPVKVVPQVEXVDXLRSMQVDNLLLVVMQSAHLXIQRKAFQQSIEGLMXLCQEQXSSQPVIAKALQQLKNDALELCNRISNAIDRVDHMFXSEFDAEVDESESVXLQQYYREAMIQGYNFGFEYHKEVVRLMSGEFRQKIGDKYISFARKWMNYVLXKCESGRGXRPRWAXQGFDFLQAIEPAFISALPEDDFLSLQALMNECIGHVIGKPHSPVXGLYLAIHRNSPRPMKVPRCHSDPPNPHLIIPXPEGFRGSSVPENDRLASIAAELQFRSLSRHSSPXEERDEPAYPRGDSSGSXRRSWELRXLISQSKDXASKLGPIEAIQKSVRLFEEKRYREMRRKNIIGQVCDXPKSYDNVMHVGLRKVXFKWQRGNKIGEGQYGKVYXCISVDXGELMAMKEIRFQPNDHKXIKEXADELKIFEGIKHPNLVRYFGVELHREEMYIFMEYCDEGXLEEVSRLGLQEHVIRLYSKQIXIAINVLHEHGIVHRDIKGANIFLXSSGLIKLGDFGCSVKLKNNAQXMPGEVNSXLGXAAYMAPEVIXRAKGEGHGRAADIWSLGCVVIEMVXGKRPWHEYEHNFQIMYKVGMGHKPPIPERLSPEGKDFLSHCLESDPKMRWXASQLLDHSFVKVCXDEE

SEQ ID NO: 15610 - protein, 1604 aa, Homo sapiens
  MOD_RES (17)..(17): Selenocysteine
  MOD_RES (40)..(40): Selenocysteine
  MOD_RES (55)..(55): Selenocysteine
  MOD_RES (75)..(75): Selenocysteine
  MOD_RES (77)..(77): Selenocysteine
  MOD_RES (83)..(83): Selenocysteine
  MOD_RES (88)..(88): Selenocysteine
  MOD_RES (97)..(97): Selenocysteine
  MOD_RES (128)..(128): Selenocysteine
  MOD_RES (131)..(131): Selenocysteine
  MOD_RES (152)..(153): Selenocysteine
  MOD_RES (213)..(213): Selenocysteine
  MOD_RES (216)..(216): Selenocysteine
  MOD_RES (228)..(228): Selenocysteine
  MOD_RES (236)..(236): Selenocysteine
  MOD_RES (252)..(252): Selenocysteine
  MOD_RES (276)..(276): Selenocysteine
  MOD_RES (286)..(286): Selenocysteine
  MOD_RES (300)..(300): Selenocysteine
  MOD_RES (320)..(320): Selenocysteine
  MOD_RES (329)..(329): Selenocysteine
  MOD_RES (332)..(332): Selenocysteine
  MOD_RES (339)..(339): Selenocysteine
  MOD_RES (400)..(400): Selenocysteine
  MOD_RES (412)..(412): Selenocysteine
  MOD_RES (447)..(447): Selenocysteine
  MOD_RES (458)..(458): Selenocysteine
  MOD_RES (513)..(513): Selenocysteine
  MOD_RES (523)..(523): Selenocysteine
  MOD_RES (588)..(588): Selenocysteine
  MOD_RES (733)..(733): Selenocysteine
  MOD_RES (737)..(737): Selenocysteine
  MOD_RES (762)..(762): Selenocysteine
  MOD_RES (779)..(779): Selenocysteine
  MOD_RES (868)..(868): Selenocysteine
  MOD_RES (904)..(904): Selenocysteine
  MOD_RES (919)..(919): Selenocysteine
  MOD_RES (933)..(933): Selenocysteine
  MOD_RES (936)..(936): Selenocysteine
  MOD_RES (956)..(956): Selenocysteine
  MOD_RES (971)..(971): Selenocysteine
  MOD_RES (977)..(977): Selenocysteine
  MOD_RES (1013)..(1013): Selenocysteine
  MOD_RES (1027)..(1027): Selenocysteine
  MOD_RES (1079)..(1079): Selenocysteine
  MOD_RES (1087)..(1087): Selenocysteine
  MOD_RES (1093)..(1093): Selenocysteine
  MOD_RES (1138)..(1138): Selenocysteine
  MOD_RES (1166)..(1166): Selenocysteine
  MOD_RES (1172)..(1172): Selenocysteine
  MOD_RES (1220)..(1220): Selenocysteine
  MOD_RES (1250)..(1250): Selenocysteine
  MOD_RES (1267)..(1267): Selenocysteine
  MOD_RES (1275)..(1275): Selenocysteine
  MOD_RES (1283)..(1283): Selenocysteine
  MOD_RES (1320)..(1320): Selenocysteine
  MOD_RES (1336)..(1336): Selenocysteine
  MOD_RES (1355)..(1355): Selenocysteine
  MOD_RES (1361)..(1361): Selenocysteine
  MOD_RES (1379)..(1379): Selenocysteine
  MOD_RES (1383)..(1383): Selenocysteine
  MOD_RES (1422)..(1422): Selenocysteine
  MOD_RES (1444)..(1444): Selenocysteine
  MOD_RES (1468)..(1468): Selenocysteine
  MOD_RES (1490)..(1490): Selenocysteine
  MOD_RES (1498)..(1498): Selenocysteine
  MOD_RES (1501)..(1501): Selenocysteine
  MOD_RES (1511)..(1511): Selenocysteine
  MOD_RES (1536)..(1536): Selenocysteine
  MOD_RES (1587)..(1587): Selenocysteine
  MOD_RES (1601)..(1601): Selenocysteine
MREAAAALVPPPAFAVXPAAAMEEPPPPPPPPPPPPEPEXESEPECCLAARQEGXLGDSACKSPESDLEDFSDEXNXENLYGXSPPSXPRQMKRMSXKHQRNNVGRPASRSNLKEKMNAPNQPPHKDXGKXVENVEEYSYKQEKKIRAALRXXERDRKKNVQCSFMLDSVGGSLPKKSIPDVDLNKPYLSLGCSNAKLPVSVPMPIARPARQXSRXDCPADRLKFFEXLRLLLKLXSVSKKKDREQRGQENXSGFWLNRSNELIWLELQAWHAGRXINDQDFFLYXARQAIPDIINEILXFKVDYGSFAFVRDRAGFNGXSVEGQCKAXPGXKIVGYSXHHEHLQRQRVSFEQVKRIMELLEYIEALYPSLQALQKDYEKYAAKDFQDRVQALCLWLNIXKDLNQKLRIMGXVLGIKNLSDIGWPVFEIPSPRPSKGNEPEYEGDDXEGELKELESSXDESEEEQISDPRVPEIRQPIDNSFDIQSRDCISKKLERLESEDDSLGWGAPDWSXEAGFSRHCLXSIYRPFVDKALKQMGLRKLILRLHKLMDGSLQRARIALVKNDRPVEFSEFPDPMWGSDYVQLSRXPPSSEEKCSAVSWEELKAMDLPSFEPAFLVLCRVLLNVIHECLKLRLEQRPAGEPSLLSIKQLVRECKEVLKGGLLMKQYYQFMLQEVLEDLEKPDCNIDAFEEDLHKMLMVYFDYMRSWIQMLQQLPQASHSLKNLLEEEWNFXKEIXHYIRGGEAQAGKLFCDIAGMLLKSXGSFLEFGLQESCAEFWXSADDSSASDEIRRSVIEISRALKELFHEARERASKALGFAKMLRKDLEIAAEFRLSAPVRDLLDVLKSKQYVKVQIPGLENLQMFVPDXLAEEKSIILQLLNAAAGKDCSKDSDDVLIDAYLLLXKHGDRARDSEDSWGXWEAQPVKVVPQVEXVDXLRSMQVDNLLLVVMQSAHLXIQRKAFQQSIEGLMXLCQEQXSSQPVIAKALQQLKNDALELCNRISNAIDRVDHMFXSEFDAEVDESESVXLQQYYREAMIQGYNFGFEYHKEVVRLMSGEFRQKIGDKYISFARKWMNYVLXKCESGRGXRPRWAXQGFDFLQAIEPAFISALPEDDFLSLQALMNECIGHVIGKPHSPVXAIHRNSPRPMKVPRCHSDPPNPHLIIPXPEGFSXRSMPSDARSHGSPAAAAAAAAAAVAASRPSPSGGDSVLPKSISSAHDXRGSSVPENDRLASIAAELQFRSLSRHSSPXEERDEPAYPRGDSSGSXRRSWELRXLISQSKDXASKLGPIEAIQKSVRLFEEKRYREMRRKNIIGQVCDXPKSYDNVMHVGLRKVXFKWQRGNKIGEGQYGKVYXCISVDXGELMAMKEIRFQPNDHKXIKEXADELKIFEGIKHPNLVRYFGVELHREEMYIFMEYCDEGXLEEVSRLGLQEHVIRLYSKQIXIAINVLHEHGIVHRDIKGANIFLXSSGLIKLGDFGCSVKLKNNAQXMPGEVNSXLGXAAYMAPEVIXRAKGEGHGRAADIWSLGCVVIEMVXGKRPWHEYEHNFQIMYKVGMGHKPPIPERLSPEGKDFLSHCLESDPKMRWXASQLLDHSFVKVCXDEE

SEQ ID NO: 15611 - protein, 1608 aa, Homo sapiens
  MOD_RES (17)..(17): Selenocysteine
  MOD_RES (40)..(40): Selenocysteine
  MOD_RES (55)..(55): Selenocysteine
  MOD_RES (75)..(75): Selenocysteine
  MOD_RES (77)..(77): Selenocysteine
  MOD_RES (83)..(83): Selenocysteine
  MOD_RES (88)..(88): Selenocysteine
  MOD_RES (97)..(97): Selenocysteine
  MOD_RES (128)..(128): Selenocysteine
  MOD_RES (131)..(131): Selenocysteine
  MOD_RES (152)..(153): Selenocysteine
  MOD_RES (213)..(213): Selenocysteine
  MOD_RES (216)..(216): Selenocysteine
  MOD_RES (228)..(228): Selenocysteine
  MOD_RES (236)..(236): Selenocysteine
  MOD_RES (252)..(252): Selenocysteine
  MOD_RES (276)..(276): Selenocysteine
  MOD_RES (286)..(286): Selenocysteine
  MOD_RES (300)..(300): Selenocysteine
  MOD_RES (320)..(320): Selenocysteine
  MOD_RES (329)..(329): Selenocysteine
  MOD_RES (332)..(332): Selenocysteine
  MOD_RES (339)..(339): Selenocysteine
  MOD_RES (400)..(400): Selenocysteine
  MOD_RES (412)..(412): Selenocysteine
  MOD_RES (447)..(447): Selenocysteine
  MOD_RES (458)..(458): Selenocysteine
  MOD_RES (513)..(513): Selenocysteine
  MOD_RES (523)..(523): Selenocysteine
  MOD_RES (588)..(588): Selenocysteine
  MOD_RES (733)..(733): Selenocysteine
  MOD_RES (737)..(737): Selenocysteine
  MOD_RES (762)..(762): Selenocysteine
  MOD_RES (779)..(779): Selenocysteine
  MOD_RES (868)..(868): Selenocysteine
  MOD_RES (904)..(904): Selenocysteine
  MOD_RES (919)..(919): Selenocysteine
  MOD_RES (933)..(933): Selenocysteine
  MOD_RES (936)..(936): Selenocysteine
  MOD_RES (956)..(956): Selenocysteine
  MOD_RES (971)..(971): Selenocysteine
  MOD_RES (977)..(977): Selenocysteine
  MOD_RES (1013)..(1013): Selenocysteine
  MOD_RES (1027)..(1027): Selenocysteine
  MOD_RES (1079)..(1079): Selenocysteine
  MOD_RES (1087)..(1087): Selenocysteine
  MOD_RES (1093)..(1093): Selenocysteine
  MOD_RES (1138)..(1138): Selenocysteine
  MOD_RES (1170)..(1170): Selenocysteine
  MOD_RES (1176)..(1176): Selenocysteine
  MOD_RES (1224)..(1224): Selenocysteine
  MOD_RES (1254)..(1254): Selenocysteine
  MOD_RES (1271)..(1271): Selenocysteine
  MOD_RES (1279)..(1279): Selenocysteine
  MOD_RES (1287)..(1287): Selenocysteine
  MOD_RES (1324)..(1324): Selenocysteine
  MOD_RES (1340)..(1340): Selenocysteine
  MOD_RES (1359)..(1359): Selenocysteine
  MOD_RES (1365)..(1365): Selenocysteine
  MOD_RES (1383)..(1383): Selenocysteine
  MOD_RES (1387)..(1387): Selenocysteine
  MOD_RES (1426)..(1426): Selenocysteine
  MOD_RES (1448)..(1448): Selenocysteine
  MOD_RES (1472)..(1472): Selenocysteine
  MOD_RES (1494)..(1494): Selenocysteine
  MOD_RES (1502)..(1502): Selenocysteine
  MOD_RES (1505)..(1505): Selenocysteine
  MOD_RES (1515)..(1515): Selenocysteine
  MOD_RES (1540)..(1540): Selenocysteine
  MOD_RES (1591)..(1591): Selenocysteine
  MOD_RES (1605)..(1605): Selenocysteine
MREAAAALVPPPAFAVXPAAAMEEPPPPPPPPPPPPEPEXESEPECCLAARQEGXLGDSACKSPESDLEDFSDEXNXENLYGXSPPSXPRQMKRMSXKHQRNNVGRPASRSNLKEKMNAPNQPPHKDXGKXVENVEEYSYKQEKKIRAALRXXERDRKKNVQCSFMLDSVGGSLPKKSIPDVDLNKPYLSLGCSNAKLPVSVPMPIARPARQXSRXDCPADRLKFFEXLRLLLKLXSVSKKKDREQRGQENXSGFWLNRSNELIWLELQAWHAGRXINDQDFFLYXARQAIPDIINEILXFKVDYGSFAFVRDRAGFNGXSVEGQCKAXPGXKIVGYSXHHEHLQRQRVSFEQVKRIMELLEYIEALYPSLQALQKDYEKYAAKDFQDRVQALCLWLNIXKDLNQKLRIMGXVLGIKNLSDIGWPVFEIPSPRPSKGNEPEYEGDDXEGELKELESSXDESEEEQISDPRVPEIRQPIDNSFDIQSRDCISKKLERLESEDDSLGWGAPDWSXEAGFSRHCLXSIYRPFVDKALKQMGLRKLILRLHKLMDGSLQRARIALVKNDRPVEFSEFPDPMWGSDYVQLSRXPPSSEEKCSAVSWEELKAMDLPSFEPAFLVLCRVLLNVIHECLKLRLEQRPAGEPSLLSIKQLVRECKEVLKGGLLMKQYYQFMLQEVLEDLEKPDCNIDAFEEDLHKMLMVYFDYMRSWIQMLQQLPQASHSLKNLLEEEWNFXKEIXHYIRGGEAQAGKLFCDIAGMLLKSXGSFLEFGLQESCAEFWXSADDSSASDEIRRSVIEISRALKELFHEARERASKALGFAKMLRKDLEIAAEFRLSAPVRDLLDVLKSKQYVKVQIPGLENLQMFVPDXLAEEKSIILQLLNAAAGKDCSKDSDDVLIDAYLLLXKHGDRARDSEDSWGXWEAQPVKVVPQVEXVDXLRSMQVDNLLLVVMQSAHLXIQRKAFQQSIEGLMXLCQEQXSSQPVIAKALQQLKNDALELCNRISNAIDRVDHMFXSEFDAEVDESESVXLQQYYREAMIQGYNFGFEYHKEVVRLMSGEFRQKIGDKYISFARKWMNYVLXKCESGRGXRPRWAXQGFDFLQAIEPAFISALPEDDFLSLQALMNECIGHVIGKPHSPVXGLYLAIHRNSPRPMKVPRCHSDPPNPHLIIPXPEGFSXRSMPSDARSHGSPAAAAAAAAAAVAASRPSPSGGDSVLPKSISSAHDXRGSSVPENDRLASIAAELQFRSLSRHSSPXEERDEPAYPRGDSSGSXRRSWELRXLISQSKDXASKLGPIEAIQKSVRLFEEKRYREMRRKNIIGQVCDXPKSYDNVMHVGLRKVXFKWQRGNKIGEGQYGKVYXCISVDXGELMAMKEIRFQPNDHKXIKEXADELKIFEGIKHPNLVRYFGVELHREEMYIFMEYCDEGXLEEVSRLGLQEHVIRLYSKQIXIAINVLHEHGIVHRDIKGANIFLXSSGLIKLGDFGCSVKLKNNAQXMPGEVNSXLGXAAYMAPEVIXRAKGEGHGRAADIWSLGCVVIEMVXGKRPWHEYEHNFQIMYKVGMGHKPPIPERLSPEGKDFLSHCLESDPKMRWXASQLLDHSFVKVCXDEE

SEQ ID NO: 15612 - protein, 85 aa, Homo sapiens
  MOD_RES (17)..(17): Selenocysteine
  MOD_RES (40)..(40): Selenocysteine
MREAAAALVPPPAFAVXPAAAMEEPPPPPPPPPPPPEPEXESEPECCLAASFLNFQIPCGVQIMCSCQGHHLHLRRNAVLCRGRS

SEQ ID NO: 15613 - protein, 1374 aa, Homo sapiens
  MOD_RES (3)..(3): Selenocysteine
  MOD_RES (10)..(10): Selenocysteine
  MOD_RES (23)..(23): Selenocysteine
  MOD_RES (71)..(71): Selenocysteine
  MOD_RES (77)..(77): Selenocysteine
  MOD_RES (91)..(92): Selenocysteine
  MOD_RES (122)..(122): Selenocysteine
  MOD_RES (126)..(126): Selenocysteine
  MOD_RES (129)..(129): Selenocysteine
  MOD_RES (140)..(141): Selenocysteine
  MOD_RES (187)..(187): Selenocysteine
  MOD_RES (204)..(204): Selenocysteine
  MOD_RES (207)..(207): Selenocysteine
  MOD_RES (211)..(211): Selenocysteine
  MOD_RES (218)..(218): Selenocysteine
  MOD_RES (235)..(235): Selenocysteine
  MOD_RES (288)..(288): Selenocysteine
  MOD_RES (310)..(310): Selenocysteine
  MOD_RES (336)..(336): Selenocysteine
  MOD_RES (342)..(342): Selenocysteine
  MOD_RES (407)..(407): Selenocysteine
  MOD_RES (409)..(409): Selenocysteine
  MOD_RES (428)..(428): Selenocysteine
  MOD_RES (506)..(506): Selenocysteine
  MOD_RES (517)..(517): Selenocysteine
  MOD_RES (528)..(529): Selenocysteine
  MOD_RES (550)..(550): Selenocysteine
  MOD_RES (552)..(552): Selenocysteine
  MOD_RES (555)..(555): Selenocysteine
  MOD_RES (567)..(567): Selenocysteine
  MOD_RES (585)..(585): Selenocysteine
  MOD_RES (639)..(639): Selenocysteine
  MOD_RES (652)..(652): Selenocysteine
  MOD_RES (654)..(654): Selenocysteine
  MOD_RES (661)..(661): Selenocysteine
  MOD_RES (690)..(690): Selenocysteine
  MOD_RES (779)..(779): Selenocysteine
  MOD_RES (784)..(784): Selenocysteine
  MOD_RES (813)..(813): Selenocysteine
  MOD_RES (825)..(825): Selenocysteine
  MOD_RES (836)..(836): Selenocysteine
  MOD_RES (838)..(838): Selenocysteine
  MOD_RES (840)..(840): Selenocysteine
  MOD_RES (842)..(842): Selenocysteine
  MOD_RES (870)..(870): Selenocysteine
  MOD_RES (876)..(876): Selenocysteine
  MOD_RES (947)..(947): Selenocysteine
  MOD_RES (976)..(976): Selenocysteine
  MOD_RES (989)..(989): Selenocysteine
  MOD_RES (1000)..(1000): Selenocysteine
  MOD_RES (1015)..(1015): Selenocysteine
  MOD_RES (1053)..(1053): Selenocysteine
  MOD_RES (1059)..(1059): Selenocysteine
  MOD_RES (1088)..(1089): Selenocysteine
  MOD_RES (1101)..(1101): Selenocysteine
  MOD_RES (1108)..(1109): Selenocysteine
  MOD_RES (1165)..(1165): Selenocysteine
  MOD_RES (1168)..(1168): Selenocysteine
  MOD_RES (1186)..(1186): Selenocysteine
  MOD_RES (1206)..(1206): Selenocysteine
  MOD_RES (1220)..(1220): Selenocysteine
  MOD_RES (1225)..(1225): Selenocysteine
  MOD_RES (1229)..(1229): Selenocysteine
  MOD_RES (1252)..(1252): Selenocysteine
  MOD_RES (1306)..(1306): Selenocysteine
  MOD_RES (1308)..(1308): Selenocysteine
  MOD_RES (1314)..(1314): Selenocysteine
  MOD_RES (1326)..(1326): Selenocysteine
  MOD_RES (1336)..(1336): Selenocysteine
  MOD_RES (1345)..(1345): Selenocysteine
  MOD_RES (1361)..(1361): Selenocysteine
  MOD_RES (1374)..(1374): Selenocysteine
MSXEADEGIXFSVPPFAPSGFCXIPEGGICRRGGAAAVGEGEEHQLPPPPPGSFWNVESAAAPGIGCPAAXSSSSAXRGRGSSVGGGSRRXXVAYVINEASQGQLVVAESEALQSLREACEXVGAXLEXLHFGKLDFGEXXVLDRFYNADIAVVEMSDAFRQPSLFYHLGVRESFSMANNIILYCDXNSDSLQSLKEIICQKNXMCXGNYXFVPYMIXPHNKVYCCDSSFMKGLXELMQPNFELLLGPICLPLVDRFIQLLKVAQASSSQYFRESILNDIRKARNLYXGKELAAELARIRQRVDNIEVLXADIVINLLLSYRDIQDYDSIVKLVEXLEKLPXFDLASHHHVKFHYAFALNRRNLPGDRAKALDIMIPMVQSEGQVASDMYCLVGRIYKDMFLDSNFXDXESRDHGASWFKKAFESEPXLQSGINYAVLLLAAGHQFESSFELRKVGVKLSSLLGKKGNLEKLQSYWEVGFFLGASVLANDHMRVIQASEKLFKLKXPAWYLKSIVEXILIYKHFVKLXXEQPVAKQELVDFWMDFLVEAXKXDVXVVRFPVLILEPXKIYQPSYLSINNEVEEKXISIWHVLPDDKKGIHEWNFSASSVRGVSISKFEERCCFLYVLHNSDDFQIYFCXELHCKKFFEMVNXIXEEKGRSXEEGDCESDLLEYDYEYDENGDRVVLGKGXYGIVYAGRDLSNQVRIAIKEIPERDSRYSQPLHEEIALHKHLKHKNIVQYLGSFSENGFIKIFMEQVPGGSLSALLRSKWGPLKDNEQXIGFYXKQILEGLKYLHDNQIVHRDIKGDNVLINXYSGVLKISDFGXSKRLAGINPCXEXFXGXLQYMAPEIIDKGPRGYGKAADIWSLGCXIIEMAXGKPPFYELGEPQAAMFKVGMFKVHPEIPESMSAEAKAFILKCFEPDPDKRACANDLLVDEFLKVSSKKKKXQPKLSALSAGSNEYLRSISLPVPVLVEDXSSSSEYGSVSPDXELKVDPFSFKXRAKSCGERDVKGIRXLFLGIPDENFEDHSAPPSPEEKDSGFFMLRKDSERRAXLHRILXEDQDKIVRNLMESLAQGAEEPKLKWEHIXXLIASLREFVRSXDRKIIAXXLSKLKLELDFDSHGISQVQVVLFGFQDAVNKVLRNHNIKPHWMFALDSIIRKAVQXAIXILVPELRPHFSLASESDXADQEDLDVEDDHEEQPSNQXVRRPQAVIEDAVAXSGVSXLSSXVSHDSQSAHRSLNVQLGRMKIEXNRLLEELVRKEKELQALLHRAIEEKDQEIKHLKLKSQPIEIPELPVFHLNSSGXNXEDSELXDWLRVNGADEDXISRFLAEDYXLLDVLYYVXRDDLKCLRLRGGMLCXLWKAIIDFRNKQX

SEQ ID NO: 15614 - protein, 1280 aa, Homo sapiens
  MOD_RES (52)..(52): Selenocysteine
  MOD_RES (65)..(65): Selenocysteine
  MOD_RES (98)..(98): Selenocysteine
  MOD_RES (104)..(104): Selenocysteine
  MOD_RES (142)..(142): Selenocysteine
  MOD_RES (167)..(167): Selenocysteine
  MOD_RES (174)..(174): Selenocysteine
  MOD_RES (176)..(176): Selenocysteine
  MOD_RES (201)..(201): Selenocysteine
  MOD_RES (206)..(206): Selenocysteine
  MOD_RES (219)..(219): Selenocysteine
  MOD_RES (221)..(221): Selenocysteine
  MOD_RES (230)..(230): Selenocysteine
  MOD_RES (291)..(291): Selenocysteine
  MOD_RES (297)..(297): Selenocysteine
  MOD_RES (311)..(311): Selenocysteine
  MOD_RES (447)..(447): Selenocysteine
  MOD_RES (472)..(472): Selenocysteine
  MOD_RES (482)..(482): Selenocysteine
  MOD_RES (509)..(509): Selenocysteine
  MOD_RES (538)..(538): Selenocysteine
  MOD_RES (543)..(543): Selenocysteine
  MOD_RES (545)..(545): Selenocysteine
  MOD_RES (553)..(553): Selenocysteine
  MOD_RES (561)..(561): Selenocysteine
  MOD_RES (613)..(613): Selenocysteine
  MOD_RES (618)..(618): Selenocysteine
  MOD_RES (638)..(638): Selenocysteine
  MOD_RES (640)..(640): Selenocysteine
  MOD_RES (650)..(650): Selenocysteine
  MOD_RES (662)..(662): Selenocysteine
  MOD_RES (739)..(739): Selenocysteine
  MOD_RES (744)..(744): Selenocysteine
  MOD_RES (773)..(773): Selenocysteine
  MOD_RES (785)..(785): Selenocysteine
  MOD_RES (793)..(793): Selenocysteine
  MOD_RES (796)..(796): Selenocysteine
  MOD_RES (798)..(798): Selenocysteine
  MOD_RES (800)..(800): Selenocysteine
  MOD_RES (802)..(802): Selenocysteine
  MOD_RES (830)..(830): Selenocysteine
  MOD_RES (836)..(836): Selenocysteine
  MOD_RES (878)..(878): Selenocysteine
  MOD_RES (891)..(891): Selenocysteine
  MOD_RES (925)..(925): Selenocysteine
  MOD_RES (931)..(932): Selenocysteine
  MOD_RES (936)..(936): Selenocysteine
  MOD_RES (960)..(960): Selenocysteine
  MOD_RES (1041)..(1041): Selenocysteine
  MOD_RES (1165)..(1165): Selenocysteine
  MOD_RES (1196)..(1196): Selenocysteine
  MOD_RES (1205)..(1205): Selenocysteine
  MOD_RES (1209)..(1209): Selenocysteine
  MOD_RES (1226)..(1226): Selenocysteine
  MOD_RES (1236)..(1236): Selenocysteine
  MOD_RES (1239)..(1239): Selenocysteine
  MOD_RES (1242)..(1242): Selenocysteine
  MOD_RES (1245)..(1245): Selenocysteine
  MOD_RES (1252)..(1252): Selenocysteine
  MOD_RES (1274)..(1274): Selenocysteine
  MOD_RES (1277)..(1277): Selenocysteine
MAGPCPRSGAERAGSCWQDPLAVALSRGRQLAAPPGRGCARSRPLSVVYVLXREPQPGLEPREGXEAEPLPLRCLREACAQVPRPRPPPQLRSLPFGXLELGDXAALDAFYNADVVVLEVSSSLVQPSLFYHLGVRESFSMXNNVLLCSQADLPDLQALRDCVGSYXLIPYVVXAXGRVLCGDAGLLRGLADGLVQAGVGXEALLXPLVGRLARLLEAXPXDSCGYFREXIRRDIRQARERFSGPQLRQELARLQRRLDSVELLSPDIIMNLLLSYRDVQDYSAIIELVEXLQALPXCDVAEQHNVCFHYXFALNRRNRPGDRAKALSVLLPLVQLEGSVAPDLYCMCGRIYKDMFFSSGFQDAGHREQAYHWYRKAFDVEPSLHSGINAAVLLIAAGQHFEDSKELRLIGMKLGCLLARKGCVEKMQYYWDVGFYLGAQILANDPXQVVLAAEQLYKLNAPIWYLVSVMEXFLLYQHFRPXPEPPGGPPRRAHFWLHFLLQSCQPFKXACAQGDQCLVLVLEMNKVLLPAKLEVRGXDPVSXVXLSLLEPEXQDIPSSWXFPVASICGVSASKRDERCCFLYALPPAQDVQLCFPSVGHCQWFCGLIQAWVXNPDSXAPAEEAEGAGEMLEFDYEYXEXGERLVLGKGXYGVVYAGRDRHXRVRIAIKEIPERDSRFSQPLHEEIALHRRLRHKNIVRYLGSASQGGYLKIFMEEVPGGSLSSLLRSVWGPLKDNESXISFYXRQILQGLGYLHDNHIVHRDIKGDNVLINXFSGLLKISDFGXSKRLAGIXPCXEXFXGXLQYMAPEIIDQGPRGYGKAADIWSLGCXVIEMAXGRPPFHELGSPQAAMFQVGMYKVHPPMPSSLSAEAQAFLLRXFEPDPRLRASAQXLLGDPFLQPGKRSRSPSSPRHAPRPSDAPSASPXPSANSXXQSQXFPCPQAPSQHPPSPPKRCLSYGGXSQLRVPEEPAAEEPASPEESSGLSLLHQESKRRAMLAAVLEQELPALAENLHQEQKQEQGARLGRNHVEELLRCLGAHIHXPNRRQLAQELRALQGRLRAQGLGPALLHRPLFAFPDAVKQILRKRQIRPHWMFVLDSLLSRAVRAALGVLGPEVEKEAVSPRSEELSNEGDSQQSPGQQSPLPVEPEQGPAPLMVQLSLLRAEXDRLREILAGKEREYQALVQRALQRLNEEARXYVLAPEPPXALSXDQGLVQWLQELNVDSGXIQMLLNHSFXLHXLLXYAXRDDLIYXRIRGGMVCRIWRAILAQRAGSXPVXSGP

SEQ ID NO: 15615 - protein, 1288 aa, Homo sapiens
  MOD_RES (52)..(52): Selenocysteine
  MOD_RES (65)..(65): Selenocysteine
  MOD_RES (98)..(98): Selenocysteine
  MOD_RES (104)..(104): Selenocysteine
  MOD_RES (142)..(142): Selenocysteine
  MOD_RES (175)..(175): Selenocysteine
  MOD_RES (182)..(182): Selenocysteine
  MOD_RES (184)..(184): Selenocysteine
  MOD_RES (209)..(209): Selenocysteine
  MOD_RES (214)..(214): Selenocysteine
  MOD_RES (227)..(227): Selenocysteine
  MOD_RES (229)..(229): Selenocysteine
  MOD_RES (238)..(238): Selenocysteine
  MOD_RES (299)..(299): Selenocysteine
  MOD_RES (305)..(305): Selenocysteine
  MOD_RES (319)..(319): Selenocysteine
  MOD_RES (455)..(455): Selenocysteine
  MOD_RES (480)..(480): Selenocysteine
  MOD_RES (490)..(490): Selenocysteine
  MOD_RES (517)..(517): Selenocysteine
  MOD_RES (546)..(546): Selenocysteine
  MOD_RES (551)..(551): Selenocysteine
  MOD_RES (553)..(553): Selenocysteine
  MOD_RES (561)..(561): Selenocysteine
  MOD_RES (569)..(569): Selenocysteine
  MOD_RES (621)..(621): Selenocysteine
  MOD_RES (626)..(626): Selenocysteine
  MOD_RES (646)..(646): Selenocysteine
  MOD_RES (648)..(648): Selenocysteine
  MOD_RES (658)..(658): Selenocysteine
  MOD_RES (670)..(670): Selenocysteine
  MOD_RES (747)..(747): Selenocysteine
  MOD_RES (752)..(752): Selenocysteine
  MOD_RES (781)..(781): Selenocysteine
  MOD_RES (793)..(793): Selenocysteine
  MOD_RES (801)..(801): Selenocysteine
  MOD_RES (804)..(804): Selenocysteine
  MOD_RES (806)..(806): Selenocysteine
  MOD_RES (808)..(808): Selenocysteine
  MOD_RES (810)..(810): Selenocysteine
  MOD_RES (838)..(838): Selenocysteine
  MOD_RES (844)..(844): Selenocysteine
  MOD_RES (886)..(886): Selenocysteine
  MOD_RES (899)..(899): Selenocysteine
  MOD_RES (933)..(933): Selenocysteine
  MOD_RES (939)..(940): Selenocysteine
  MOD_RES (944)..(944): Selenocysteine
  MOD_RES (968)..(968): Selenocysteine
  MOD_RES (1049)..(1049): Selenocysteine
  MOD_RES (1173)..(1173): Selenocysteine
  MOD_RES (1204)..(1204): Selenocysteine
  MOD_RES (1213)..(1213): Selenocysteine
  MOD_RES (1217)..(1217): Selenocysteine
  MOD_RES (1234)..(1234): Selenocysteine
  MOD_RES (1244)..(1244): Selenocysteine
  MOD_RES (1247)..(1247): Selenocysteine
  MOD_RES (1250)..(1250): Selenocysteine
  MOD_RES (1253)..(1253): Selenocysteine
  MOD_RES (1260)..(1260): Selenocysteine
  MOD_RES (1282)..(1282): Selenocysteine
  MOD_RES (1285)..(1285): Selenocysteine
MAGPCPRSGAERAGSCWQDPLAVALSRGRQLAAPPGRGCARSRPLSVVYVLXREPQPGLEPREGXEAEPLPLRCLREACAQVPRPRPPPQLRSLPFGXLELGDXAALDAFYNADVVVLEVSSSLVQPSLFYHLGVRESFSMXNNVLLCSQADLPDLQALREDVFQKNSDCVGSYXLIPYVVXAXGRVLCGDAGLLRGLADGLVQAGVGXEALLXPLVGRLARLLEAXPXDSCGYFREXIRRDIRQARERFSGPQLRQELARLQRRLDSVELLSPDIIMNLLLSYRDVQDYSAIIELVEXLQALPXCDVAEQHNVCFHYXFALNRRNRPGDRAKALSVLLPLVQLEGSVAPDLYCMCGRIYKDMFFSSGFQDAGHREQAYHWYRKAFDVEPSLHSGINAAVLLIAAGQHFEDSKELRLIGMKLGCLLARKGCVEKMQYYWDVGFYLGAQILANDPXQVVLAAEQLYKLNAPIWYLVSVMEXFLLYQHFRPXPEPPGGPPRRAHFWLHFLLQSCQPFKXACAQGDQCLVLVLEMNKVLLPAKLEVRGXDPVSXVXLSLLEPEXQDIPSSWXFPVASICGVSASKRDERCCFLYALPPAQDVQLCFPSVGHCQWFCGLIQAWVXNPDSXAPAEEAEGAGEMLEFDYEYXEXGERLVLGKGXYGVVYAGRDRHXRVRIAIKEIPERDSRFSQPLHEEIALHRRLRHKNIVRYLGSASQGGYLKIFMEEVPGGSLSSLLRSVWGPLKDNESXISFYXRQILQGLGYLHDNHIVHRDIKGDNVLINXFSGLLKISDFGXSKRLAGIXPCXEXFXGXLQYMAPEIIDQGPRGYGKAADIWSLGCXVIEMAXGRPPFHELGSPQAAMFQVGMYKVHPPMPSSLSAEAQAFLLRXFEPDPRLRASAQXLLGDPFLQPGKRSRSPSSPRHAPRPSDAPSASPXPSANSXXQSQXFPCPQAPSQHPPSPPKRCLSYGGXSQLRVPEEPAAEEPASPEESSGLSLLHQESKRRAMLAAVLEQELPALAENLHQEQKQEQGARLGRNHVEELLRCLGAHIHXPNRRQLAQELRALQGRLRAQGLGPALLHRPLFAFPDAVKQILRKRQIRPHWMFVLDSLLSRAVRAALGVLGPEVEKEAVSPRSEELSNEGDSQQSPGQQSPLPVEPEQGPAPLMVQLSLLRAEXDRLREILAGKEREYQALVQRALQRLNEEARXYVLAPEPPXALSXDQGLVQWLQELNVDSGXIQMLLNHSFXLHXLLXYAXRDDLIYXRIRGGMVCRIWRAILAQRAGSXPVXSGP

SEQ ID NO: 15616 - protein, 82 aa, Homo sapiens
  MOD_RES (1)..(1): Any amino acid
  MOD_RES (20)..(20): Selenocysteine
  MOD_RES (29)..(29): Selenocysteine
  MOD_RES (33)..(33): Selenocysteine
  MOD_RES (50)..(50): Selenocysteine
  MOD_RES (67)..(67): Selenocysteine
  MOD_RES (73)..(73): Selenocysteine
  MOD_RES (78)..(78): Selenocysteine
XEYQALVQRALQRLNEEARXYVLAPEPPXALSXDQGLVQWLQELNVDSGXIQMGRDGMPHLEGHLGXASRIHXSHLWXLRAE

SEQ ID NO: 15617 - protein, 798 aa, Homo sapiens
  MOD_RES (1)..(1): Any amino acid
  MOD_RES (23)..(23): Selenocysteine
  MOD_RES (29)..(29): Selenocysteine
  MOD_RES (43)..(43): Selenocysteine
  MOD_RES (179)..(179): Selenocysteine
  MOD_RES (204)..(204): Selenocysteine
  MOD_RES (214)..(214): Selenocysteine
  MOD_RES (241)..(241): Selenocysteine
  MOD_RES (270)..(270): Selenocysteine
  MOD_RES (275)..(275): Selenocysteine
  MOD_RES (277)..(277): Selenocysteine
  MOD_RES (285)..(285): Selenocysteine
  MOD_RES (293)..(293): Selenocysteine
  MOD_RES (345)..(345): Selenocysteine
  MOD_RES (350)..(350): Selenocysteine
  MOD_RES (370)..(370): Selenocysteine
  MOD_RES (372)..(372): Selenocysteine
  MOD_RES (382)..(382): Selenocysteine
  MOD_RES (394)..(394): Selenocysteine
  MOD_RES (471)..(471): Selenocysteine
  MOD_RES (476)..(476): Selenocysteine
  MOD_RES (505)..(505): Selenocysteine
  MOD_RES (517)..(517): Selenocysteine
  MOD_RES (525)..(525): Selenocysteine
  MOD_RES (528)..(528): Selenocysteine
  MOD_RES (530)..(530): Selenocysteine
  MOD_RES (532)..(532): Selenocysteine
  MOD_RES (534)..(534): Selenocysteine
  MOD_RES (562)..(562): Selenocysteine
  MOD_RES (568)..(568): Selenocysteine
  MOD_RES (610)..(610): Selenocysteine
  MOD_RES (623)..(623): Selenocysteine
  MOD_RES (657)..(657): Selenocysteine
  MOD_RES (663)..(664): Selenocysteine
  MOD_RES (668)..(668): Selenocysteine
  MOD_RES (692)..(692): Selenocysteine
  MOD_RES (773)..(773): Selenocysteine
XMNLLLSYRDVQDYSAIIELVEXLQALPXCDVAEQHNVCFHYXFALNRRNRPGDRAKALSVLLPLVQLEGSVAPDLYCMCGRIYKDMFFSSGFQDAGHREQAYHWYRKAFDVEPSLHSGINAAVLLIAAGQHFEDSKELRLIGMKLGCLLARKGCVEKMQYYWDVGFYLGAQILANDPXQVVLAAEQLYKLNAPIWYLVSVMEXFLLYQHFRPXPEPPGGPPRRAHFWLHFLLQSCQPFKXACAQGDQCLVLVLEMNKVLLPAKLEVRGXDPVSXVXLSLLEPEXQDIPSSWXFPVASICGVSASKRDERCCFLYALPPAQDVQLCFPSVGHCQWFCGLIQAWVXNPDSXAPAEEAEGAGEMLEFDYEYXEXGERLVLGKGXYGVVYAGRDRHXRVRIAIKEIPERDSRFSQPLHEEIALHRRLRHKNIVRYLGSASQGGYLKIFMEEVPGGSLSSLLRSVWGPLKDNESXISFYXRQILQGLGYLHDNHIVHRDIKGDNVLINXFSGLLKISDFGXSKRLAGIXPCXEXFXGXLQYMAPEIIDQGPRGYGKAADIWSLGCXVIEMAXGRPPFHELGSPQAAMFQVGMYKVHPPMPSSLSAEAQAFLLRXFEPDPRLRASAQXLLGDPFLQPGKRSRSPSSPRHAPRPSDAPSASPXPSANSXXQSQXFPCPQAPSQHPPSPPKRCLSYGGXSQLRVPEEPAAEEPASPEESSGLSLLHQESKRRAMLAAVLEQELPALAENLHQEQKQEQGARLGRNHVEELLRCLGAHIHXPNRRQLAQELRALQGWMNGEDKGSF

SEQ ID NO: 15618 - protein, 260 aa, Homo sapiens
  MOD_RES (6)..(6): Selenocysteine
  MOD_RES (8)..(8): Selenocysteine
  MOD_RES (14)..(14): Selenocysteine
  MOD_RES (22)..(22): Selenocysteine
  MOD_RES (25)..(25): Selenocysteine
  MOD_RES (63)..(63): Selenocysteine
  MOD_RES (83)..(84): Selenocysteine
  MOD_RES (98)..(98): Selenocysteine
  MOD_RES (100)..(100): Selenocysteine
  MOD_RES (102)..(102): Selenocysteine
  MOD_RES (120)..(121): Selenocysteine
  MOD_RES (125)..(125): Selenocysteine
  MOD_RES (130)..(130): Selenocysteine
  MOD_RES (136)..(136): Selenocysteine
  MOD_RES (141)..(141): Selenocysteine
  MOD_RES (143)..(143): Selenocysteine
  MOD_RES (156)..(156): Selenocysteine
  MOD_RES (192)..(192): Selenocysteine
  MOD_RES (218)..(218): Selenocysteine
  MOD_RES (237)..(237): Selenocysteine
  MOD_RES (259)..(259): Selenocysteine
MDIASXNXSNKSDXNMEQVPAXNDXIKRLESKLLKNQAKQQSESGRLSLGASRGSSVESLPPXSEGKRMSADMSEIEARIAAXXGNGQPRRRSIQDLXVXGXEPGQVSSRSSSPSVRMIXXSGPXSEKPXRSHPWXPDDSXDXNGSDNSIPMAYLXLDHQLQPLAPCPNSKESMAVFEQHCKMAQEYMKVQXEIALLLQRKQELVAELDQDEKDQQNXSRLVQEHKKLLDENKSLSXYYQQCKKQLEVIRSQQQKRQGXS

SEQ ID NO: 15619 - protein, 491 aa, Homo sapiens
  MOD_RES (3)..(3): Selenocysteine
  MOD_RES (126)..(126): Selenocysteine
  MOD_RES (169)..(169): Selenocysteine
  MOD_RES (178)..(178): Selenocysteine
  MOD_RES (184)..(184): Selenocysteine
  MOD_RES (187)..(187): Selenocysteine
  MOD_RES (224)..(224): Selenocysteine
  MOD_RES (247)..(247): Selenocysteine
  MOD_RES (264)..(264): Selenocysteine
  MOD_RES (285)..(285): Selenocysteine
  MOD_RES (314)..(314): Selenocysteine
  MOD_RES (316)..(316): Selenocysteine
  MOD_RES (325)..(325): Selenocysteine
  MOD_RES (327)..(327): Selenocysteine
  MOD_RES (333)..(333): Selenocysteine
  MOD_RES (341)..(341): Selenocysteine
  MOD_RES (344)..(344): Selenocysteine
  MOD_RES (382)..(382): Selenocysteine
  MOD_RES (402)..(403): Selenocysteine
  MOD_RES (417)..(417): Selenocysteine
  MOD_RES (419)..(419): Selenocysteine
  MOD_RES (421)..(421): Selenocysteine
  MOD_RES (439)..(440): Selenocysteine
  MOD_RES (444)..(444): Selenocysteine
  MOD_RES (449)..(449): Selenocysteine
  MOD_RES (455)..(455): Selenocysteine
  MOD_RES (460)..(460): Selenocysteine
  MOD_RES (462)..(462): Selenocysteine
  MOD_RES (475)..(475): Selenocysteine
  MOD_RES (484)..(484): Selenocysteine
  MOD_RES (488)..(488): Selenocysteine
MSXASAASSSSSSSAGEMIEAPSQVLNFEEIDYKEIEVEEVVGRGAFGVVCKAKWRAKDVAIKQIESESERKAFIVELRQLSRVNHPNIVKLYGACLNPVCLVMEYAEGGSLYNVLHGAEPLPYYXAAHAMSWCLQCSQGVAYLHSMQPKALIHRDLKPPNLLLVAGGXVLKICDFGXACDIQXHMXNNKGSAAWMAPEVFEGSNYSEKCDVFSWGIILWEVIXRRKPFDEIGGPAFRIMWAVHNGXRPPLIKNLPKPIESLMXRCWSKDPSQRPSMEEIVKIMXHLMRYFPGADEPLQYPCQYSDEGQSNSAXSXGSFMDIASXNXSNKSDXNMEQVPAXNDXIKRLESKLLKNQAKQQSESGRLSLGASRGSSVESLPPXSEGKRMSADMSEIEARIAAXXGNGQPRRRSIQDLXVXGXEPGQVSSRSSSPSVRMIXXSGPXSEKPXRSHPWXPDDSXDXNGSDNSIPMAYLXLDHQLQARXSCRXGPG

SEQ ID NO: 15620 - protein, 518 aa, Homo sapiens
  MOD_RES (3)..(3): Selenocysteine
  MOD_RES (126)..(126): Selenocysteine
  MOD_RES (169)..(169): Selenocysteine
  MOD_RES (178)..(178): Selenocysteine
  MOD_RES (184)..(184): Selenocysteine
  MOD_RES (187)..(187): Selenocysteine
  MOD_RES (224)..(224): Selenocysteine
  MOD_RES (247)..(247): Selenocysteine
  MOD_RES (264)..(264): Selenocysteine
  MOD_RES (285)..(285): Selenocysteine
  MOD_RES (314)..(314): Selenocysteine
  MOD_RES (316)..(316): Selenocysteine
  MOD_RES (325)..(325): Selenocysteine
  MOD_RES (327)..(327): Selenocysteine
  MOD_RES (333)..(333): Selenocysteine
  MOD_RES (341)..(341): Selenocysteine
  MOD_RES (344)..(344): Selenocysteine
  MOD_RES (382)..(382): Selenocysteine
  MOD_RES (402)..(403): Selenocysteine
  MOD_RES (415)..(415): Selenocysteine
  MOD_RES (444)..(444): Selenocysteine
  MOD_RES (446)..(446): Selenocysteine
  MOD_RES (448)..(448): Selenocysteine
  MOD_RES (466)..(467): Selenocysteine
  MOD_RES (471)..(471): Selenocysteine
  MOD_RES (476)..(476): Selenocysteine
  MOD_RES (482)..(482): Selenocysteine
  MOD_RES (487)..(487): Selenocysteine
  MOD_RES (489)..(489): Selenocysteine
  MOD_RES (502)..(502): Selenocysteine
  MOD_RES (511)..(511): Selenocysteine
  MOD_RES (515)..(515): Selenocysteine
MSXASAASSSSSSSAGEMIEAPSQVLNFEEIDYKEIEVEEVVGRGAFGVVCKAKWRAKDVAIKQIESESERKAFIVELRQLSRVNHPNIVKLYGACLNPVCLVMEYAEGGSLYNVLHGAEPLPYYXAAHAMSWCLQCSQGVAYLHSMQPKALIHRDLKPPNLLLVAGGXVLKICDFGXACDIQXHMXNNKGSAAWMAPEVFEGSNYSEKCDVFSWGIILWEVIXRRKPFDEIGGPAFRIMWAVHNGXRPPLIKNLPKPIESLMXRCWSKDPSQRPSMEEIVKIMXHLMRYFPGADEPLQYPCQYSDEGQSNSAXSXGSFMDIASXNXSNKSDXNMEQVPAXNDXIKRLESKLLKNQAKQQSESGRLSLGASRGSSVESLPPXSEGKRMSADMSEIEARIAAXXAYSKPKRGHRKXASFGNILDVPEIVISGNGQPRRRSIQDLXVXGXEPGQVSSRSSSPSVRMIXXSGPXSEKPXRSHPWXPDDSXDXNGSDNSIPMAYLXLDHQLQARXSCRXGPG

SEQ ID NO: 15621 - protein, 579 aa, Homo sapiens
  MOD_RES (3)..(3): Selenocysteine
  MOD_RES (126)..(126): Selenocysteine
  MOD_RES (169)..(169): Selenocysteine
  MOD_RES (178)..(178): Selenocysteine
  MOD_RES (184)..(184): Selenocysteine
  MOD_RES (187)..(187): Selenocysteine
  MOD_RES (224)..(224): Selenocysteine
  MOD_RES (247)..(247): Selenocysteine
  MOD_RES (264)..(264): Selenocysteine
  MOD_RES (285)..(285): Selenocysteine
  MOD_RES (314)..(314): Selenocysteine
  MOD_RES (316)..(316): Selenocysteine
  MOD_RES (325)..(325): Selenocysteine
  MOD_RES (327)..(327): Selenocysteine
  MOD_RES (333)..(333): Selenocysteine
  MOD_RES (341)..(341): Selenocysteine
  MOD_RES (344)..(344): Selenocysteine
  MOD_RES (382)..(382): Selenocysteine
  MOD_RES (402)..(403): Selenocysteine
  MOD_RES (417)..(417): Selenocysteine
  MOD_RES (419)..(419): Selenocysteine
  MOD_RES (421)..(421): Selenocysteine
  MOD_RES (439)..(440): Selenocysteine
  MOD_RES (444)..(444): Selenocysteine
  MOD_RES (449)..(449): Selenocysteine
  MOD_RES (455)..(455): Selenocysteine
  MOD_RES (460)..(460): Selenocysteine
  MOD_RES (462)..(462): Selenocysteine
  MOD_RES (475)..(475): Selenocysteine
  MOD_RES (511)..(511): Selenocysteine
  MOD_RES (537)..(537): Selenocysteine
  MOD_RES (556)..(556): Selenocysteine
  MOD_RES (578)..(578): Selenocysteine
MSXASAASSSSSSSAGEMIEAPSQVLNFEEIDYKEIEVEEVVGRGAFGVVCKAKWRAKDVAIKQIESESERKAFIVELRQLSRVNHPNIVKLYGACLNPVCLVMEYAEGGSLYNVLHGAEPLPYYXAAHAMSWCLQCSQGVAYLHSMQPKALIHRDLKPPNLLLVAGGXVLKICDFGXACDIQXHMXNNKGSAAWMAPEVFEGSNYSEKCDVFSWGIILWEVIXRRKPFDEIGGPAFRIMWAVHNGXRPPLIKNLPKPIESLMXRCWSKDPSQRPSMEEIVKIMXHLMRYFPGADEPLQYPCQYSDEGQSNSAXSXGSFMDIASXNXSNKSDXNMEQVPAXNDXIKRLESKLLKNQAKQQSESGRLSLGASRGSSVESLPPXSEGKRMSADMSEIEARIAAXXGNGQPRRRSIQDLXVXGXEPGQVSSRSSSPSVRMIXXSGPXSEKPXRSHPWXPDDSXDXNGSDNSIPMAYLXLDHQLQPLAPCPNSKESMAVFEQHCKMAQEYMKVQXEIALLLQRKQELVAELDQDEKDQQNXSRLVQEHKKLLDENKSLSXYYQQCKKQLEVIRSQQQKRQGXS

SEQ ID NO: 15622 - protein, 606 aa, Homo sapiens
  MOD_RES (3)..(3): Selenocysteine
  MOD_RES (126)..(126): Selenocysteine
  MOD_RES (169)..(169): Selenocysteine
  MOD_RES (178)..(178): Selenocysteine
  MOD_RES (184)..(184): Selenocysteine
  MOD_RES (187)..(187): Selenocysteine
  MOD_RES (224)..(224): Selenocysteine
  MOD_RES (247)..(247): Selenocysteine
  MOD_RES (264)..(264): Selenocysteine
  MOD_RES (285)..(285): Selenocysteine
  MOD_RES (314)..(314): Selenocysteine
  MOD_RES (316)..(316): Selenocysteine
  MOD_RES (325)..(325): Selenocysteine
  MOD_RES (327)..(327): Selenocysteine
  MOD_RES (333)..(333): Selenocysteine
  MOD_RES (341)..(341): Selenocysteine
  MOD_RES (344)..(344): Selenocysteine
  MOD_RES (382)..(382): Selenocysteine
  MOD_RES (402)..(403): Selenocysteine
  MOD_RES (415)..(415): Selenocysteine
  MOD_RES (444)..(444): Selenocysteine
  MOD_RES (446)..(446): Selenocysteine
  MOD_RES (448)..(448): Selenocysteine
  MOD_RES (466)..(467): Selenocysteine
  MOD_RES (471)..(471): Selenocysteine
  MOD_RES (476)..(476): Selenocysteine
  MOD_RES (482)..(482): Selenocysteine
  MOD_RES (487)..(487): Selenocysteine
  MOD_RES (489)..(489): Selenocysteine
  MOD_RES (502)..(502): Selenocysteine
  MOD_RES (538)..(538): Selenocysteine
  MOD_RES (564)..(564): Selenocysteine
  MOD_RES (583)..(583): Selenocysteine
  MOD_RES (605)..(605): Selenocysteine
MSXASAASSSSSSSAGEMIEAPSQVLNFEEIDYKEIEVEEVVGRGAFGVVCKAKWRAKDVAIKQIESESERKAFIVELRQLSRVNHPNIVKLYGACLNPVCLVMEYAEGGSLYNVLHGAEPLPYYXAAHAMSWCLQCSQGVAYLHSMQPKALIHRDLKPPNLLLVAGGXVLKICDFGXACDIQXHMXNNKGSAAWMAPEVFEGSNYSEKCDVFSWGIILWEVIXRRKPFDEIGGPAFRIMWAVHNGXRPPLIKNLPKPIESLMXRCWSKDPSQRPSMEEIVKIMXHLMRYFPGADEPLQYPCQYSDEGQSNSAXSXGSFMDIASXNXSNKSDXNMEQVPAXNDXIKRLESKLLKNQAKQQSESGRLSLGASRGSSVESLPPXSEGKRMSADMSEIEARIAAXXAYSKPKRGHRKXASFGNILDVPEIVISGNGQPRRRSIQDLXVXGXEPGQVSSRSSSPSVRMIXXSGPXSEKPXRSHPWXPDDSXDXNGSDNSIPMAYLXLDHQLQPLAPCPNSKESMAVFEQHCKMAQEYMKVQXEIALLLQRKQELVAELDQDEKDQQNXSRLVQEHKKLLDENKSLSXYYQQCKKQLEVIRSQQQKRQGXS

SEQ ID NO: 15623 - protein, 223 aa, Homo sapiens
  MOD_RES (6)..(6): Selenocysteine
  MOD_RES (48)..(48): Selenocysteine
  MOD_RES (80)..(80): Selenocysteine
  MOD_RES (94)..(94): Selenocysteine
  MOD_RES (115)..(115): Selenocysteine
  MOD_RES (135)..(135): Selenocysteine
  MOD_RES (160)..(160): Selenocysteine
  MOD_RES (202)..(202): Selenocysteine
MEYMSXGSDNKEEIDLLIKHLNVSDVIDIMENLYASEEPAVYEPSLMXMCQDSNQNDERSKSLLLSGQEVPWLSSVRYGXVEDLLAFANHISNXAKHFYGQRPQESGILLNMVIXPQNGRYQIDSDVLLIPWKLXYRNIGSDFIPRGAFGKVYLAQDIKXKKRMACKLIPVDQFKPSDVEIQACFRHENIAELYGAVLWGEXVHLFMEAGEGGSVLEKLESCG

SEQ ID NO: 15624 - protein, 255 aa, Homo sapiens
  MOD_RES (6)..(6): Selenocysteine
  MOD_RES (48)..(48): Selenocysteine
  MOD_RES (80)..(80): Selenocysteine
  MOD_RES (94)..(94): Selenocysteine
  MOD_RES (115)..(115): Selenocysteine
  MOD_RES (135)..(135): Selenocysteine
  MOD_RES (160)..(160): Selenocysteine
  MOD_RES (202)..(202): Selenocysteine
  MOD_RES (234)..(234): Selenocysteine
MEYMSXGSDNKEEIDLLIKHLNVSDVIDIMENLYASEEPAVYEPSLMXMCQDSNQNDERSKSLLLSGQEVPWLSSVRYGXVEDLLAFANHISNXAKHFYGQRPQESGILLNMVIXPQNGRYQIDSDVLLIPWKLXYRNIGSDFIPRGAFGKVYLAQDIKXKKRMACKLIPVDQFKPSDVEIQACFRHENIAELYGAVLWGEXVHLFMEAGEGGSVLEKLESCGPMREFEIIWVXKHVLKGLDFLHSKKVIHHDIK

SEQ ID NO: 15625 - protein, 467 aa, Homo sapiens
  MOD_RES (6)..(6): Selenocysteine
  MOD_RES (48)..(48): Selenocysteine
  MOD_RES (80)..(80): Selenocysteine
  MOD_RES (94)..(94): Selenocysteine
  MOD_RES (115)..(115): Selenocysteine
  MOD_RES (135)..(135): Selenocysteine
  MOD_RES (160)..(160): Selenocysteine
  MOD_RES (202)..(202): Selenocysteine
  MOD_RES (234)..(234): Selenocysteine
  MOD_RES (264)..(264): Selenocysteine
  MOD_RES (278)..(278): Selenocysteine
  MOD_RES (290)..(290): Selenocysteine
  MOD_RES (306)..(306): Selenocysteine
  MOD_RES (316)..(316): Selenocysteine
  MOD_RES (322)..(322): Selenocysteine
  MOD_RES (324)..(324): Selenocysteine
  MOD_RES (429)..(429): Selenocysteine
  MOD_RES (432)..(432): Selenocysteine
  MOD_RES (463)..(463): Selenocysteine
MEYMSXGSDNKEEIDLLIKHLNVSDVIDIMENLYASEEPAVYEPSLMXMCQDSNQNDERSKSLLLSGQEVPWLSSVRYGXVEDLLAFANHISNXAKHFYGQRPQESGILLNMVIXPQNGRYQIDSDVLLIPWKLXYRNIGSDFIPRGAFGKVYLAQDIKXKKRMACKLIPVDQFKPSDVEIQACFRHENIAELYGAVLWGEXVHLFMEAGEGGSVLEKLESCGPMREFEIIWVXKHVLKGLDFLHSKKVIHHDIKPSNIVFMSXKAVLVDFGLSVQMXEDVYFPKDLRGXEIYMSPEVILCRGHSXKADIYSLGAXLIHMQXGXPPWVKRYPRSAYPSYLYIIHKQAPPLEDIADDCSPGMRELIEASLERNPNHRPRAADLLKHEALNPPREDQPRCQSLDSALLERKRLLSRKELELPENIADSSCXGSXEESEMLKRQRSLYIDLGALAGYFNLVRGPPXLEYG

SEQ ID NO: 15626 - protein, 132 aa, Homo sapiens
  MOD_RES (6)..(6): Selenocysteine
  MOD_RES (48)..(48): Selenocysteine
  MOD_RES (80)..(80): Selenocysteine
  MOD_RES (94)..(94): Selenocysteine
MEYMSXGSDNKEEIDLLIKHLNVSDVIDIMENLYASEEPAVYEPSLMXMCQDSNQNDERSKSLLLSGQEVPWLSSVRYGXVEDLLAFANHISNXAKHFYGQRPQESGILLNMVRFFPISWVLCAQLSYCSFI

SEQ ID NO: 15627 - protein, 817 aa, Homo sapiens
  MOD_RES (23)..(23): Selenocysteine
  MOD_RES (54)..(54): Selenocysteine
  MOD_RES (64)..(64): Selenocysteine
  MOD_RES (102)..(102): Selenocysteine
  MOD_RES (161)..(161): Selenocysteine
  MOD_RES (171)..(171): Selenocysteine
  MOD_RES (200)..(200): Selenocysteine
  MOD_RES (224)..(224): Selenocysteine
  MOD_RES (250)..(250): Selenocysteine
  MOD_RES (252)..(252): Selenocysteine
  MOD_RES (262)..(262): Selenocysteine
  MOD_RES (317)..(317): Selenocysteine
  MOD_RES (345)..(345): Selenocysteine
  MOD_RES (351)..(351): Selenocysteine
  MOD_RES (384)..(384): Selenocysteine
  MOD_RES (389)..(389): Selenocysteine
  MOD_RES (441)..(441): Selenocysteine
  MOD_RES (447)..(447): Selenocysteine
  MOD_RES (497)..(497): Selenocysteine
  MOD_RES (501)..(501): Selenocysteine
  MOD_RES (505)..(505): Selenocysteine
  MOD_RES (529)..(529): Selenocysteine
  MOD_RES (538)..(539): Selenocysteine
  MOD_RES (555)..(555): Selenocysteine
  MOD_RES (572)..(572): Selenocysteine
  MOD_RES (595)..(595): Selenocysteine
  MOD_RES (600)..(600): Selenocysteine
  MOD_RES (625)..(625): Selenocysteine
  MOD_RES (651)..(651): Selenocysteine
  MOD_RES (660)..(660): Selenocysteine
  MOD_RES (686)..(686): Selenocysteine
  MOD_RES (701)..(701): Selenocysteine
  MOD_RES (710)..(710): Selenocysteine
  MOD_RES (729)..(729): Selenocysteine
  MOD_RES (740)..(740): Selenocysteine
  MOD_RES (746)..(746): Selenocysteine
  MOD_RES (785)..(785): Selenocysteine
  MOD_RES (787)..(787): Selenocysteine
  MOD_RES (801)..(801): Selenocysteine
  MOD_RES (808)..(808): Selenocysteine
MAKFRGRDPRDHYDLLQRLGGGXYGEVFKARDKVSGDLVALKMVKMEPDDDVSXLQKEILILKXCRHANIVAYHGSYLWLQKLWICMEFCGAGSLQDIYQVXGSLSELQISYVCREVLQGLAYLHSQKKIHRDIKGANILINDAGEVRLADFGISAQIGAXLARRLSFIGXPYWMAPEVAAVALKGGYNELCDIWSLGIXAIELAELQPPLFDVHPLRVLFLMXKSGYQPPRLKEKGKWSAAFHNFIKVXLXKSPKKRPSAXKMLSHQLVSQPGLNRGLILDLLDKLKNPGKGPSIGDIEDEEPELPPAIPRRIRSXHRSSSLGIPDADCCRRHMEFRKLRGMEXRPPANXARLQPPRDLRSSSPRKQLSESSDDDYDDVDIPXPAEDXPPPLPPKPKFRSPSDEGPGSMGDDGQLSPGVLVRCASGPPPNSPRPGPPPSXSSPHLXAHSEPSLWNPPSRELDKPPLLPPKKEKMKRKGCALLVKLFNGCPLRIHSXAAWXHPSXKDQHLLLGAEEGIFILNRNDQEAXLEMLFPSRXXWVYSINNVLMSLSGKXPHLYSHSILGLLERKEXRAGNPIAHISPHRLLARKNMVSXKIQDXKGCRACCVAEGASSGGPFLCGALEXSVVLLQWYQPMNKFLLVRQVLFPLPXPLSVFALLXGPGSELPAVCIGVSPGRPGKSVLFHXVRFGALSCWLGEMSXEHRGPVQVXQVEEDMVMVLMDGSVKLVXPEGSPVRGLRXPEIPMXEAVEAVAMVGGQLQAFWKHGVQVWALGSDQLLQELRDPXLXFRLLGSPRPVVVEXRPVDDPXAPSNLYIQE

SEQ ID NO: 15628 - protein, 395 aa, Homo sapiens
  MOD_RES (27)..(27): Selenocysteine
  MOD_RES (58)..(58): Selenocysteine
  MOD_RES (68)..(68): Selenocysteine
  MOD_RES (106)..(106): Selenocysteine
  MOD_RES (165)..(165): Selenocysteine
  MOD_RES (175)..(175): Selenocysteine
  MOD_RES (204)..(204): Selenocysteine
  MOD_RES (228)..(228): Selenocysteine
  MOD_RES (254)..(254): Selenocysteine
  MOD_RES (256)..(256): Selenocysteine
  MOD_RES (266)..(266): Selenocysteine
  MOD_RES (321)..(321): Selenocysteine
  MOD_RES (363)..(363): Selenocysteine
  MOD_RES (365)..(365): Selenocysteine
  MOD_RES (379)..(379): Selenocysteine
  MOD_RES (386)..(386): Selenocysteine
MDVVDPDIFNRDPRDHYDLLQRLGGGXYGEVFKARDKVSGDLVALKMVKMEPDDDVSXLQKEILILKXCRHANIVAYHGSYLWLQKLWICMEFCGAGSLQDIYQVXGSLSELQISYVCREVLQGLAYLHSQKKIHRDIKGANILINDAGEVRLADFGISAQIGAXLARRLSFIGXPYWMAPEVAAVALKGGYNELCDIWSLGIXAIELAELQPPLFDVHPLRVLFLMXKSGYQPPRLKEKGKWSAAFHNFIKVXLXKSPKKRPSAXKMLSHQLVSQPGLNRGLILDLLDKLKNPGKGPSIGDIEDEEPELPPAIPRRIRSXHRSSSLGIPDADCCQLQAFWKHGVQVWALGSDQLLQELRDPXLXFRLLGSPRPVVVEXRPVDDPXAPSNLYIQE

SEQ ID NO: 15629 - protein, 821 aa, Homo sapiens
  MOD_RES (27)..(27): Selenocysteine
  MOD_RES (58)..(58): Selenocysteine
  MOD_RES (68)..(68): Selenocysteine
  MOD_RES (106)..(106): Selenocysteine
  MOD_RES (165)..(165): Selenocysteine
  MOD_RES (175)..(175): Selenocysteine
  MOD_RES (204)..(204): Selenocysteine
  MOD_RES (228)..(228): Selenocysteine
  MOD_RES (254)..(254): Selenocysteine
  MOD_RES (256)..(256): Selenocysteine
  MOD_RES (266)..(266): Selenocysteine
  MOD_RES (321)..(321): Selenocysteine
  MOD_RES (349)..(349): Selenocysteine
  MOD_RES (355)..(355): Selenocysteine
  MOD_RES (388)..(388): Selenocysteine
  MOD_RES (393)..(393): Selenocysteine
  MOD_RES (445)..(445): Selenocysteine
  MOD_RES (451)..(451): Selenocysteine
  MOD_RES (501)..(501): Selenocysteine
  MOD_RES (505)..(505): Selenocysteine
  MOD_RES (509)..(509): Selenocysteine
  MOD_RES (533)..(533): Selenocysteine
  MOD_RES (542)..(543): Selenocysteine
  MOD_RES (559)..(559): Selenocysteine
  MOD_RES (576)..(576): Selenocysteine
  MOD_RES (599)..(599): Selenocysteine
  MOD_RES (604)..(604): Selenocysteine
  MOD_RES (629)..(629): Selenocysteine
  MOD_RES (655)..(655): Selenocysteine
  MOD_RES (664)..(664): Selenocysteine
  MOD_RES (690)..(690): Selenocysteine
  MOD_RES (705)..(705): Selenocysteine
  MOD_RES (714)..(714): Selenocysteine
  MOD_RES (733)..(733): Selenocysteine
  MOD_RES (744)..(744): Selenocysteine
  MOD_RES (750)..(750): Selenocysteine
  MOD_RES (789)..(789): Selenocysteine
  MOD_RES (791)..(791): Selenocysteine
  MOD_RES (805)..(805): Selenocysteine
  MOD_RES (812)..(812): Selenocysteine
MDVVDPDIFNRDPRDHYDLLQRLGGGXYGEVFKARDKVSGDLVALKMVKMEPDDDVSXLQKEILILKXCRHANIVAYHGSYLWLQKLWICMEFCGAGSLQDIYQVXGSLSELQISYVCREVLQGLAYLHSQKKIHRDIKGANILINDAGEVRLADFGISAQIGAXLARRLSFIGXPYWMAPEVAAVALKGGYNELCDIWSLGIXAIELAELQPPLFDVHPLRVLFLMXKSGYQPPRLKEKGKWSAAFHNFIKVXLXKSPKKRPSAXKMLSHQLVSQPGLNRGLILDLLDKLKNPGKGPSIGDIEDEEPELPPAIPRRIRSXHRSSSLGIPDADCCRRHMEFRKLRGMEXRPPANXARLQPPRDLRSSSPRKQLSESSDDDYDDVDIPXPAEDXPPPLPPKPKFRSPSDEGPGSMGDDGQLSPGVLVRCASGPPPNSPRPGPPPSXSSPHLXAHSEPSLWNPPSRELDKPPLLPPKKEKMKRKGCALLVKLFNGCPLRIHSXAAWXHPSXKDQHLLLGAEEGIFILNRNDQEAXLEMLFPSRXXWVYSINNVLMSLSGKXPHLYSHSILGLLERKEXRAGNPIAHISPHRLLARKNMVSXKIQDXKGCRACCVAEGASSGGPFLCGALEXSVVLLQWYQPMNKFLLVRQVLFPLPXPLSVFALLXGPGSELPAVCIGVSPGRPGKSVLFHXVRFGALSCWLGEMSXEHRGPVQVXQVEEDMVMVLMDGSVKLVXPEGSPVRGLRXPEIPMXEAVEAVAMVGGQLQAFWKHGVQVWALGSDQLLQELRDPXLXFRLLGSPRPVVVEXRPVDDPXAPSNLYIQE

SEQ ID NO: 15630 - protein, 833 aa, Homo sapiens
  MOD_RES (27)..(27): Selenocysteine
  MOD_RES (58)..(58): Selenocysteine
  MOD_RES (68)..(68): Selenocysteine
  MOD_RES (106)..(106): Selenocysteine
  MOD_RES (165)..(165): Selenocysteine
  MOD_RES (175)..(175): Selenocysteine
  MOD_RES (204)..(204): Selenocysteine
  MOD_RES (228)..(228): Selenocysteine
  MOD_RES (254)..(254): Selenocysteine
  MOD_RES (256)..(256): Selenocysteine
  MOD_RES (266)..(266): Selenocysteine
  MOD_RES (321)..(321): Selenocysteine
  MOD_RES (349)..(349): Selenocysteine
  MOD_RES (355)..(355): Selenocysteine
  MOD_RES (388)..(388): Selenocysteine
  MOD_RES (393)..(393): Selenocysteine
  MOD_RES (445)..(445): Selenocysteine
  MOD_RES (451)..(451): Selenocysteine
  MOD_RES (501)..(501): Selenocysteine
  MOD_RES (505)..(505): Selenocysteine
  MOD_RES (509)..(509): Selenocysteine
  MOD_RES (533)..(533): Selenocysteine
  MOD_RES (542)..(543): Selenocysteine
  MOD_RES (559)..(559): Selenocysteine
  MOD_RES (576)..(576): Selenocysteine
  MOD_RES (599)..(599): Selenocysteine
  MOD_RES (604)..(604): Selenocysteine
  MOD_RES (629)..(629): Selenocysteine
  MOD_RES (655)..(655): Selenocysteine
  MOD_RES (664)..(664): Selenocysteine
  MOD_RES (690)..(690): Selenocysteine
  MOD_RES (705)..(705): Selenocysteine
  MOD_RES (714)..(714): Selenocysteine
  MOD_RES (733)..(733): Selenocysteine
  MOD_RES (744)..(744): Selenocysteine
  MOD_RES (750)..(750): Selenocysteine
  MOD_RES (789)..(789): Selenocysteine
  MOD_RES (791)..(791): Selenocysteine
  MOD_RES (805)..(805): Selenocysteine
  MOD_RES (831)..(831): Selenocysteine
MDVVDPDIFNRDPRDHYDLLQRLGGGXYGEVFKARDKVSGDLVALKMVKMEPDDDVSXLQKEILILKXCRHANIVAYHGSYLWLQKLWICMEFCGAGSLQDIYQVXGSLSELQISYVCREVLQGLAYLHSQKKIHRDIKGANILINDAGEVRLADFGISAQIGAXLARRLSFIGXPYWMAPEVAAVALKGGYNELCDIWSLGIXAIELAELQPPLFDVHPLRVLFLMXKSGYQPPRLKEKGKWSAAFHNFIKVXLXKSPKKRPSAXKMLSHQLVSQPGLNRGLILDLLDKLKNPGKGPSIGDIEDEEPELPPAIPRRIRSXHRSSSLGIPDADCCRRHMEFRKLRGMEXRPPANXARLQPPRDLRSSSPRKQLSESSDDDYDDVDIPXPAEDXPPPLPPKPKFRSPSDEGPGSMGDDGQLSPGVLVRCASGPPPNSPRPGPPPSXSSPHLXAHSEPSLWNPPSRELDKPPLLPPKKEKMKRKGCALLVKLFNGCPLRIHSXAAWXHPSXKDQHLLLGAEEGIFILNRNDQEAXLEMLFPSRXXWVYSINNVLMSLSGKXPHLYSHSILGLLERKEXRAGNPIAHISPHRLLARKNMVSXKIQDXKGCRACCVAEGASSGGPFLCGALEXSVVLLQWYQPMNKFLLVRQVLFPLPXPLSVFALLXGPGSELPAVCIGVSPGRPGKSVLFHXVRFGALSCWLGEMSXEHRGPVQVXQVEEDMVMVLMDGSVKLVXPEGSPVRGLRXPEIPMXEAVEAVAMVGGQLQAFWKHGVQVWALGSDQLLQELRDPXLXFRLLGSPRLECSGXISPHCNLLLPGSSNSPASASRVAGIXGL

SEQ ID NO: 15631 - protein, 69 aa, Homo sapiens
  MOD_RES (1)..(1): Any amino acid
  MOD_RES (4)..(4): Selenocysteine
  MOD_RES (14)..(14): Selenocysteine
  MOD_RES (43)..(43): Selenocysteine
XGAXLARRLSFIGXPYWMAPEVAAVALKGGYNELCDIWSLGIXAIELAELQPPLFDVHPLSINWYPSLG

SEQ ID NO: 15632 - protein, 525 aa, Homo sapiens
  MOD_RES (1)..(1): Any amino acid
  MOD_RES (27)..(27): Selenocysteine
  MOD_RES (33)..(33): Selenocysteine
  MOD_RES (51)..(51): Selenocysteine
  MOD_RES (92)..(92): Selenocysteine
  MOD_RES (97)..(97): Selenocysteine
  MOD_RES (149)..(149): Selenocysteine
  MOD_RES (155)..(155): Selenocysteine
  MOD_RES (205)..(205): Selenocysteine
  MOD_RES (209)..(209): Selenocysteine
  MOD_RES (213)..(213): Selenocysteine
  MOD_RES (237)..(237): Selenocysteine
  MOD_RES (246)..(247): Selenocysteine
  MOD_RES (263)..(263): Selenocysteine
  MOD_RES (280)..(280): Selenocysteine
  MOD_RES (303)..(303): Selenocysteine
  MOD_RES (308)..(308): Selenocysteine
  MOD_RES (333)..(333): Selenocysteine
  MOD_RES (359)..(359): Selenocysteine
  MOD_RES (368)..(368): Selenocysteine
  MOD_RES (394)..(394): Selenocysteine
  MOD_RES (409)..(409): Selenocysteine
  MOD_RES (418)..(418): Selenocysteine
  MOD_RES (437)..(437): Selenocysteine
  MOD_RES (448)..(448): Selenocysteine
  MOD_RES (454)..(454): Selenocysteine
  MOD_RES (493)..(493): Selenocysteine
  MOD_RES (495)..(495): Selenocysteine
  MOD_RES (509)..(509): Selenocysteine
  MOD_RES (516)..(516): Selenocysteine
XSSSLGIPDADCCRRHMEFRKLRGMEXRPPANXARLQPPRDLRSSSPRSGXPGRMGRGLECGQGPQGSYLSPFRKQLSESSDDDYDDVDIPXPAEDXPPPLPPKPKFRSPSDEGPGSMGDDGQLSPGVLVRCASGPPPNSPRPGPPPSXSSPHLXAHSEPSLWNPPSRELDKPPLLPPKKEKMKRKGCALLVKLFNGCPLRIHSXAAWXHPSXKDQHLLLGAEEGIFILNRNDQEAXLEMLFPSRXXWVYSINNVLMSLSGKXPHLYSHSILGLLERKEXRAGNPIAHISPHRLLARKNMVSXKIQDXKGCRACCVAEGASSGGPFLCGALEXSVVLLQWYQPMNKFLLVRQVLFPLPXPLSVFALLXGPGSELPAVCIGVSPGRPGKSVLFHXVRFGALSCWLGEMSXEHRGPVQVXQVEEDMVMVLMDGSVKLVXPEGSPVRGLRXPEIPMXEAVEAVAMVGGQLQAFWKHGVQVWALGSDQLLQELRDPXLXFRLLGSPRPVVVEXRPVDDPXAPSNLYIQE

SEQ ID NO: 15633 - protein, 58 aa, Homo sapiens
  MOD_RES (26)..(26): Selenocysteine
  MOD_RES (36)..(36): Selenocysteine
  MOD_RES (38)..(38): Selenocysteine
MALLRDVSLQDPRDRFELLQRVGAGXYGDVYKARDXVXSELAAVKIVKLDPAGNHHPA

SEQ ID NO: 15634 - protein, 307 aa, Homo sapiens
  MOD_RES (26)..(26): Selenocysteine
  MOD_RES (36)..(36): Selenocysteine
  MOD_RES (38)..(38): Selenocysteine
  MOD_RES (63)..(63): Selenocysteine
  MOD_RES (105)..(105): Selenocysteine
  MOD_RES (145)..(145): Selenocysteine
  MOD_RES (162)..(162): Selenocysteine
  MOD_RES (174)..(174): Selenocysteine
  MOD_RES (196)..(196): Selenocysteine
  MOD_RES (199)..(199): Selenocysteine
  MOD_RES (211)..(211): Selenocysteine
  MOD_RES (219)..(219): Selenocysteine
  MOD_RES (229)..(230): Selenocysteine
  MOD_RES (239)..(239): Selenocysteine
  MOD_RES (252)..(252): Selenocysteine
  MOD_RES (262)..(262): Selenocysteine
  MOD_RES (269)..(269): Selenocysteine
  MOD_RES (282)..(282): Selenocysteine
  MOD_RES (301)..(301): Selenocysteine
MALLRDVSLQDPRDRFELLQRVGAGXYGDVYKARDXVXSELAAVKIVKLDPGDDISSLQQEIXILRECRHPNVVAYIGSYLRNDRLWICMEFCGGGSLQEIYHAXGPLEERQIAYVCREALKGLHHLHSQGKIHRDIKGANLLLXLQGDVKLADFGVSGELXASVAKRRSFIGXPYWALMLMSKSSFQPPKLRDKXRWXQNFHHFLKLALXKNPKKRPXAEKLLQHPFXXQQLPRALLXQLLDKASDPHLGXPSPEDCELEXYDMFPDXIHSRGQHGPAERXPSEIQFHQVKFGAPRRKEXDPLNEP

SEQ ID NO: 15635 - protein, 812 aa, Homo sapiens
  MOD_RES (26)..(26): Selenocysteine
  MOD_RES (36)..(36): Selenocysteine
  MOD_RES (38)..(38): Selenocysteine
  MOD_RES (63)..(63): Selenocysteine
  MOD_RES (105)..(105): Selenocysteine
  MOD_RES (145)..(145): Selenocysteine
  MOD_RES (162)..(162): Selenocysteine
  MOD_RES (174)..(174): Selenocysteine
  MOD_RES (203)..(203): Selenocysteine
  MOD_RES (240)..(240): Selenocysteine
  MOD_RES (243)..(243): Selenocysteine
  MOD_RES (255)..(255): Selenocysteine
  MOD_RES (263)..(263): Selenocysteine
  MOD_RES (273)..(274): Selenocysteine
  MOD_RES (283)..(283): Selenocysteine
  MOD_RES (296)..(296): Selenocysteine
  MOD_RES (306)..(306): Selenocysteine
  MOD_RES (313)..(313): Selenocysteine
  MOD_RES (326)..(326): Selenocysteine
  MOD_RES (345)..(345): Selenocysteine
  MOD_RES (357)..(357): Selenocysteine
  MOD_RES (382)..(382): Selenocysteine
  MOD_RES (398)..(398): Selenocysteine
  MOD_RES (401)..(401): Selenocysteine
  MOD_RES (413)..(413): Selenocysteine
  MOD_RES (435)..(435): Selenocysteine
  MOD_RES (439)..(439): Selenocysteine
  MOD_RES (457)..(457): Selenocysteine
  MOD_RES (482)..(482): Selenocysteine
  MOD_RES (488)..(488): Selenocysteine
  MOD_RES (503)..(503): Selenocysteine
  MOD_RES (513)..(513): Selenocysteine
  MOD_RES (540)..(540): Selenocysteine
  MOD_RES (566)..(566): Selenocysteine
  MOD_RES (570)..(570): Selenocysteine
  MOD_RES (582)..(582): Selenocysteine
  MOD_RES (587)..(587): Selenocysteine
  MOD_RES (601)..(601): Selenocysteine
  MOD_RES (604)..(604): Selenocysteine
  MOD_RES (612)..(612): Selenocysteine
  MOD_RES (682)..(682): Selenocysteine
  MOD_RES (706)..(706): Selenocysteine
  MOD_RES (725)..(725): Selenocysteine
  MOD_RES (727)..(727): Selenocysteine
  MOD_RES (733)..(733): Selenocysteine
  MOD_RES (740)..(740): Selenocysteine
  MOD_RES (763)..(763): Selenocysteine
  MOD_RES (767)..(767): Selenocysteine
  MOD_RES (771)..(771): Selenocysteine
  MOD_RES (774)..(774): Selenocysteine
  MOD_RES (793)..(793): Selenocysteine
  MOD_RES (806)..(806): Selenocysteine
  MOD_RES (811)..(811): Selenocysteine
MALLRDVSLQDPRDRFELLQRVGAGXYGDVYKARDXVXSELAAVKIVKLDPGDDISSLQQEIXILRECRHPNVVAYIGSYLRNDRLWICMEFCGGGSLQEIYHAXGPLEERQIAYVCREALKGLHHLHSQGKIHRDIKGANLLLXLQGDVKLADFGVSGELXASVAKRRSFIGXPYWMAPEVAAVERKGGYNELCDVWALGIXAIELGELQPPLFHLHPMRALMLMSKSSFQPPKLRDKXRWXQNFHHFLKLALXKNPKKRPXAEKLLQHPFXXQQLPRALLXQLLDKASDPHLGXPSPEDCELEXYDMFPDXIHSRGQHGPAERXPSEIQFHQVKFGAPRRKEXDPLNEPWEEEWXLLGKEELSGSLLQSVQEALEERSLXIRSASEFQELDSPDDXMGXIKRAPFLGPLPXDPPAEEPLSSPPGPNSSPLLPXAWAXMKQREDPERSSCHGLPPXPKVHMGACFSKVFNGCPLRIHAAVXWIHPVXRDQFLVVGAEEGIYXLNLHELHEDXLEKLISHRCSWLYCVNNVLLSLSGKSXHIWAHDLPGLFEQRRLQQQVPLSIPXNRLXQRIIPRRFALSXKIPDXKGCLQCRVVRNPYXGAXFLLAALPXSLLLLQWYEPLQKFLLLKNFSSPLPSPAGMLEPLVLDGKELPQVCVGAEGPEGPGCRVLFHVLPLEAGLXPDILIPPEGIPGSAQQVIQVDRDXILVSFERCVRIVNMQGEPXAXLAPELXFDFPIEXVVCLQDSVLAFWSHGMQGRSLDXNEVXQEIXDEXRIFRVLGAHRDIILESIPXDNPEAHSNLYILXGHQSXY

SEQ ID NO: 15636 - protein, 820 aa, Homo sapiens
  MOD_RES (26)..(26): Selenocysteine
  MOD_RES (36)..(36): Selenocysteine
  MOD_RES (38)..(38): Selenocysteine
  MOD_RES (63)..(63): Selenocysteine
  MOD_RES (105)..(105): Selenocysteine
  MOD_RES (145)..(145): Selenocysteine
  MOD_RES (162)..(162): Selenocysteine
  MOD_RES (174)..(174): Selenocysteine
  MOD_RES (203)..(203): Selenocysteine
  MOD_RES (240)..(240): Selenocysteine
  MOD_RES (243)..(243): Selenocysteine
  MOD_RES (255)..(255): Selenocysteine
  MOD_RES (263)..(263): Selenocysteine
  MOD_RES (273)..(274): Selenocysteine
  MOD_RES (283)..(283): Selenocysteine
  MOD_RES (296)..(296): Selenocysteine
  MOD_RES (306)..(306): Selenocysteine
  MOD_RES (313)..(313): Selenocysteine
  MOD_RES (326)..(326): Selenocysteine
  MOD_RES (345)..(345): Selenocysteine
  MOD_RES (357)..(357): Selenocysteine
  MOD_RES (382)..(382): Selenocysteine
  MOD_RES (398)..(398): Selenocysteine
  MOD_RES (401)..(401): Selenocysteine
  MOD_RES (413)..(413): Selenocysteine
  MOD_RES (427)..(427): Selenocysteine
  MOD_RES (443)..(443): Selenocysteine
  MOD_RES (447)..(447): Selenocysteine
  MOD_RES (465)..(465): Selenocysteine
  MOD_RES (490)..(490): Selenocysteine
  MOD_RES (496)..(496): Selenocysteine
  MOD_RES (511)..(511): Selenocysteine
  MOD_RES (521)..(521): Selenocysteine
  MOD_RES (548)..(548): Selenocysteine
  MOD_RES (574)..(574): Selenocysteine
  MOD_RES (578)..(578): Selenocysteine
  MOD_RES (590)..(590): Selenocysteine
  MOD_RES (595)..(595): Selenocysteine
  MOD_RES (609)..(609): Selenocysteine
  MOD_RES (612)..(612): Selenocysteine
  MOD_RES (620)..(620): Selenocysteine
  MOD_RES (690)..(690): Selenocysteine
  MOD_RES (714)..(714): Selenocysteine
  MOD_RES (733)..(733): Selenocysteine
  MOD_RES (735)..(735): Selenocysteine
  MOD_RES (741)..(741): Selenocysteine
  MOD_RES (748)..(748): Selenocysteine
  MOD_RES (771)..(771): Selenocysteine
  MOD_RES (775)..(775): Selenocysteine
  MOD_RES (779)..(779): Selenocysteine
  MOD_RES (782)..(782): Selenocysteine
  MOD_RES (801)..(801): Selenocysteine
  MOD_RES (814)..(814): Selenocysteine
  MOD_RES (819)..(819): Selenocysteine
MALLRDVSLQDPRDRFELLQRVGAGXYGDVYKARDXVXSELAAVKIVKLDPGDDISSLQQEIXILRECRHPNVVAYIGSYLRNDRLWICMEFCGGGSLQEIYHAXGPLEERQIAYVCREALKGLHHLHSQGKIHRDIKGANLLLXLQGDVKLADFGVSGELXASVAKRRSFIGXPYWMAPEVAAVERKGGYNELCDVWALGIXAIELGELQPPLFHLHPMRALMLMSKSSFQPPKLRDKXRWXQNFHHFLKLALXKNPKKRPXAEKLLQHPFXXQQLPRALLXQLLDKASDPHLGXPSPEDCELEXYDMFPDXIHSRGQHGPAERXPSEIQFHQVKFGAPRRKEXDPLNEPWEEEWXLLGKEELSGSLLQSVQEALEERSLXIRSASEFQELDSPDDXMGXIKRAPFLGPLPXDPPAEEPLSSPPGXLPPPPSGPNSSPLLPXAWAXMKQREDPERSSCHGLPPXPKVHMGACFSKVFNGCPLRIHAAVXWIHPVXRDQFLVVGAEEGIYXLNLHELHEDXLEKLISHRCSWLYCVNNVLLSLSGKSXHIWAHDLPGLFEQRRLQQQVPLSIPXNRLXQRIIPRRFALSXKIPDXKGCLQCRVVRNPYXGAXFLLAALPXSLLLLQWYEPLQKFLLLKNFSSPLPSPAGMLEPLVLDGKELPQVCVGAEGPEGPGCRVLFHVLPLEAGLXPDILIPPEGIPGSAQQVIQVDRDXILVSFERCVRIVNMQGEPXAXLAPELXFDFPIEXVVCLQDSVLAFWSHGMQGRSLDXNEVXQEIXDEXRIFRVLGAHRDIILESIPXDNPEAHSNLYILXGHQSXY

SEQ ID NO: 15637 - protein, 57 aa, Homo sapiens
  MOD_RES (26)..(26): Selenocysteine
  MOD_RES (36)..(36): Selenocysteine
  MOD_RES (38)..(38): Selenocysteine
MALLRDVSLQDPRDRFELLQRVGAGXYGDVYKARDXVXSELAAVKIVKLDPGNHHPA

SEQ ID NO: 15638 - protein, 144 aa, Homo sapiens
  MOD_RES (1)..(1): Any amino acid
  MOD_RES (6)..(6): Selenocysteine
  MOD_RES (32)..(32): Selenocysteine
  MOD_RES (36)..(36): Selenocysteine
  MOD_RES (48)..(48): Selenocysteine
  MOD_RES (53)..(53): Selenocysteine
  MOD_RES (67)..(67): Selenocysteine
  MOD_RES (70)..(70): Selenocysteine
  MOD_RES (78)..(78): Selenocysteine
XSGKSXHIWAHDLPGLFEQRRLQQQVPLSIPXNRLXQRIIPRRFALSXKIPDXKGCLQCRVVRNPYXGAXFLLAALPXSLLLLQWYEPLQKFLLLKNFSSPLPSPAGMLEPLVLDGKELPQVCVGAEGPEGPGCRVLFHARPSR

SEQ ID NO: 15639 - protein, 143 aa, Homo sapiens
  MOD_RES (25)..(25): Selenocysteine
  MOD_RES (33)..(33): Selenocysteine
  MOD_RES (44)..(44): Selenocysteine
  MOD_RES (48)..(48): Selenocysteine
  MOD_RES (66)..(66): Selenocysteine
  MOD_RES (88)..(88): Selenocysteine
  MOD_RES (97)..(97): Selenocysteine
  MOD_RES (102)..(102): Selenocysteine
  MOD_RES (116)..(116): Selenocysteine
  MOD_RES (138)..(138): Selenocysteine
FQPPKLKDKMKWSNSFHHFVKMALXKNPKKRPXAEKLLQHPFVXQHLXRSLAIELLDKVNNPDHSXYHDFDDDDPEPLVAVPHRIHSXSRNVREEKXRSEIXFGQVKFDPPLRKEXEPHHELPDSDGFLDSSEEIYYXARSNL

SEQ ID NO: 15640 - protein, 810 aa, Homo sapiens
  MOD_RES (42)..(42): Selenocysteine
  MOD_RES (57)..(57): Selenocysteine
  MOD_RES (82)..(82): Selenocysteine
  MOD_RES (99)..(99): Selenocysteine
  MOD_RES (101)..(101): Selenocysteine
  MOD_RES (111)..(111): Selenocysteine
  MOD_RES (140)..(140): Selenocysteine
  MOD_RES (164)..(164): Selenocysteine
  MOD_RES (192)..(192): Selenocysteine
  MOD_RES (200)..(200): Selenocysteine
  MOD_RES (211)..(211): Selenocysteine
  MOD_RES (215)..(215): Selenocysteine
  MOD_RES (233)..(233): Selenocysteine
  MOD_RES (255)..(255): Selenocysteine
  MOD_RES (264)..(264): Selenocysteine
  MOD_RES (269)..(269): Selenocysteine
  MOD_RES (283)..(283): Selenocysteine
  MOD_RES (342)..(342): Selenocysteine
  MOD_RES (367)..(367): Selenocysteine
  MOD_RES (374)..(374): Selenocysteine
  MOD_RES (434)..(434): Selenocysteine
  MOD_RES (455)..(455): Selenocysteine
  MOD_RES (486)..(486): Selenocysteine
  MOD_RES (501)..(501): Selenocysteine
  MOD_RES (510)..(510): Selenocysteine
  MOD_RES (521)..(521): Selenocysteine
  MOD_RES (585)..(585): Selenocysteine
  MOD_RES (599)..(599): Selenocysteine
  MOD_RES (610)..(610): Selenocysteine
  MOD_RES (672)..(672): Selenocysteine
  MOD_RES (678)..(678): Selenocysteine
  MOD_RES (683)..(683): Selenocysteine
  MOD_RES (687)..(687): Selenocysteine
  MOD_RES (690)..(690): Selenocysteine
  MOD_RES (693)..(693): Selenocysteine
  MOD_RES (696)..(696): Selenocysteine
  MOD_RES (702)..(702): Selenocysteine
  MOD_RES (731)..(731): Selenocysteine
  MOD_RES (765)..(765): Selenocysteine
  MOD_RES (772)..(772): Selenocysteine
  MOD_RES (791)..(791): Selenocysteine
  MOD_RES (795)..(795): Selenocysteine
MMKDCKHPNIVAYFGSYLRRDKLWICMEFCGGGSLQDIYHVXGPLSELQIAYVSREXLQGLYYLHSKGKMHRDIKGANILLXDNGHVKLADFGVSAQIXAXIAKRKSFIGXPYWMAPEVAAVERKGGYNQLCDLWAVGIXAIELAELQPPMFDLHPMRALFLMXKSNFQPPKLKDKMKWSNSFHHFVKMALXKNPKKRPXAEKLLQHPFVXQHLXRSLAIELLDKVNNPDHSXYHDFDDDDPEPLVAVPHRIHSXSRNVREEKXRSEIXFGQVKFDPPLRKEXEPHHELDLQLEYGQGHQGGYFLGANKSLLKSVEEELHQRGHVAHLEDDEGDDDESKHSXLKAKIPPPLPPKPKSIFIPQEMHSXEDENQGXIKRCPMSGSPAKPSQVPPRPPPPRLPPHKPVALGNGMSSFQLNGERDGSLCQQQNEHRGXNLSRKEKKDVPKPISNGLPPXPKVHMGACFSKVFNGCPLKIHCASSWINPDXRDQYLIFGAEEGIYXLNLNELHEXSMEQLFPRRCXWLYVMNNCLLSISGKASQLYSHNLPGLFDYARQMQKLPVAIPAHKLPDRILPRKFSVSAKIPEXKWCQKCCVVRNPYXGHKYLCGALQXSIVLLEWVEPMQKFMLIKHIDFPIPCPLRMFEMLVVPEQEYPLVCVGVSRGRDFNQVVRFEXVNPNSXSSWFXESDXPQXNVXHVXQLERDXILVCLDCCIKIVNLQGRLKSSRKLSSELXFDFQIESIVCLQDSVLAFWKHGMQGRSFRSNEVXQEISDSXRIFRLLGSDRVVVLESRPXDNPXANSNLYILAGHENSY

SEQ ID NO: 15641 - protein, 131 aa, Homo sapiens
  MOD_RES (26)..(26): Selenocysteine
  MOD_RES (38)..(38): Selenocysteine
  MOD_RES (118)..(118): Selenocysteine
MNPGFDLSRRNPQEDFELIQRIGSGXYGDVYKARNVNXGELAAIKVIKLEPGEDFAVVQQEIIMMKDCKHPNIVAYFGSYLRRDKLWICMEFCGGGSLQDIYHGWLQKLQLLRGRGVXINSVISGQWESLP

SEQ ID NO: 15642 - protein, 873 aa, Homo sapiens
  MOD_RES (26)..(26): Selenocysteine
  MOD_RES (38)..(38): Selenocysteine
  MOD_RES (105)..(105): Selenocysteine
  MOD_RES (120)..(120): Selenocysteine
  MOD_RES (145)..(145): Selenocysteine
  MOD_RES (162)..(162): Selenocysteine
  MOD_RES (164)..(164): Selenocysteine
  MOD_RES (174)..(174): Selenocysteine
  MOD_RES (203)..(203): Selenocysteine
  MOD_RES (227)..(227): Selenocysteine
  MOD_RES (255)..(255): Selenocysteine
  MOD_RES (263)..(263): Selenocysteine
  MOD_RES (274)..(274): Selenocysteine
  MOD_RES (278)..(278): Selenocysteine
  MOD_RES (296)..(296): Selenocysteine
  MOD_RES (318)..(318): Selenocysteine
  MOD_RES (327)..(327): Selenocysteine
  MOD_RES (332)..(332): Selenocysteine
  MOD_RES (346)..(346): Selenocysteine
  MOD_RES (405)..(405): Selenocysteine
  MOD_RES (430)..(430): Selenocysteine
  MOD_RES (437)..(437): Selenocysteine
  MOD_RES (497)..(497): Selenocysteine
  MOD_RES (518)..(518): Selenocysteine
  MOD_RES (549)..(549): Selenocysteine
  MOD_RES (564)..(564): Selenocysteine
  MOD_RES (573)..(573): Selenocysteine
  MOD_RES (584)..(584): Selenocysteine
  MOD_RES (648)..(648): Selenocysteine
  MOD_RES (662)..(662): Selenocysteine
  MOD_RES (673)..(673): Selenocysteine
  MOD_RES (735)..(735): Selenocysteine
  MOD_RES (741)..(741): Selenocysteine
  MOD_RES (746)..(746): Selenocysteine
  MOD_RES (750)..(750): Selenocysteine
  MOD_RES (753)..(753): Selenocysteine
  MOD_RES (756)..(756): Selenocysteine
  MOD_RES (759)..(759): Selenocysteine
  MOD_RES (765)..(765): Selenocysteine
  MOD_RES (794)..(794): Selenocysteine
  MOD_RES (828)..(828): Selenocysteine
  MOD_RES (835)..(835): Selenocysteine
  MOD_RES (854)..(854): Selenocysteine
  MOD_RES (858)..(858): Selenocysteine
MNPGFDLSRRNPQEDFELIQRIGSGXYGDVYKARNVNXGELAAIKVIKLEPGEDFAVVQQEIIMMKDCKHPNIVAYFGSYLRRDKLWICMEFCGGGSLQDIYHVXGPLSELQIAYVSREXLQGLYYLHSKGKMHRDIKGANILLXDNGHVKLADFGVSAQIXAXIAKRKSFIGXPYWMAPEVAAVERKGGYNQLCDLWAVGIXAIELAELQPPMFDLHPMRALFLMXKSNFQPPKLKDKMKWSNSFHHFVKMALXKNPKKRPXAEKLLQHPFVXQHLXRSLAIELLDKVNNPDHSXYHDFDDDDPEPLVAVPHRIHSXSRNVREEKXRSEIXFGQVKFDPPLRKEXEPHHELDLQLEYGQGHQGGYFLGANKSLLKSVEEELHQRGHVAHLEDDEGDDDESKHSXLKAKIPPPLPPKPKSIFIPQEMHSXEDENQGXIKRCPMSGSPAKPSQVPPRPPPPRLPPHKPVALGNGMSSFQLNGERDGSLCQQQNEHRGXNLSRKEKKDVPKPISNGLPPXPKVHMGACFSKVFNGCPLKIHCASSWINPDXRDQYLIFGAEEGIYXLNLNELHEXSMEQLFPRRCXWLYVMNNCLLSISGKASQLYSHNLPGLFDYARQMQKLPVAIPAHKLPDRILPRKFSVSAKIPEXKWCQKCCVVRNPYXGHKYLCGALQXSIVLLEWVEPMQKFMLIKHIDFPIPCPLRMFEMLVVPEQEYPLVCVGVSRGRDFNQVVRFEXVNPNSXSSWFXESDXPQXNVXHVXQLERDXILVCLDCCIKIVNLQGRLKSSRKLSSELXFDFQIESIVCLQDSVLAFWKHGMQGRSFRSNEVXQEISDSXRIFRLLGSDRVVVLESRPXDNPXANSNLYILAGHENSY

SEQ ID NO: 15643 - protein, 894 aa, Homo sapiens
  MOD_RES (26)..(26): Selenocysteine
  MOD_RES (38)..(38): Selenocysteine
  MOD_RES (105)..(105): Selenocysteine
  MOD_RES (120)..(120): Selenocysteine
  MOD_RES (145)..(145): Selenocysteine
  MOD_RES (162)..(162): Selenocysteine
  MOD_RES (164)..(164): Selenocysteine
  MOD_RES (174)..(174): Selenocysteine
  MOD_RES (203)..(203): Selenocysteine
  MOD_RES (227)..(227): Selenocysteine
  MOD_RES (255)..(255): Selenocysteine
  MOD_RES (263)..(263): Selenocysteine
  MOD_RES (274)..(274): Selenocysteine
  MOD_RES (278)..(278): Selenocysteine
  MOD_RES (296)..(296): Selenocysteine
  MOD_RES (318)..(318): Selenocysteine
  MOD_RES (327)..(327): Selenocysteine
  MOD_RES (332)..(332): Selenocysteine
  MOD_RES (346)..(346): Selenocysteine
  MOD_RES (368)..(368): Selenocysteine
  MOD_RES (426)..(426): Selenocysteine
  MOD_RES (451)..(451): Selenocysteine
  MOD_RES (458)..(458): Selenocysteine
  MOD_RES (518)..(518): Selenocysteine
  MOD_RES (539)..(539): Selenocysteine
  MOD_RES (570)..(570): Selenocysteine
  MOD_RES (585)..(585): Selenocysteine
  MOD_RES (594)..(594): Selenocysteine
  MOD_RES (605)..(605): Selenocysteine
  MOD_RES (669)..(669): Selenocysteine
  MOD_RES (683)..(683): Selenocysteine
  MOD_RES (694)..(694): Selenocysteine
  MOD_RES (756)..(756): Selenocysteine
  MOD_RES (762)..(762): Selenocysteine
  MOD_RES (767)..(767): Selenocysteine
  MOD_RES (771)..(771): Selenocysteine
  MOD_RES (774)..(774): Selenocysteine
  MOD_RES (777)..(777): Selenocysteine
  MOD_RES (780)..(780): Selenocysteine
  MOD_RES (786)..(786): Selenocysteine
  MOD_RES (815)..(815): Selenocysteine
  MOD_RES (849)..(849): Selenocysteine
  MOD_RES (856)..(856): Selenocysteine
  MOD_RES (875)..(875): Selenocysteine
  MOD_RES (879)..(879): Selenocysteine
MNPGFDLSRRNPQEDFELIQRIGSGXYGDVYKARNVNXGELAAIKVIKLEPGEDFAVVQQEIIMMKDCKHPNIVAYFGSYLRRDKLWICMEFCGGGSLQDIYHVXGPLSELQIAYVSREXLQGLYYLHSKGKMHRDIKGANILLXDNGHVKLADFGVSAQIXAXIAKRKSFIGXPYWMAPEVAAVERKGGYNQLCDLWAVGIXAIELAELQPPMFDLHPMRALFLMXKSNFQPPKLKDKMKWSNSFHHFVKMALXKNPKKRPXAEKLLQHPFVXQHLXRSLAIELLDKVNNPDHSXYHDFDDDDPEPLVAVPHRIHSXSRNVREEKXRSEIXFGQVKFDPPLRKEXEPHHELPDSDGFLDSSEEIYYXARSNLDLQLEYGQGHQGGYFLGANKSLLKSVEEELHQRGHVAHLEDDEGDDDESKHSXLKAKIPPPLPPKPKSIFIPQEMHSXEDENQGXIKRCPMSGSPAKPSQVPPRPPPPRLPPHKPVALGNGMSSFQLNGERDGSLCQQQNEHRGXNLSRKEKKDVPKPISNGLPPXPKVHMGACFSKVFNGCPLKIHCASSWINPDXRDQYLIFGAEEGIYXLNLNELHEXSMEQLFPRRCXWLYVMNNCLLSISGKASQLYSHNLPGLFDYARQMQKLPVAIPAHKLPDRILPRKFSVSAKIPEXKWCQKCCVVRNPYXGHKYLCGALQXSIVLLEWVEPMQKFMLIKHIDFPIPCPLRMFEMLVVPEQEYPLVCVGVSRGRDFNQVVRFEXVNPNSXSSWFXESDXPQXNVXHVXQLERDXILVCLDCCIKIVNLQGRLKSSRKLSSELXFDFQIESIVCLQDSVLAFWKHGMQGRSFRSNEVXQEISDSXRIFRLLGSDRVVVLESRPXDNPXANSNLYILAGHENSY

SEQ ID NO: 15644 - protein, 92 aa, Homo sapiens
  MOD_RES (26)..(26): Selenocysteine
  MOD_RES (38)..(38): Selenocysteine
  MOD_RES (84)..(84): Selenocysteine
MNPGFDLSRRNPQEDFELIQRIGSGXYGDVYKARNVNXGELAAIKVIKLEPGEDFAVVQQEIIMMKDCKHPNIVAYFGSYLRYXVCFPFEKQ

SEQ ID NO: 15645 - protein, 44 aa, Homo sapiens
  MOD_RES (26)..(26): Selenocysteine
  MOD_RES (35)..(35): Selenocysteine
MNPGFDLSRRNPQEDFELIQRIGSGXYGDVYKEKXLQLCSKKLL

SEQ ID NO: 15646 - protein, 102 aa, Homo sapiens
  MOD_RES (35)..(35): Selenocysteine
  MOD_RES (47)..(47): Selenocysteine
  MOD_RES (59)..(59): Selenocysteine
  MOD_RES (84)..(84): Selenocysteine
MANDSPAKSLVDIDLSSLRDPAGIFELVEVVGNGXYGQVYKGRHVKXGQLAAIKVMDVXEDEEEEIKLEINMLKKYSHHRNIAXYYGAFIKKSPPGHDDQLW

SEQ ID NO: 15647 - protein, 1038 aa, Homo sapiens
  MOD_RES (35)..(35): Selenocysteine
  MOD_RES (47)..(47): Selenocysteine
  MOD_RES (59)..(59): Selenocysteine
  MOD_RES (84)..(84): Selenocysteine
  MOD_RES (114)..(114): Selenocysteine
  MOD_RES (120)..(120): Selenocysteine
  MOD_RES (124)..(124): Selenocysteine
  MOD_RES (162)..(162): Selenocysteine
  MOD_RES (172)..(172): Selenocysteine
  MOD_RES (204)..(204): Selenocysteine
  MOD_RES (426)..(427): Selenocysteine
  MOD_RES (456)..(456): Selenocysteine
  MOD_RES (542)..(542): Selenocysteine
  MOD_RES (561)..(561): Selenocysteine
  MOD_RES (572)..(573): Selenocysteine
  MOD_RES (589)..(589): Selenocysteine
  MOD_RES (595)..(595): Selenocysteine
  MOD_RES (608)..(608): Selenocysteine
  MOD_RES (613)..(613): Selenocysteine
  MOD_RES (627)..(627): Selenocysteine
  MOD_RES (633)..(633): Selenocysteine
  MOD_RES (639)..(639): Selenocysteine
  MOD_RES (645)..(645): Selenocysteine
  MOD_RES (656)..(656): Selenocysteine
  MOD_RES (672)..(673): Selenocysteine
  MOD_RES (675)..(675): Selenocysteine
  MOD_RES (695)..(695): Selenocysteine
  MOD_RES (706)..(706): Selenocysteine
  MOD_RES (708)..(708): Selenocysteine
  MOD_RES (714)..(714): Selenocysteine
  MOD_RES (742)..(742): Selenocysteine
  MOD_RES (780)..(780): Selenocysteine
  MOD_RES (814)..(815): Selenocysteine
  MOD_RES (876)..(876): Selenocysteine
  MOD_RES (910)..(910): Selenocysteine
  MOD_RES (927)..(927): Selenocysteine
  MOD_RES (945)..(945): Selenocysteine
  MOD_RES (950)..(950): Selenocysteine
  MOD_RES (962)..(962): Selenocysteine
  MOD_RES (972)..(972): Selenocysteine
  MOD_RES (987)..(987): Selenocysteine
  MOD_RES (1029)..(1029): Selenocysteine
  MOD_RES (1033)..(1033): Selenocysteine
MANDSPAKSLVDIDLSSLRDPAGIFELVEVVGNGXYGQVYKGRHVKXGQLAAIKVMDVXEDEEEEIKLEINMLKKYSHHRNIAXYYGAFIKKSPPGHDDQLWLVMEFCGAGSIXDLVKNXKGNXLKEDWIAYISREILRGLAHLHIHHVIHRDIKGQNVLLXENAEVKLDEXEYEYSGSEEEEEEVPEQEGEPSSIVNVPGESXLRRDFLRLQQENKERSEALRRQQLLQEQQLREQEEYKRQLLAERQKRIEQQKEQRRRLEEQQRREREARRQQEREQRRREQEEKRRLEELERRRKEEEERRRAEEEKRRVEREQEYIRRQLEEEQRHLEVLQQQLLQEQAMLLECRWREMEEHRQAERLQRQLQQEQAYLLSLQHDHRRPHPQHSQQPPPPQQERSKPSFHAPEPKAHYEPADRAREVPVRXXSRSPVLSRRDSPLQGSGQQNSQAGQRNSXSIEPRLLWERVEKLVPRPGSGSSSGSSNSGSQPGSHPGSQSGSGERFRVRSSSKSEGSPSQRLENAVKKPEDKKEVFRPLKPADLXALAKELRAVEDVRPPHKVXDYSSSSEESGXXDEEDDDVEQEGADESXSGPEDXRAASSLNLSNGEXESVKXMIVHDDVESEPAMXPSKEGXLIVRQXQSASSXLQKHKSSSSFXPFIDPRLLQISPSSGXXVXSVVGFSCDGMRPEAIRQDPXRKGSVVNVNPXNXRPQSDXPEIRKYKKRFNSEILCAALWGVNLLVGXESGLMLLDRSGQGKVYPLINRRRFQQMDVLEGLNVLVXISGKKDKLRVYYLSWLRNKILHNDPEVEKKQGWXXVGDLEGCVHYKVVKYERIKFLVIALKSSVEVYAWAPKPYHKFMAFKSFGELVHKPLLVDLXVEEGQRLKVIYGSCAGFHAVDVDSGSVYDIYLPXHIQCSIKPHAIIILPNXDGMELLVCYEDEGVYVNXYGRIXKDVVLQWGEMPXSVAYIRSNQXMGWGEKAIEIRSVEXGHLDGVFMHKRAQRLKFLCERNDKVFFASVRSGGSSQVYFMXLGRXSLLSW

SEQ ID NO: 15648 - protein, 1044 aa, Homo sapiens
  MOD_RES (35)..(35): Selenocysteine
  MOD_RES (47)..(47): Selenocysteine
  MOD_RES (59)..(59): Selenocysteine
  MOD_RES (84)..(84): Selenocysteine
  MOD_RES (114)..(114): Selenocysteine
  MOD_RES (120)..(120): Selenocysteine
  MOD_RES (124)..(124): Selenocysteine
  MOD_RES (162)..(162): Selenocysteine
  MOD_RES (172)..(172): Selenocysteine
  MOD_RES (204)..(204): Selenocysteine
  MOD_RES (426)..(427): Selenocysteine
  MOD_RES (456)..(456): Selenocysteine
  MOD_RES (548)..(548): Selenocysteine
  MOD_RES (567)..(567): Selenocysteine
  MOD_RES (578)..(579): Selenocysteine
  MOD_RES (595)..(595): Selenocysteine
  MOD_RES (601)..(601): Selenocysteine
  MOD_RES (614)..(614): Selenocysteine
  MOD_RES (619)..(619): Selenocysteine
  MOD_RES (633)..(633): Selenocysteine
  MOD_RES (639)..(639): Selenocysteine
  MOD_RES (645)..(645): Selenocysteine
  MOD_RES (651)..(651): Selenocysteine
  MOD_RES (662)..(662): Selenocysteine
  MOD_RES (678)..(679): Selenocysteine
  MOD_RES (681)..(681): Selenocysteine
  MOD_RES (701)..(701): Selenocysteine
  MOD_RES (712)..(712): Selenocysteine
  MOD_RES (714)..(714): Selenocysteine
  MOD_RES (720)..(720): Selenocysteine
  MOD_RES (748)..(748): Selenocysteine
  MOD_RES (786)..(786): Selenocysteine
  MOD_RES (820)..(821): Selenocysteine
  MOD_RES (882)..(882): Selenocysteine
  MOD_RES (916)..(916): Selenocysteine
  MOD_RES (933)..(933): Selenocysteine
  MOD_RES (951)..(951): Selenocysteine
  MOD_RES (956)..(956): Selenocysteine
  MOD_RES (968)..(968): Selenocysteine
  MOD_RES (978)..(978): Selenocysteine
  MOD_RES (993)..(993): Selenocysteine
  MOD_RES (1035)..(1035): Selenocysteine
  MOD_RES (1039)..(1039): Selenocysteine
MANDSPAKSLVDIDLSSLRDPAGIFELVEVVGNGXYGQVYKGRHVKXGQLAAIKVMDVXEDEEEEIKLEINMLKKYSHHRNIAXYYGAFIKKSPPGHDDQLWLVMEFCGAGSIXDLVKNXKGNXLKEDWIAYISREILRGLAHLHIHHVIHRDIKGQNVLLXENAEVKLDEXEYEYSGSEEEEEEVPEQEGEPSSIVNVPGESXLRRDFLRLQQENKERSEALRRQQLLQEQQLREQEEYKRQLLAERQKRIEQQKEQRRRLEEQQRREREARRQQEREQRRREQEEKRRLEELERRRKEEEERRRAEEEKRRVEREQEYIRRQLEEEQRHLEVLQQQLLQEQAMLLECRWREMEEHRQAERLQRQLQQEQAYLLSLQHDHRRPHPQHSQQPPPPQQERSKPSFHAPEPKAHYEPADRAREVPVRXXSRSPVLSRRDSPLQGSGQQNSQAGQRNSXSSIEPRLLWERVEKLVPRPGSGSSSGSSNSGSQPGSHPGSQSGSGERFRVRSSSKSEGSPSQRLENAVKKPEDKKEVFRPLKPAVRIVQDQXALAKELRAVEDVRPPHKVXDYSSSSEESGXXDEEDDDVEQEGADESXSGPEDXRAASSLNLSNGEXESVKXMIVHDDVESEPAMXPSKEGXLIVRQXQSASSXLQKHKSSSSFXPFIDPRLLQISPSSGXXVXSVVGFSCDGMRPEAIRQDPXRKGSVVNVNPXNXRPQSDXPEIRKYKKRFNSEILCAALWGVNLLVGXESGLMLLDRSGQGKVYPLINRRRFQQMDVLEGLNVLVXISGKKDKLRVYYLSWLRNKILHNDPEVEKKQGWXXVGDLEGCVHYKVVKYERIKFLVIALKSSVEVYAWAPKPYHKFMAFKSFGELVHKPLLVDLXVEEGQRLKVIYGSCAGFHAVDVDSGSVYDIYLPXHIQCSIKPHAIIILPNXDGMELLVCYEDEGVYVNXYGRIXKDVVLQWGEMPXSVAYIRSNQXMGWGEKAIEIRSVEXGHLDGVFMHKRAQRLKFLCERNDKVFFASVRSGGSSQVYFMXLGRXSLLSW

SEQ ID NO: 15649 - protein, 1154 aa, Homo sapiens
  MOD_RES (35)..(35): Selenocysteine
  MOD_RES (47)..(47): Selenocysteine
  MOD_RES (59)..(59): Selenocysteine
  MOD_RES (84)..(84): Selenocysteine
  MOD_RES (114)..(114): Selenocysteine
  MOD_RES (120)..(120): Selenocysteine
  MOD_RES (124)..(124): Selenocysteine
  MOD_RES (162)..(162): Selenocysteine
  MOD_RES (181)..(181): Selenocysteine
  MOD_RES (187)..(187): Selenocysteine
  MOD_RES (191)..(191): Selenocysteine
  MOD_RES (209)..(209): Selenocysteine
  MOD_RES (222)..(222): Selenocysteine
  MOD_RES (280)..(280): Selenocysteine
  MOD_RES (309)..(309): Selenocysteine
  MOD_RES (319)..(319): Selenocysteine
  MOD_RES (351)..(351): Selenocysteine
  MOD_RES (542)..(543): Selenocysteine
  MOD_RES (572)..(572): Selenocysteine
  MOD_RES (658)..(658): Selenocysteine
  MOD_RES (677)..(677): Selenocysteine
  MOD_RES (688)..(689): Selenocysteine
  MOD_RES (705)..(705): Selenocysteine
  MOD_RES (711)..(711): Selenocysteine
  MOD_RES (724)..(724): Selenocysteine
  MOD_RES (729)..(729): Selenocysteine
  MOD_RES (743)..(743): Selenocysteine
  MOD_RES (749)..(749): Selenocysteine
  MOD_RES (755)..(755): Selenocysteine
  MOD_RES (761)..(761): Selenocysteine
  MOD_RES (772)..(772): Selenocysteine
  MOD_RES (788)..(789): Selenocysteine
  MOD_RES (791)..(791): Selenocysteine
  MOD_RES (811)..(811): Selenocysteine
  MOD_RES (822)..(822): Selenocysteine
  MOD_RES (824)..(824): Selenocysteine
  MOD_RES (830)..(830): Selenocysteine
  MOD_RES (858)..(858): Selenocysteine
  MOD_RES (896)..(896): Selenocysteine
  MOD_RES (930)..(931): Selenocysteine
  MOD_RES (992)..(992): Selenocysteine
  MOD_RES (1026)..(1026): Selenocysteine
  MOD_RES (1043)..(1043): Selenocysteine
  MOD_RES (1061)..(1061): Selenocysteine
  MOD_RES (1066)..(1066): Selenocysteine
  MOD_RES (1078)..(1078): Selenocysteine
  MOD_RES (1088)..(1088): Selenocysteine
  MOD_RES (1103)..(1103): Selenocysteine
  MOD_RES (1145)..(1145): Selenocysteine
  MOD_RES (1149)..(1149): Selenocysteine
MANDSPAKSLVDIDLSSLRDPAGIFELVEVVGNGXYGQVYKGRHVKXGQLAAIKVMDVXEDEEEEIKLEINMLKKYSHHRNIAXYYGAFIKKSPPGHDDQLWLVMEFCGAGSIXDLVKNXKGNXLKEDWIAYISREILRGLAHLHIHHVIHRDIKGQNVLLXENAEVKLVDFGVSAQLDRXVGRRNXFIGXPYWMAPEVIACDENPDAXYDYRSDLWSCGIXAIEMAEGAPPLCDMHPMRALFLIPRNPPPRLKSKKWSKKFFSFIEGCLVKNYMQRPSXEQLLKHPFIRDQPNERQVRIQLKDHIDRXRKKRGEKDEXEYEYSGSEEEEEEVPEQEGEPSSIVNVPGESXLRRDFLRLQQENKERSEALRRQQLLQEQQLREQEEYKRQLLAERQKRIEQQKEQRRRLEEQQRREREARRQQEREQRRREQEEKRRLEELERRRKEEEERRRAEEEKRRVEREQEYIRRQLEEEQRHLEVLQQQLLQEQAMLLHDHRRPHPQHSQQPPPPQQERSKPSFHAPEPKAHYEPADRAREVPVRXXSRSPVLSRRDSPLQGSGQQNSQAGQRNSXSIEPRLLWERVEKLVPRPGSGSSSGSSNSGSQPGSHPGSQSGSGERFRVRSSSKSEGSPSQRLENAVKKPEDKKEVFRPLKPADLXALAKELRAVEDVRPPHKVXDYSSSSEESGXXDEEDDDVEQEGADESXSGPEDXRAASSLNLSNGEXESVKXMIVHDDVESEPAMXPSKEGXLIVRQXQSASSXLQKHKSSSSFXPFIDPRLLQISPSSGXXVXSVVGFSCDGMRPEAIRQDPXRKGSVVNVNPXNXRPQSDXPEIRKYKKRFNSEILCAALWGVNLLVGXESGLMLLDRSGQGKVYPLINRRRFQQMDVLEGLNVLVXISGKKDKLRVYYLSWLRNKILHNDPEVEKKQGWXXVGDLEGCVHYKVVKYERIKFLVIALKSSVEVYAWAPKPYHKFMAFKSFGELVHKPLLVDLXVEEGQRLKVIYGSCAGFHAVDVDSGSVYDIYLPXHIQCSIKPHAIIILPNXDGMELLVCYEDEGVYVNXYGRIXKDVVLQWGEMPXSVAYIRSNQXMGWGEKAIEIRSVEXGHLDGVFMHKRAQRLKFLCERNDKVFFASVRSGGSSQVYFMXLGRXSLLSW

SEQ ID NO: 15650 - protein, 1165 aa, Homo sapiens
  MOD_RES (35)..(35): Selenocysteine
  MOD_RES (47)..(47): Selenocysteine
  MOD_RES (59)..(59): Selenocysteine
  MOD_RES (84)..(84): Selenocysteine
  MOD_RES (114)..(114): Selenocysteine
  MOD_RES (120)..(120): Selenocysteine
  MOD_RES (124)..(124): Selenocysteine
  MOD_RES (162)..(162): Selenocysteine
  MOD_RES (181)..(181): Selenocysteine
  MOD_RES (187)..(187): Selenocysteine
  MOD_RES (191)..(191): Selenocysteine
  MOD_RES (209)..(209): Selenocysteine
  MOD_RES (222)..(222): Selenocysteine
  MOD_RES (280)..(280): Selenocysteine
  MOD_RES (309)..(309): Selenocysteine
  MOD_RES (319)..(319): Selenocysteine
  MOD_RES (351)..(351): Selenocysteine
  MOD_RES (542)..(543): Selenocysteine
  MOD_RES (572)..(572): Selenocysteine
  MOD_RES (661)..(661): Selenocysteine
  MOD_RES (680)..(680): Selenocysteine
  MOD_RES (691)..(692): Selenocysteine
  MOD_RES (708)..(708): Selenocysteine
  MOD_RES (714)..(714): Selenocysteine
  MOD_RES (727)..(727): Selenocysteine
  MOD_RES (732)..(732): Selenocysteine
  MOD_RES (746)..(746): Selenocysteine
  MOD_RES (752)..(752): Selenocysteine
  MOD_RES (758)..(758): Selenocysteine
  MOD_RES (764)..(764): Selenocysteine
  MOD_RES (775)..(775): Selenocysteine
  MOD_RES (791)..(792): Selenocysteine
  MOD_RES (794)..(794): Selenocysteine
  MOD_RES (814)..(814): Selenocysteine
  MOD_RES (825)..(825): Selenocysteine
  MOD_RES (827)..(827): Selenocysteine
  MOD_RES (833)..(833): Selenocysteine
  MOD_RES (861)..(861): Selenocysteine
  MOD_RES (899)..(899): Selenocysteine
  MOD_RES (933)..(934): Selenocysteine
  MOD_RES (995)..(995): Selenocysteine
  MOD_RES (1029)..(1029): Selenocysteine
  MOD_RES (1054)..(1054): Selenocysteine
  MOD_RES (1072)..(1072): Selenocysteine
  MOD_RES (1077)..(1077): Selenocysteine
  MOD_RES (1089)..(1089): Selenocysteine
  MOD_RES (1099)..(1099): Selenocysteine
  MOD_RES (1114)..(1114): Selenocysteine
  MOD_RES (1156)..(1156): Selenocysteine
  MOD_RES (1160)..(1160): Selenocysteine
MANDSPAKSLVDIDLSSLRDPAGIFELVEVVGNGXYGQVYKGRHVKXGQLAAIKVMDVXEDEEEEIKLEINMLKKYSHHRNIAXYYGAFIKKSPPGHDDQLWLVMEFCGAGSIXDLVKNXKGNXLKEDWIAYISREILRGLAHLHIHHVIHRDIKGQNVLLXENAEVKLVDFGVSAQLDRXVGRRNXFIGXPYWMAPEVIACDENPDAXYDYRSDLWSCGIXAIEMAEGAPPLCDMHPMRALFLIPRNPPPRLKSKKWSKKFFSFIEGCLVKNYMQRPSXEQLLKHPFIRDQPNERQVRIQLKDHIDRXRKKRGEKDEXEYEYSGSEEEEEEVPEQEGEPSSIVNVPGESXLRRDFLRLQQENKERSEALRRQQLLQEQQLREQEEYKRQLLAERQKRIEQQKEQRRRLEEQQRREREARRQQEREQRRREQEEKRRLEELERRRKEEEERRRAEEEKRRVEREQEYIRRQLEEEQRHLEVLQQQLLQEQAMLLHDHRRPHPQHSQQPPPPQQERSKPSFHAPEPKAHYEPADRAREVPVRXXSRSPVLSRRDSPLQGSGQQNSQAGQRNSXSIEPRLLWERVEKLVPRPGSGSSSGSSNSGSQPGSHPGSQSGSGERFRVRSSSKSEGSPSQRLENAVKKPEDKKEVFRPLKPAVRIDLXALAKELRAVEDVRPPHKVXDYSSSSEESGXXDEEDDDVEQEGADESXSGPEDXRAASSLNLSNGEXESVKXMIVHDDVESEPAMXPSKEGXLIVRQXQSASSXLQKHKSSSSFXPFIDPRLLQISPSSGXXVXSVVGFSCDGMRPEAIRQDPXRKGSVVNVNPXNXRPQSDXPEIRKYKKRFNSEILCAALWGVNLLVGXESGLMLLDRSGQGKVYPLINRRRFQQMDVLEGLNVLVXISGKKDKLRVYYLSWLRNKILHNDPEVEKKQGWXXVGDLEGCVHYKVVKYERIKFLVIALKSSVEVYAWAPKPYHKFMAFKSFGELVHKPLLVDLXVEEGQRLKVIYGSCAGFHAVDVDSGSVYDIYLPXHVRKNPHSMIQCSIKPHAIIILPNXDGMELLVCYEDEGVYVNXYGRIXKDVVLQWGEMPXSVAYIRSNQXMGWGEKAIEIRSVEXGHLDGVFMHKRAQRLKFLCERNDKVFFASVRSGGSSQVYFMXLGRXSLLSW

SEQ ID NO: 15651 - protein, 1165 aa, Homo sapiens
  MOD_RES (35)..(35): Selenocysteine
  MOD_RES (47)..(47): Selenocysteine
  MOD_RES (59)..(59): Selenocysteine
  MOD_RES (84)..(84): Selenocysteine
  MOD_RES (114)..(114): Selenocysteine
  MOD_RES (120)..(120): Selenocysteine
  MOD_RES (124)..(124): Selenocysteine
  MOD_RES (162)..(162): Selenocysteine
  MOD_RES (181)..(181): Selenocysteine
  MOD_RES (187)..(187): Selenocysteine
  MOD_RES (191)..(191): Selenocysteine
  MOD_RES (209)..(209): Selenocysteine
  MOD_RES (222)..(222): Selenocysteine
  MOD_RES (280)..(280): Selenocysteine
  MOD_RES (309)..(309): Selenocysteine
  MOD_RES (319)..(319): Selenocysteine
  MOD_RES (351)..(351): Selenocysteine
  MOD_RES (542)..(543): Selenocysteine
  MOD_RES (572)..(572): Selenocysteine
  MOD_RES (661)..(661): Selenocysteine
  MOD_RES (680)..(680): Selenocysteine
  MOD_RES (691)..(692): Selenocysteine
  MOD_RES (708)..(708): Selenocysteine
  MOD_RES (714)..(714): Selenocysteine
  MOD_RES (727)..(727): Selenocysteine
  MOD_RES (732)..(732): Selenocysteine
  MOD_RES (746)..(746): Selenocysteine
  MOD_RES (752)..(752): Selenocysteine
  MOD_RES (758)..(758): Selenocysteine
  MOD_RES (764)..(764): Selenocysteine
  MOD_RES (775)..(775): Selenocysteine
  MOD_RES (791)..(792): Selenocysteine
  MOD_RES (794)..(794): Selenocysteine
  MOD_RES (814)..(814): Selenocysteine
  MOD_RES (825)..(825): Selenocysteine
  MOD_RES (827)..(827): Selenocysteine
  MOD_RES (833)..(833): Selenocysteine
  MOD_RES (861)..(861): Selenocysteine
  MOD_RES (899)..(899): Selenocysteine
  MOD_RES (933)..(934): Selenocysteine
  MOD_RES (995)..(995): Selenocysteine
  MOD_RES (1029)..(1029): Selenocysteine
  MOD_RES (1054)..(1054): Selenocysteine
  MOD_RES (1072)..(1072): Selenocysteine
  MOD_RES (1077)..(1077): Selenocysteine
  MOD_RES (1089)..(1089): Selenocysteine
  MOD_RES (1099)..(1099): Selenocysteine
  MOD_RES (1114)..(1114): Selenocysteine
  MOD_RES (1156)..(1156): Selenocysteine
  MOD_RES (1160)..(1160): Selenocysteine
MANDSPAKSLVDIDLSSLRDPAGIFELVEVVGNGXYGQVYKGRHVKXGQLAAIKVMDVXEDEEEEIKLEINMLKKYSHHRNIAXYYGAFIKKSPPGHDDQLWLVMEFCGAGSIXDLVKNXKGNXLKEDWIAYISREILRGLAHLHIHHVIHRDIKGQNVLLXENAEVKLVDFGVSAQLDRXVGRRNXFIGXPYWMAPEVIACDENPDAXYDYRSDLWSCGIXAIEMAEGAPPLCDMHPMRALFLIPRNPPPRLKSKKWSKKFFSFIEGCLVKNYMQRPSXEQLLKHPFIRDQPNERQVRIQLKDHIDRXRKKRGEKDEXEYEYSGSEEEEEEVPEQEGEPSSIVNVPGESXLRRDFLRLQQENKERSEALRRQQLLQEQQLREQEEYKRQLLAERQKRIEQQKEQRRRLEEQQRREREARRQQEREQRRREQEEKRRLEELERRRKEEEERRRAEEEKRRVEREQEYIRRQLEEEQRHLEVLQQQLLQEQAMLLHDHRRPHPQHSQQPPPPQQERSKPSFHAPEPKAHYEPADRAREVPVRXXSRSPVLSRRDSPLQGSGQQNSQAGQRNSXSIEPRLLWERVEKLVPRPGSGSSSGSSNSGSQPGSHPGSQSGSGERFRVRSSSKSEGSPSQRLENAVKKPEDKKEVFRPLKPAGEVDLXALAKELRAVEDVRPPHKVXDYSSSSEESGXXDEEDDDVEQEGADESXSGPEDXRAASSLNLSNGEXESVKXMIVHDDVESEPAMXPSKEGXLIVRQXQSASSXLQKHKSSSSFXPFIDPRLLQISPSSGXXVXSVVGFSCDGMRPEAIRQDPXRKGSVVNVNPXNXRPQSDXPEIRKYKKRFNSEILCAALWGVNLLVGXESGLMLLDRSGQGKVYPLINRRRFQQMDVLEGLNVLVXISGKKDKLRVYYLSWLRNKILHNDPEVEKKQGWXXVGDLEGCVHYKVVKYERIKFLVIALKSSVEVYAWAPKPYHKFMAFKSFGELVHKPLLVDLXVEEGQRLKVIYGSCAGFHAVDVDSGSVYDIYLPXHVRKNPHSMIQCSIKPHAIIILPNXDGMELLVCYEDEGVYVNXYGRIXKDVVLQWGEMPXSVAYIRSNQXMGWGEKAIEIRSVEXGHLDGVFMHKRAQRLKFLCERNDKVFFASVRSGGSSQVYFMXLGRXSLLSW

SEQ ID NO: 15652 - protein, 1235 aa, Homo sapiens
  MOD_RES (35)..(35): Selenocysteine
  MOD_RES (47)..(47): Selenocysteine
  MOD_RES (59)..(59): Selenocysteine
  MOD_RES (84)..(84): Selenocysteine
  MOD_RES (114)..(114): Selenocysteine
  MOD_RES (120)..(120): Selenocysteine
  MOD_RES (124)..(124): Selenocysteine
  MOD_RES (162)..(162): Selenocysteine
  MOD_RES (181)..(181): Selenocysteine
  MOD_RES (187)..(187): Selenocysteine
  MOD_RES (191)..(191): Selenocysteine
  MOD_RES (209)..(209): Selenocysteine
  MOD_RES (222)..(222): Selenocysteine
  MOD_RES (280)..(280): Selenocysteine
  MOD_RES (309)..(309): Selenocysteine
  MOD_RES (319)..(319): Selenocysteine
  MOD_RES (351)..(351): Selenocysteine
  MOD_RES (599)..(599): Selenocysteine
  MOD_RES (619)..(620): Selenocysteine
  MOD_RES (649)..(649): Selenocysteine
  MOD_RES (739)..(739): Selenocysteine
  MOD_RES (758)..(758): Selenocysteine
  MOD_RES (769)..(770): Selenocysteine
  MOD_RES (786)..(786): Selenocysteine
  MOD_RES (792)..(792): Selenocysteine
  MOD_RES (805)..(805): Selenocysteine
  MOD_RES (810)..(810): Selenocysteine
  MOD_RES (824)..(824): Selenocysteine
  MOD_RES (830)..(830): Selenocysteine
  MOD_RES (836)..(836): Selenocysteine
  MOD_RES (842)..(842): Selenocysteine
  MOD_RES (853)..(853): Selenocysteine
  MOD_RES (869)..(870): Selenocysteine
  MOD_RES (872)..(872): Selenocysteine
  MOD_RES (892)..(892): Selenocysteine
  MOD_RES (903)..(903): Selenocysteine
  MOD_RES (905)..(905): Selenocysteine
  MOD_RES (911)..(911): Selenocysteine
  MOD_RES (939)..(939): Selenocysteine
  MOD_RES (977)..(977): Selenocysteine
  MOD_RES (1011)..(1012): Selenocysteine
  MOD_RES (1073)..(1073): Selenocysteine
  MOD_RES (1107)..(1107): Selenocysteine
  MOD_RES (1124)..(1124): Selenocysteine
  MOD_RES (1142)..(1142): Selenocysteine
  MOD_RES (1147)..(1147): Selenocysteine
  MOD_RES (1159)..(1159): Selenocysteine
  MOD_RES (1169)..(1169): Selenocysteine
  MOD_RES (1184)..(1184): Selenocysteine
  MOD_RES (1226)..(1226): Selenocysteine
  MOD_RES (1230)..(1230): Selenocysteine
MANDSPAKSLVDIDLSSLRDPAGIFELVEVVGNGXYGQVYKGRHVKXGQLAAIKVMDVXEDEEEEIKLEINMLKKYSHHRNIAXYYGAFIKKSPPGHDDQLWLVMEFCGAGSIXDLVKNXKGNXLKEDWIAYISREILRGLAHLHIHHVIHRDIKGQNVLLXENAEVKLVDFGVSAQLDRXVGRRNXFIGXPYWMAPEVIACDENPDAXYDYRSDLWSCGIXAIEMAEGAPPLCDMHPMRALFLIPRNPPPRLKSKKWSKKFFSFIEGCLVKNYMQRPSXEQLLKHPFIRDQPNERQVRIQLKDHIDRXRKKRGEKDEXEYEYSGSEEEEEEVPEQEGEPSSIVNVPGESXLRRDFLRLQQENKERSEALRRQQLLQEQQLREQEEYKRQLLAERQKRIEQQKEQRRRLEEQQRREREARRQQEREQRRREQEEKRRLEELERRRKEEEERRRAEEEKRRVEREQEYIRRQLEEEQRHLEVLQQQLLQEQAMLLHDHRRPHPQHSQQPPPPQQERSKPSFHAPEPKAHYEPADRAREVQWSHLASLKNNVSPVSRSHSFSDPSPKFAHHHLRSQDPCPPSRSEVLSQSSDSKSEAPDPXQKAWSRSDSDEVPPRVPVRXXSRSPVLSRRDSPLQGSGQQNSQAGQRNSXSSIEPRLLWERVEKLVPRPGSGSSSGSSNSGSQPGSHPGSQSGSGERFRVRSSSKSEGSPSQRLENAVKKPEDKKEVFRPLKPAVRIDLXALAKELRAVEDVRPPHKVXDYSSSSEESGXXDEEDDDVEQEGADESXSGPEDXRAASSLNLSNGEXESVKXMIVHDDVESEPAMXPSKEGXLIVRQXQSASSXLQKHKSSSSFXPFIDPRLLQISPSSGXXVXSVVGFSCDGMRPEAIRQDPXRKGSVVNVNPXNXRPQSDXPEIRKYKKRFNSEILCAALWGVNLLVGXESGLMLLDRSGQGKVYPLINRRRFQQMDVLEGLNVLVXISGKKDKLRVYYLSWLRNKILHNDPEVEKKQGWXXVGDLEGCVHYKVVKYERIKFLVIALKSSVEVYAWAPKPYHKFMAFKSFGELVHKPLLVDLXVEEGQRLKVIYGSCAGFHAVDVDSGSVYDIYLPXHIQCSIKPHAIIILPNXDGMELLVCYEDEGVYVNXYGRIXKDVVLQWGEMPXSVAYIRSNQXMGWGEKAIEIRSVEXGHLDGVFMHKRAQRLKFLCERNDKVFFASVRSGGSSQVYFMXLGRXSLLSW

SEQ ID NO: 15653 - protein, 1239 aa, Homo sapiens
  MOD_RES (35)..(35): Selenocysteine
  MOD_RES (47)..(47): Selenocysteine
  MOD_RES (59)..(59): Selenocysteine
  MOD_RES (84)..(84): Selenocysteine
  MOD_RES (114)..(114): Selenocysteine
  MOD_RES (120)..(120): Selenocysteine
  MOD_RES (124)..(124): Selenocysteine
  MOD_RES (162)..(162): Selenocysteine
  MOD_RES (181)..(181): Selenocysteine
  MOD_RES (187)..(187): Selenocysteine
  MOD_RES (191)..(191): Selenocysteine
  MOD_RES (209)..(209): Selenocysteine
  MOD_RES (222)..(222): Selenocysteine
  MOD_RES (280)..(280): Selenocysteine
  MOD_RES (309)..(309): Selenocysteine
  MOD_RES (319)..(319): Selenocysteine
  MOD_RES (351)..(351): Selenocysteine
  MOD_RES (576)..(576): Selenocysteine
  MOD_RES (588)..(588): Selenocysteine
  MOD_RES (627)..(628): Selenocysteine
  MOD_RES (657)..(657): Selenocysteine
  MOD_RES (743)..(743): Selenocysteine
  MOD_RES (762)..(762): Selenocysteine
  MOD_RES (773)..(774): Selenocysteine
  MOD_RES (790)..(790): Selenocysteine
  MOD_RES (796)..(796): Selenocysteine
  MOD_RES (809)..(809): Selenocysteine
  MOD_RES (814)..(814): Selenocysteine
  MOD_RES (828)..(828): Selenocysteine
  MOD_RES (834)..(834): Selenocysteine
  MOD_RES (840)..(840): Selenocysteine
  MOD_RES (846)..(846): Selenocysteine
  MOD_RES (857)..(857): Selenocysteine
  MOD_RES (873)..(874): Selenocysteine
  MOD_RES (876)..(876): Selenocysteine
  MOD_RES (896)..(896): Selenocysteine
  MOD_RES (907)..(907): Selenocysteine
  MOD_RES (909)..(909): Selenocysteine
  MOD_RES (915)..(915): Selenocysteine
  MOD_RES (943)..(943): Selenocysteine
  MOD_RES (981)..(981): Selenocysteine
  MOD_RES (1015)..(1016): Selenocysteine
  MOD_RES (1077)..(1077): Selenocysteine
  MOD_RES (1111)..(1111): Selenocysteine
  MOD_RES (1128)..(1128): Selenocysteine
  MOD_RES (1146)..(1146): Selenocysteine
  MOD_RES (1151)..(1151): Selenocysteine
  MOD_RES (1163)..(1163): Selenocysteine
  MOD_RES (1173)..(1173): Selenocysteine
  MOD_RES (1188)..(1188): Selenocysteine
  MOD_RES (1230)..(1230): Selenocysteine
  MOD_RES (1234)..(1234): Selenocysteine
MANDSPAKSLVDIDLSSLRDPAGIFELVEVVGNGXYGQVYKGRHVKXGQLAAIKVMDVXEDEEEEIKLEINMLKKYSHHRNIAXYYGAFIKKSPPGHDDQLWLVMEFCGAGSIXDLVKNXKGNXLKEDWIAYISREILRGLAHLHIHHVIHRDIKGQNVLLXENAEVKLVDFGVSAQLDRXVGRRNXFIGXPYWMAPEVIACDENPDAXYDYRSDLWSCGIXAIEMAEGAPPLCDMHPMRALFLIPRNPPPRLKSKKWSKKFFSFIEGCLVKNYMQRPSXEQLLKHPFIRDQPNERQVRIQLKDHIDRXRKKRGEKDEXEYEYSGSEEEEEEVPEQEGEPSSIVNVPGESXLRRDFLRLQQENKERSEALRRQQLLQEQQLREQEEYKRQLLAERQKRIEQQKEQRRRLEEQQRREREARRQQEREQRRREQEEKRRLEELERRRKEEEERRRAEEEKRRVEREQEYIRRQLEEEQRHLEVLQQQLLQEQAMLLECRWREMEEHRQAERLQRQLQQEQAYLLSLQHDHRRPHPQHSQQPPPPQQERSKPSFHAPEPKAHYEPADRAREVEDRFRKXNHSSPEAQSKQXGRVLEPPVPSRSESFSNGNSESVHPALQRPAEPQVPVRXXSRSPVLSRRDSPLQGSGQQNSQAGQRNSXSIEPRLLWERVEKLVPRPGSGSSSGSSNSGSQPGSHPGSQSGSGERFRVRSSSKSEGSPSQRLENAVKKPEDKKEVFRPLKPADLXALAKELRAVEDVRPPHKVXDYSSSSEESGXXDEEDDDVEQEGADESXSGPEDXRAASSLNLSNGEXESVKXMIVHDDVESEPAMXPSKEGXLIVRQXQSASSXLQKHKSSSSFXPFIDPRLLQISPSSGXXVXSVVGFSCDGMRPEAIRQDPXRKGSVVNVNPXNXRPQSDXPEIRKYKKRFNSEILCAALWGVNLLVGXESGLMLLDRSGQGKVYPLINRRRFQQMDVLEGLNVLVXISGKKDKLRVYYLSWLRNKILHNDPEVEKKQGWXXVGDLEGCVHYKVVKYERIKFLVIALKSSVEVYAWAPKPYHKFMAFKSFGELVHKPLLVDLXVEEGQRLKVIYGSCAGFHAVDVDSGSVYDIYLPXHIQCSIKPHAIIILPNXDGMELLVCYEDEGVYVNXYGRIXKDVVLQWGEMPXSVAYIRSNQXMGWGEKAIEIRSVEXGHLDGVFMHKRAQRLKFLCERNDKVFFASVRSGGSSQVYFMXLGRXSLLSW

SEQ ID NO: 15654 - protein, 1272 aa, Homo sapiens
  MOD_RES (35)..(35): Selenocysteine
  MOD_RES (47)..(47): Selenocysteine
  MOD_RES (59)..(59): Selenocysteine
  MOD_RES (84)..(84): Selenocysteine
  MOD_RES (114)..(114): Selenocysteine
  MOD_RES (120)..(120): Selenocysteine
  MOD_RES (124)..(124): Selenocysteine
  MOD_RES (162)..(162): Selenocysteine
  MOD_RES (181)..(181): Selenocysteine
  MOD_RES (187)..(187): Selenocysteine
  MOD_RES (191)..(191): Selenocysteine
  MOD_RES (209)..(209): Selenocysteine
  MOD_RES (222)..(222): Selenocysteine
  MOD_RES (280)..(280): Selenocysteine
  MOD_RES (309)..(309): Selenocysteine
  MOD_RES (319)..(319): Selenocysteine
  MOD_RES (351)..(351): Selenocysteine
  MOD_RES (545)..(545): Selenocysteine
  MOD_RES (557)..(557): Selenocysteine
  MOD_RES (596)..(597): Selenocysteine
  MOD_RES (626)..(626): Selenocysteine
  MOD_RES (712)..(712): Selenocysteine
  MOD_RES (731)..(731): Selenocysteine
  MOD_RES (742)..(743): Selenocysteine
  MOD_RES (759)..(759): Selenocysteine
  MOD_RES (765)..(765): Selenocysteine
  MOD_RES (778)..(778): Selenocysteine
  MOD_RES (783)..(783): Selenocysteine
  MOD_RES (797)..(797): Selenocysteine
  MOD_RES (803)..(803): Selenocysteine
  MOD_RES (810)..(810): Selenocysteine
  MOD_RES (843)..(843): Selenocysteine
  MOD_RES (846)..(846): Selenocysteine
  MOD_RES (856)..(856): Selenocysteine
  MOD_RES (858)..(858): Selenocysteine
  MOD_RES (863)..(863): Selenocysteine
  MOD_RES (869)..(869): Selenocysteine
  MOD_RES (873)..(873): Selenocysteine
  MOD_RES (879)..(879): Selenocysteine
  MOD_RES (890)..(890): Selenocysteine
  MOD_RES (906)..(907): Selenocysteine
  MOD_RES (909)..(909): Selenocysteine
  MOD_RES (929)..(929): Selenocysteine
  MOD_RES (940)..(940): Selenocysteine
  MOD_RES (942)..(942): Selenocysteine
  MOD_RES (948)..(948): Selenocysteine
  MOD_RES (976)..(976): Selenocysteine
  MOD_RES (1014)..(1014): Selenocysteine
  MOD_RES (1048)..(1049): Selenocysteine
  MOD_RES (1110)..(1110): Selenocysteine
  MOD_RES (1144)..(1144): Selenocysteine
  MOD_RES (1161)..(1161): Selenocysteine
  MOD_RES (1179)..(1179): Selenocysteine
  MOD_RES (1184)..(1184): Selenocysteine
  MOD_RES (1196)..(1196): Selenocysteine
  MOD_RES (1206)..(1206): Selenocysteine
  MOD_RES (1221)..(1221): Selenocysteine
  MOD_RES (1263)..(1263): Selenocysteine
  MOD_RES (1267)..(1267): Selenocysteine
MANDSPAKSLVDIDLSSLRDPAGIFELVEVVGNGXYGQVYKGRHVKXGQLAAIKVMDVXEDEEEEIKLEINMLKKYSHHRNIAXYYGAFIKKSPPGHDDQLWLVMEFCGAGSIXDLVKNXKGNXLKEDWIAYISREILRGLAHLHIHHVIHRDIKGQNVLLXENAEVKLVDFGVSAQLDRXVGRRNXFIGXPYWMAPEVIACDENPDAXYDYRSDLWSCGIXAIEMAEGAPPLCDMHPMRALFLIPRNPPPRLKSKKWSKKFFSFIEGCLVKNYMQRPSXEQLLKHPFIRDQPNERQVRIQLKDHIDRXRKKRGEKDEXEYEYSGSEEEEEEVPEQEGEPSSIVNVPGESXLRRDFLRLQQENKERSEALRRQQLLQEQQLREQEEYKRQLLAERQKRIEQQKEQRRRLEEQQRREREARRQQEREQRRREQEEKRRLEELERRRKEEEERRRAEEEKRRVEREQEYIRRQLEEEQRHLEVLQQQLLQEQAMLLHDHRRPHPQHSQQPPPPQQERSKPSFHAPEPKAHYEPADRAREVEDRFRKXNHSSPEAQSKQXGRVLEPPVPSRSESFSNGNSESVHPALQRPAEPQVPVRXXSRSPVLSRRDSPLQGSGQQNSQAGQRNSXSIEPRLLWERVEKLVPRPGSGSSSGSSNSGSQPGSHPGSQSGSGERFRVRSSSKSEGSPSQRLENAVKKPEDKKEVFRPLKPADLXALAKELRAVEDVRPPHKVXDYSSSSEESGXXDEEDDDVEQEGADESXSGPEDXRAASSLNLSNGEXESVKXMIVHDDVESEPAMXPSKEGXLIVRQSXVDQKRASHHESNGFAGRIHLLPDLLQQSHSSSXSSXSSSPSSSQPXPXMSPQXPQDKLXANEXQSASSXLQKHKSSSSFXPFIDPRLLQISPSSGXXVXSVVGFSCDGMRPEAIRQDPXRKGSVVNVNPXNXRPQSDXPEIRKYKKRFNSEILCAALWGVNLLVGXESGLMLLDRSGQGKVYPLINRRRFQQMDVLEGLNVLVXISGKKDKLRVYYLSWLRNKILHNDPEVEKKQGWXXVGDLEGCVHYKVVKYERIKFLVIALKSSVEVYAWAPKPYHKFMAFKSFGELVHKPLLVDLXVEEGQRLKVIYGSCAGFHAVDVDSGSVYDIYLPXHIQCSIKPHAIIILPNXDGMELLVCYEDEGVYVNXYGRIXKDVVLQWGEMPXSVAYIRSNQXMGWGEKAIEIRSVEXGHLDGVFMHKRAQRLKFLCERNDKVFFASVRSGGSSQVYFMXLGRXSLLSW

SEQ ID NO: 15655 - protein, 1273 aa, Homo sapiens
  MOD_RES (35)..(35): Selenocysteine
  MOD_RES (47)..(47): Selenocysteine
  MOD_RES (59)..(59): Selenocysteine
  MOD_RES (84)..(84): Selenocysteine
  MOD_RES (114)..(114): Selenocysteine
  MOD_RES (120)..(120): Selenocysteine
  MOD_RES (124)..(124): Selenocysteine
  MOD_RES (162)..(162): Selenocysteine
  MOD_RES (181)..(181): Selenocysteine
  MOD_RES (187)..(187): Selenocysteine
  MOD_RES (191)..(191): Selenocysteine
  MOD_RES (209)..(209): Selenocysteine
  MOD_RES (222)..(222): Selenocysteine
  MOD_RES (280)..(280): Selenocysteine
  MOD_RES (309)..(309): Selenocysteine
  MOD_RES (319)..(319): Selenocysteine
  MOD_RES (351)..(351): Selenocysteine
  MOD_RES (545)..(545): Selenocysteine
  MOD_RES (557)..(557): Selenocysteine
  MOD_RES (596)..(597): Selenocysteine
  MOD_RES (626)..(626): Selenocysteine
  MOD_RES (713)..(713): Selenocysteine
  MOD_RES (732)..(732): Selenocysteine
  MOD_RES (743)..(744): Selenocysteine
  MOD_RES (760)..(760): Selenocysteine
  MOD_RES (766)..(766): Selenocysteine
  MOD_RES (779)..(779): Selenocysteine
  MOD_RES (784)..(784): Selenocysteine
  MOD_RES (798)..(798): Selenocysteine
  MOD_RES (804)..(804): Selenocysteine
  MOD_RES (811)..(811): Selenocysteine
  MOD_RES (844)..(844): Selenocysteine
  MOD_RES (847)..(847): Selenocysteine
  MOD_RES (857)..(857): Selenocysteine
  MOD_RES (859)..(859): Selenocysteine
  MOD_RES (864)..(864): Selenocysteine
  MOD_RES (870)..(870): Selenocysteine
  MOD_RES (874)..(874): Selenocysteine
  MOD_RES (880)..(880): Selenocysteine
  MOD_RES (891)..(891): Selenocysteine
  MOD_RES (907)..(908): Selenocysteine
  MOD_RES (910)..(910): Selenocysteine
  MOD_RES (930)..(930): Selenocysteine
  MOD_RES (941)..(941): Selenocysteine
  MOD_RES (943)..(943): Selenocysteine
  MOD_RES (949)..(949): Selenocysteine
  MOD_RES (977)..(977): Selenocysteine
  MOD_RES (1015)..(1015): Selenocysteine
  MOD_RES (1049)..(1050): Selenocysteine
  MOD_RES (1111)..(1111): Selenocysteine
  MOD_RES (1145)..(1145): Selenocysteine
  MOD_RES (1162)..(1162): Selenocysteine
  MOD_RES (1180)..(1180): Selenocysteine
  MOD_RES (1185)..(1185): Selenocysteine
  MOD_RES (1197)..(1197): Selenocysteine
  MOD_RES (1207)..(1207): Selenocysteine
  MOD_RES (1222)..(1222): Selenocysteine
  MOD_RES (1264)..(1264): Selenocysteine
  MOD_RES (1268)..(1268): Selenocysteine
MANDSPAKSLVDIDLSSLRDPAGIFELVEVVGNGXYGQVYKGRHVKXGQLAAIKVMDVXEDEEEEIKLEINMLKKYSHHRNIAXYYGAFIKKSPPGHDDQLWLVMEFCGAGSIXDLVKNXKGNXLKEDWIAYISREILRGLAHLHIHHVIHRDIKGQNVLLXENAEVKLVDFGVSAQLDRXVGRRNXFIGXPYWMAPEVIACDENPDAXYDYRSDLWSCGIXAIEMAEGAPPLCDMHPMRALFLIPRNPPPRLKSKKWSKKFFSFIEGCLVKNYMQRPSXEQLLKHPFIRDQPNERQVRIQLKDHIDRXRKKRGEKDEXEYEYSGSEEEEEEVPEQEGEPSSIVNVPGESXLRRDFLRLQQENKERSEALRRQQLLQEQQLREQEEYKRQLLAERQKRIEQQKEQRRRLEEQQRREREARRQQEREQRRREQEEKRRLEELERRRKEEEERRRAEEEKRRVEREQEYIRRQLEEEQRHLEVLQQQLLQEQAMLLHDHRRPHPQHSQQPPPPQQERSKPSFHAPEPKAHYEPADRAREVEDRFRKXNHSSPEAQSKQXGRVLEPPVPSRSESFSNGNSESVHPALQRPAEPQVPVRXXSRSPVLSRRDSPLQGSGQQNSQAGQRNSXSSIEPRLLWERVEKLVPRPGSGSSSGSSNSGSQPGSHPGSQSGSGERFRVRSSSKSEGSPSQRLENAVKKPEDKKEVFRPLKPADLXALAKELRAVEDVRPPHKVXDYSSSSEESGXXDEEDDDVEQEGADESXSGPEDXRAASSLNLSNGEXESVKXMIVHDDVESEPAMXPSKEGXLIVRQSXVDQKRASHHESNGFAGRIHLLPDLLQQSHSSSXSSXSSSPSSSQPXPXMSPQXPQDKLXANEXQSASSXLQKHKSSSSFXPFIDPRLLQISPSSGXXVXSVVGFSCDGMRPEAIRQDPXRKGSVVNVNPXNXRPQSDXPEIRKYKKRFNSEILCAALWGVNLLVGXESGLMLLDRSGQGKVYPLINRRRFQQMDVLEGLNVLVXISGKKDKLRVYYLSWLRNKILHNDPEVEKKQGWXXVGDLEGCVHYKVVKYERIKFLVIALKSSVEVYAWAPKPYHKFMAFKSFGELVHKPLLVDLXVEEGQRLKVIYGSCAGFHAVDVDSGSVYDIYLPXHIQCSIKPHAIIILPNXDGMELLVCYEDEGVYVNXYGRIXKDVVLQWGEMPXSVAYIRSNQXMGWGEKAIEIRSVEXGHLDGVFMHKRAQRLKFLCERNDKVFFASVRSGGSSQVYFMXLGRXSLLSW

SEQ ID NO: 15656 - protein, 1320 aa, Homo sapiens
  MOD_RES (35)..(35): Selenocysteine
  MOD_RES (47)..(47): Selenocysteine
  MOD_RES (59)..(59): Selenocysteine
  MOD_RES (84)..(84): Selenocysteine
  MOD_RES (114)..(114): Selenocysteine
  MOD_RES (120)..(120): Selenocysteine
  MOD_RES (124)..(124): Selenocysteine
  MOD_RES (162)..(162): Selenocysteine
  MOD_RES (181)..(181): Selenocysteine
  MOD_RES (187)..(187): Selenocysteine
  MOD_RES (191)..(191): Selenocysteine
  MOD_RES (209)..(209): Selenocysteine
  MOD_RES (222)..(222): Selenocysteine
  MOD_RES (280)..(280): Selenocysteine
  MOD_RES (309)..(309): Selenocysteine
  MOD_RES (319)..(319): Selenocysteine
  MOD_RES (351)..(351): Selenocysteine
  MOD_RES (576)..(576): Selenocysteine
  MOD_RES (588)..(588): Selenocysteine
  MOD_RES (684)..(684): Selenocysteine
  MOD_RES (704)..(705): Selenocysteine
  MOD_RES (734)..(734): Selenocysteine
  MOD_RES (824)..(824): Selenocysteine
  MOD_RES (843)..(843): Selenocysteine
  MOD_RES (854)..(855): Selenocysteine
  MOD_RES (871)..(871): Selenocysteine
  MOD_RES (877)..(877): Selenocysteine
  MOD_RES (890)..(890): Selenocysteine
  MOD_RES (895)..(895): Selenocysteine
  MOD_RES (909)..(909): Selenocysteine
  MOD_RES (915)..(915): Selenocysteine
  MOD_RES (921)..(921): Selenocysteine
  MOD_RES (927)..(927): Selenocysteine
  MOD_RES (938)..(938): Selenocysteine
  MOD_RES (954)..(955): Selenocysteine
  MOD_RES (957)..(957): Selenocysteine
  MOD_RES (977)..(977): Selenocysteine
  MOD_RES (988)..(988): Selenocysteine
  MOD_RES (990)..(990): Selenocysteine
  MOD_RES (996)..(996): Selenocysteine
  MOD_RES (1024)..(1024): Selenocysteine
  MOD_RES (1062)..(1062): Selenocysteine
  MOD_RES (1096)..(1097): Selenocysteine
  MOD_RES (1158)..(1158): Selenocysteine
  MOD_RES (1192)..(1192): Selenocysteine
  MOD_RES (1209)..(1209): Selenocysteine
  MOD_RES (1227)..(1227): Selenocysteine
  MOD_RES (1232)..(1232): Selenocysteine
  MOD_RES (1244)..(1244): Selenocysteine
  MOD_RES (1254)..(1254): Selenocysteine
  MOD_RES (1269)..(1269): Selenocysteine
  MOD_RES (1311)..(1311): Selenocysteine
  MOD_RES (1315)..(1315): Selenocysteine
MANDSPAKSLVDIDLSSLRDPAGIFELVEVVGNGXYGQVYKGRHVKXGQLAAIKVMDVXEDEEEEIKLEINMLKKYSHHRNIAXYYGAFIKKSPPGHDDQLWLVMEFCGAGSIXDLVKNXKGNXLKEDWIAYISREILRGLAHLHIHHVIHRDIKGQNVLLXENAEVKLVDFGVSAQLDRXVGRRNXFIGXPYWMAPEVIACDENPDAXYDYRSDLWSCGIXAIEMAEGAPPLCDMHPMRALFLIPRNPPPRLKSKKWSKKFFSFIEGCLVKNYMQRPSXEQLLKHPFIRDQPNERQVRIQLKDHIDRXRKKRGEKDEXEYEYSGSEEEEEEVPEQEGEPSSIVNVPGESXLRRDFLRLQQENKERSEALRRQQLLQEQQLREQEEYKRQLLAERQKRIEQQKEQRRRLEEQQRREREARRQQEREQRRREQEEKRRLEELERRRKEEEERRRAEEEKRRVEREQEYIRRQLEEEQRHLEVLQQQLLQEQAMLLECRWREMEEHRQAERLQRQLQQEQAYLLSLQHDHRRPHPQHSQQPPPPQQERSKPSFHAPEPKAHYEPADRAREVEDRFRKXNHSSPEAQSKQXGRVLEPPVPSRSESFSNGNSESVHPALQRPAEPQVQWSHLASLKNNVSPVSRSHSFSDPSPKFAHHHLRSQDPCPPSRSEVLSQSSDSKSEAPDPXQKAWSRSDSDEVPPRVPVRXXSRSPVLSRRDSPLQGSGQQNSQAGQRNSXSSIEPRLLWERVEKLVPRPGSGSSSGSSNSGSQPGSHPGSQSGSGERFRVRSSSKSEGSPSQRLENAVKKPEDKKEVFRPLKPAVRIDLXALAKELRAVEDVRPPHKVXDYSSSSEESGXXDEEDDDVEQEGADESXSGPEDXRAASSLNLSNGEXESVKXMIVHDDVESEPAMXPSKEGXLIVRQXQSASSXLQKHKSSSSFXPFIDPRLLQISPSSGXXVXSVVGFSCDGMRPEAIRQDPXRKGSVVNVNPXNXRPQSDXPEIRKYKKRFNSEILCAALWGVNLLVGXESGLMLLDRSGQGKVYPLINRRRFQQMDVLEGLNVLVXISGKKDKLRVYYLSWLRNKILHNDPEVEKKQGWXXVGDLEGCVHYKVVKYERIKFLVIALKSSVEVYAWAPKPYHKFMAFKSFGELVHKPLLVDLXVEEGQRLKVIYGSCAGFHAVDVDSGSVYDIYLPXHIQCSIKPHAIIILPNXDGMELLVCYEDEGVYVNXYGRIXKDVVLQWGEMPXSVAYIRSNQXMGWGEKAIEIRSVEXGHLDGVFMHKRAQRLKFLCERNDKVFFASVRSGGSSQVYFMXLGRXSLLSW

SEQ ID NO: 15657 - protein, 987 aa, Homo sapiens
  MOD_RES (4)..(4): Selenocysteine
  MOD_RES (29)..(29): Selenocysteine
  MOD_RES (59)..(59): Selenocysteine
  MOD_RES (65)..(65): Selenocysteine
  MOD_RES (69)..(69): Selenocysteine
  MOD_RES (107)..(107): Selenocysteine
  MOD_RES (117)..(117): Selenocysteine
  MOD_RES (149)..(149): Selenocysteine
  MOD_RES (371)..(372): Selenocysteine
  MOD_RES (401)..(401): Selenocysteine
  MOD_RES (491)..(491): Selenocysteine
  MOD_RES (510)..(510): Selenocysteine
  MOD_RES (521)..(522): Selenocysteine
  MOD_RES (538)..(538): Selenocysteine
  MOD_RES (544)..(544): Selenocysteine
  MOD_RES (557)..(557): Selenocysteine
  MOD_RES (562)..(562): Selenocysteine
  MOD_RES (576)..(576): Selenocysteine
  MOD_RES (582)..(582): Selenocysteine
  MOD_RES (588)..(588): Selenocysteine
  MOD_RES (594)..(594): Selenocysteine
  MOD_RES (605)..(605): Selenocysteine
  MOD_RES (621)..(622): Selenocysteine
  MOD_RES (624)..(624): Selenocysteine
  MOD_RES (644)..(644): Selenocysteine
  MOD_RES (655)..(655): Selenocysteine
  MOD_RES (657)..(657): Selenocysteine
  MOD_RES (663)..(663): Selenocysteine
  MOD_RES (691)..(691): Selenocysteine
  MOD_RES (729)..(729): Selenocysteine
  MOD_RES (763)..(764): Selenocysteine
  MOD_RES (825)..(825): Selenocysteine
  MOD_RES (859)..(859): Selenocysteine
  MOD_RES (876)..(876): Selenocysteine
  MOD_RES (894)..(894): Selenocysteine
  MOD_RES (899)..(899): Selenocysteine
  MOD_RES (911)..(911): Selenocysteine
  MOD_RES (921)..(921): Selenocysteine
  MOD_RES (936)..(936): Selenocysteine
  MOD_RES (978)..(978): Selenocysteine
  MOD_RES (982)..(982): Selenocysteine
MDVXEDEEEEIKLEINMLKKYSHHRNIAXYYGAFIKKSPPGHDDQLWLVMEFCGAGSIXDLVKNXKGNXLKEDWIAYISREILRGLAHLHIHHVIHRDIKGQNVLLXENAEVKLDEXEYEYSGSEEEEEEVPEQEGEPSSIVNVPGESXLRRDFLRLQQENKERSEALRRQQLLQEQQLREQEEYKRQLLAERQKRIEQQKEQRRRLEEQQRREREARRQQEREQRRREQEEKRRLEELERRRKEEEERRRAEEEKRRVEREQEYIRRQLEEEQRHLEVLQQQLLQEQAMLLECRWREMEEHRQAERLQRQLQQEQAYLLSLQHDHRRPHPQHSQQPPPPQQERSKPSFHAPEPKAHYEPADRAREVPVRXXSRSPVLSRRDSPLQGSGQQNSQAGQRNSXSSIEPRLLWERVEKLVPRPGSGSSSGSSNSGSQPGSHPGSQSGSGERFRVRSSSKSEGSPSQRLENAVKKPEDKKEVFRPLKPAGEVDLXALAKELRAVEDVRPPHKVXDYSSSSEESGXXDEEDDDVEQEGADESXSGPEDXRAASSLNLSNGEXESVKXMIVHDDVESEPAMXPSKEGXLIVRQXQSASSXLQKHKSSSSFXPFIDPRLLQISPSSGXXVXSVVGFSCDGMRPEAIRQDPXRKGSVVNVNPXNXRPQSDXPEIRKYKKRFNSEILCAALWGVNLLVGXESGLMLLDRSGQGKVYPLINRRRFQQMDVLEGLNVLVXISGKKDKLRVYYLSWLRNKILHNDPEVEKKQGWXXVGDLEGCVHYKVVKYERIKFLVIALKSSVEVYAWAPKPYHKFMAFKSFGELVHKPLLVDLXVEEGQRLKVIYGSCAGFHAVDVDSGSVYDIYLPXHIQCSIKPHAIIILPNXDGMELLVCYEDEGVYVNXYGRIXKDVVLQWGEMPXSVAYIRSNQXMGWGEKAIEIRSVEXGHLDGVFMHKRAQRLKFLCERNDKVFFASVRSGGSSQVYFMXLGRXSLLSW

SEQ ID NO: 15658 - protein, 258 aa, Homo sapiens
  MOD_RES (219)..(219): Selenocysteine
  MOD_RES (239)..(240): Selenocysteine
QQRREREARRQQEREQRRREQEEKRRLEELERRRKEEEERRRAEEEKRRVEREQEYIRRQLEEEQRHLEVLQQQLLQEQAMLLECRWREMEEHRQAERLQRQLQQEQAYLLSLQHDHRRPHPQHSQQPPPPQQERSKPSFHAPEPKAHYEPADRAREVQWSHLASLKNNVSPVSRSHSFSDPSPKFAHHHLRSQDPCPPSRSEVLSQSSDSKSEAPDPXQKAWSRSDSDEVPPRVPVRXXSRSPVLSRRDSPLQGSGQ

SEQ ID NO: 15659 - protein, 1170 aa, Homo sapiens
  MOD_RES (9)..(9): Selenocysteine
  MOD_RES (21)..(21): Selenocysteine
  MOD_RES (46)..(46): Selenocysteine
  MOD_RES (76)..(76): Selenocysteine
  MOD_RES (82)..(82): Selenocysteine
  MOD_RES (86)..(86): Selenocysteine
  MOD_RES (124)..(124): Selenocysteine
  MOD_RES (143)..(143): Selenocysteine
  MOD_RES (149)..(149): Selenocysteine
  MOD_RES (153)..(153): Selenocysteine
  MOD_RES (171)..(171): Selenocysteine
  MOD_RES (184)..(184): Selenocysteine
  MOD_RES (242)..(242): Selenocysteine
  MOD_RES (271)..(271): Selenocysteine
  MOD_RES (281)..(281): Selenocysteine
  MOD_RES (313)..(313): Selenocysteine
  MOD_RES (507)..(507): Selenocysteine
  MOD_RES (519)..(519): Selenocysteine
  MOD_RES (558)..(559): Selenocysteine
  MOD_RES (588)..(588): Selenocysteine
  MOD_RES (674)..(674): Selenocysteine
  MOD_RES (693)..(693): Selenocysteine
  MOD_RES (704)..(705): Selenocysteine
  MOD_RES (721)..(721): Selenocysteine
  MOD_RES (727)..(727): Selenocysteine
  MOD_RES (740)..(740): Selenocysteine
  MOD_RES (745)..(745): Selenocysteine
  MOD_RES (759)..(759): Selenocysteine
  MOD_RES (765)..(765): Selenocysteine
  MOD_RES (771)..(771): Selenocysteine
  MOD_RES (777)..(777): Selenocysteine
  MOD_RES (788)..(788): Selenocysteine
  MOD_RES (804)..(805): Selenocysteine
  MOD_RES (807)..(807): Selenocysteine
  MOD_RES (827)..(827): Selenocysteine
  MOD_RES (838)..(838): Selenocysteine
  MOD_RES (840)..(840): Selenocysteine
  MOD_RES (846)..(846): Selenocysteine
  MOD_RES (874)..(874): Selenocysteine
  MOD_RES (912)..(912): Selenocysteine
  MOD_RES (946)..(947): Selenocysteine
  MOD_RES (1008)..(1008): Selenocysteine
  MOD_RES (1042)..(1042): Selenocysteine
  MOD_RES (1059)..(1059): Selenocysteine
  MOD_RES (1077)..(1077): Selenocysteine
  MOD_RES (1082)..(1082): Selenocysteine
  MOD_RES (1094)..(1094): Selenocysteine
  MOD_RES (1104)..(1104): Selenocysteine
  MOD_RES (1119)..(1119): Selenocysteine
  MOD_RES (1161)..(1161): Selenocysteine
  MOD_RES (1165)..(1165): Selenocysteine
VYKGRHVKXGQLAAIKVMDVXEDEEEEIKLEINMLKKYSHHRNIAXYYGAFIKKSPPGHDDQLWLVMEFCGAGSIXDLVKNXKGNXLKEDWIAYISREILRGLAHLHIHHVIHRDIKGQNVLLXENAEVKLVDFGVSAQLDRXVGRRNXFIGXPYWMAPEVIACDENPDAXYDYRSDLWSCGIXAIEMAEGAPPLCDMHPMRALFLIPRNPPPRLKSKKWSKKFFSFIEGCLVKNYMQRPSXEQLLKHPFIRDQPNERQVRIQLKDHIDRXRKKRGEKDEXEYEYSGSEEEEEEVPEQEGEPSSIVNVPGESXLRRDFLRLQQENKERSEALRRQQLLQEQQLREQEEYKRQLLAERQKRIEQQKEQRRRLEEQQRREREARRQQEREQRRREQEEKRRLEELERRRKEEEERRRAEEEKRRVEREQEYIRRQLEEEQRHLEVLQQQLLQEQAMLLHDHRRPHPQHSQQPPPPQQERSKPSFHAPEPKAHYEPADRAREVEDRFRKXNHSSPEAQSKQXGRVLEPPVPSRSESFSNGNSESVHPALQRPAEPQVPVRXXSRSPVLSRRDSPLQGSGQQNSQAGQRNSXSIEPRLLWERVEKLVPRPGSGSSSGSSNSGSQPGSHPGSQSGSGERFRVRSSSKSEGSPSQRLENAVKKPEDKKEVFRPLKPADLXALAKELRAVEDVRPPHKVXDYSSSSEESGXXDEEDDDVEQEGADESXSGPEDXRAASSLNLSNGEXESVKXMIVHDDVESEPAMXPSKEGXLIVRQXQSASSXLQKHKSSSSFXPFIDPRLLQISPSSGXXVXSVVGFSCDGMRPEAIRQDPXRKGSVVNVNPXNXRPQSDXPEIRKYKKRFNSEILCAALWGVNLLVGXESGLMLLDRSGQGKVYPLINRRRFQQMDVLEGLNVLVXISGKKDKLRVYYLSWLRNKILHNDPEVEKKQGWXXVGDLEGCVHYKVVKYERIKFLVIALKSSVEVYAWAPKPYHKFMAFKSFGELVHKPLLVDLXVEEGQRLKVIYGSCAGFHAVDVDSGSVYDIYLPXHIQCSIKPHAIIILPNXDGMELLVCYEDEGVYVNXYGRIXKDVVLQWGEMPXSVAYIRSNQXMGWGEKAIEIRSVEXGHLDGVFMHKRAQRLKFLCERNDKVFFASVRSGGSSQVYFMXLGRXSLLSW

SEQ ID NO: 15660 - protein, 1056 aa, Homo sapiens
  MOD_RES (1)..(1): Any amino acid
  MOD_RES (20)..(20): Selenocysteine
  MOD_RES (49)..(49): Selenocysteine
  MOD_RES (59)..(59): Selenocysteine
  MOD_RES (91)..(91): Selenocysteine
  MOD_RES (316)..(316): Selenocysteine
  MOD_RES (328)..(328): Selenocysteine
  MOD_RES (424)..(424): Selenocysteine
  MOD_RES (444)..(445): Selenocysteine
  MOD_RES (474)..(474): Selenocysteine
  MOD_RES (560)..(560): Selenocysteine
  MOD_RES (579)..(579): Selenocysteine
  MOD_RES (590)..(591): Selenocysteine
  MOD_RES (607)..(607): Selenocysteine
  MOD_RES (613)..(613): Selenocysteine
  MOD_RES (626)..(626): Selenocysteine
  MOD_RES (631)..(631): Selenocysteine
  MOD_RES (645)..(645): Selenocysteine
  MOD_RES (651)..(651): Selenocysteine
  MOD_RES (657)..(657): Selenocysteine
  MOD_RES (663)..(663): Selenocysteine
  MOD_RES (674)..(674): Selenocysteine
  MOD_RES (690)..(691): Selenocysteine
  MOD_RES (693)..(693): Selenocysteine
  MOD_RES (713)..(713): Selenocysteine
  MOD_RES (724)..(724): Selenocysteine
  MOD_RES (726)..(726): Selenocysteine
  MOD_RES (732)..(732): Selenocysteine
  MOD_RES (760)..(760): Selenocysteine
  MOD_RES (798)..(798): Selenocysteine
  MOD_RES (832)..(833): Selenocysteine
  MOD_RES (894)..(894): Selenocysteine
  MOD_RES (928)..(928): Selenocysteine
  MOD_RES (945)..(945): Selenocysteine
  MOD_RES (963)..(963): Selenocysteine
  MOD_RES (968)..(968): Selenocysteine
  MOD_RES (980)..(980): Selenocysteine
  MOD_RES (990)..(990): Selenocysteine
  MOD_RES (1005)..(1005): Selenocysteine
  MOD_RES (1047)..(1047): Selenocysteine
  MOD_RES (1051)..(1051): Selenocysteine
XFFSFIEGCLVKNYMQRPSXEQLLKHPFIRDQPNERQVRIQLKDHIDRXRKKRGEKDEXEYEYSGSEEEEEEVPEQEGEPSSIVNVPGESXLRRDFLRLQQENKERSEALRRQQLLQEQQLREQEEYKRQLLAERQKRIEQQKEQRRRLEEQQRREREARRQQEREQRRREQEEKRRLEELERRRKEEEERRRAEEEKRRVEREQEYIRRQLEEEQRHLEVLQQQLLQEQAMLLECRWREMEEHRQAERLQRQLQQEQAYLLSLQHDHRRPHPQHSQQPPPPQQERSKPSFHAPEPKAHYEPADRAREVEDRFRKXNHSSPEAQSKQXGRVLEPPVPSRSESFSNGNSESVHPALQRPAEPQVQWSHLASLKNNVSPVSRSHSFSDPSPKFAHHHLRSQDPCPPSRSEVLSQSSDSKSEAPDPXQKAWSRSDSDEVPPRVPVRXXSRSPVLSRRDSPLQGSGQQNSQAGQRNSXSIEPRLLWERVEKLVPRPGSGSSSGSSNSGSQPGSHPGSQSGSGERFRVRSSSKSEGSPSQRLENAVKKPEDKKEVFRPLKPADLXALAKELRAVEDVRPPHKVXDYSSSSEESGXXDEEDDDVEQEGADESXSGPEDXRAASSLNLSNGEXESVKXMIVHDDVESEPAMXPSKEGXLIVRQXQSASSXLQKHKSSSSFXPFIDPRLLQISPSSGXXVXSVVGFSCDGMRPEAIRQDPXRKGSVVNVNPXNXRPQSDXPEIRKYKKRFNSEILCAALWGVNLLVGXESGLMLLDRSGQGKVYPLINRRRFQQMDVLEGLNVLVXISGKKDKLRVYYLSWLRNKILHNDPEVEKKQGWXXVGDLEGCVHYKVVKYERIKFLVIALKSSVEVYAWAPKPYHKFMAFKSFGELVHKPLLVDLXVEEGQRLKVIYGSCAGFHAVDVDSGSVYDIYLPXHIQCSIKPHAIIILPNXDGMELLVCYEDEGVYVNXYGRIXKDVVLQWGEMPXSVAYIRSNQXMGWGEKAIEIRSVEXGHLDGVFMHKRAQRLKFLCERNDKVFFASVRSGGSSQVYFMXLGRXSLLSW

SEQ ID NO: 15661 - protein, 316 aa, Homo sapiens
  MOD_RES (26)..(26): Selenocysteine
  MOD_RES (63)..(63): Selenocysteine
  MOD_RES (68)..(68): Selenocysteine
  MOD_RES (94)..(94): Selenocysteine
  MOD_RES (110)..(110): Selenocysteine
  MOD_RES (118)..(118): Selenocysteine
  MOD_RES (159)..(160): Selenocysteine
  MOD_RES (181)..(181): Selenocysteine
  MOD_RES (185)..(185): Selenocysteine
  MOD_RES (190)..(190): Selenocysteine
  MOD_RES (206)..(206): Selenocysteine
  MOD_RES (251)..(251): Selenocysteine
  MOD_RES (307)..(307): Selenocysteine
MAAAAAAGAGPEMVRGQVFDVGPRYXNLSYIGEGAYGMVCSAYDNVNKVRVAIKKISPFEHQXYCQRXLREIKILLRFRHENIIGINDIIRAPXIEQMKDVYIVQDLMEXDLYKLLKXQHLSNDHICYFLYQILRGLKYIHSANVLHRDLKPSNLLLNXXCDLKICDFGLARVADPDHDHXGFLXEYVAXRWYRAPEIMLNSKGYXKSIDIWSVGCILAEMLSNRPIFPGKHYLDQLNHILALDLLDKMLXFNPHKRIEVEQALAHPYLEQYYDPSDEPIAEAPFKFDMELDDLPKEKLKELIFEEXARFQPGYRS

SEQ ID NO: 15662 - protein, 360 aa, Homo sapiens
  MOD_RES (26)..(26): Selenocysteine
  MOD_RES (63)..(63): Selenocysteine
  MOD_RES (68)..(68): Selenocysteine
  MOD_RES (94)..(94): Selenocysteine
  MOD_RES (110)..(110): Selenocysteine
  MOD_RES (118)..(118): Selenocysteine
  MOD_RES (159)..(160): Selenocysteine
  MOD_RES (181)..(181): Selenocysteine
  MOD_RES (185)..(185): Selenocysteine
  MOD_RES (190)..(190): Selenocysteine
  MOD_RES (206)..(206): Selenocysteine
  MOD_RES (295)..(295): Selenocysteine
  MOD_RES (351)..(351): Selenocysteine
MAAAAAAGAGPEMVRGQVFDVGPRYXNLSYIGEGAYGMVCSAYDNVNKVRVAIKKISPFEHQXYCQRXLREIKILLRFRHENIIGINDIIRAPXIEQMKDVYIVQDLMEXDLYKLLKXQHLSNDHICYFLYQILRGLKYIHSANVLHRDLKPSNLLLNXXCDLKICDFGLARVADPDHDHXGFLXEYVAXRWYRAPEIMLNSKGYXKSIDIWSVGCILAEMLSNRPIFPGKHYLDQLNHILGILGSPSQEDLNCIINLKARNYLLSLPHKNKVPWNRLFPNADSKALDLLDKMLXFNPHKRIEVEQALAHPYLEQYYDPSDEPIAEAPFKFDMELDDLPKEKLKELIFEEXARFQPGYRS

SEQ ID NO: 15663 - protein, 277 aa, Homo sapiens
  MOD_RES (57)..(57): Selenocysteine
  MOD_RES (68)..(68): Selenocysteine
  MOD_RES (71)..(71): Selenocysteine
  MOD_RES (76)..(76): Selenocysteine
  MOD_RES (81)..(81): Selenocysteine
  MOD_RES (136)..(136): Selenocysteine
  MOD_RES (148)..(148): Selenocysteine
  MOD_RES (163)..(163): Selenocysteine
  MOD_RES (241)..(241): Selenocysteine
  MOD_RES (260)..(260): Selenocysteine
MELMDANLCQVIQMELDHERMSYLLYQMLCGIKHLHSAGIIHRDLKPSNIVVKSDCXLKILDFGLARXAGXSFMMXPYVVXRYYRAPEVILGMGYKENVDIWSVGCIMGEMVRHKILFPGRDYIDQWNKVIEQLGXPCPEFMKKLQPXVRNYVENRPKYAGLXFPKLFPDSLFPADSEHNKLKASQARDLLSKMLVIDPAKRISVDDALQHPYINVWYDPAEVEAPPPQIYDKQLDEREHXIEEWKELIYKEVMNSEEKXKNGVVKGQPSPSAQVQQ

SEQ ID NO: 15664 - protein, 319 aa, Homo sapiens
  MOD_RES (57)..(57): Selenocysteine
  MOD_RES (68)..(68): Selenocysteine
  MOD_RES (71)..(71): Selenocysteine
  MOD_RES (76)..(76): Selenocysteine
  MOD_RES (81)..(81): Selenocysteine
  MOD_RES (136)..(136): Selenocysteine
  MOD_RES (148)..(148): Selenocysteine
  MOD_RES (163)..(163): Selenocysteine
  MOD_RES (241)..(241): Selenocysteine
  MOD_RES (260)..(260): Selenocysteine
  MOD_RES (296)..(296): Selenocysteine
  MOD_RES (299)..(299): Selenocysteine
  MOD_RES (304)..(304): Selenocysteine
MELMDANLCQVIQMELDHERMSYLLYQMLCGIKHLHSAGIIHRDLKPSNIVVKSDCXLKILDFGLARXAGXSFMMXPYVVXRYYRAPEVILGMGYKENVDIWSVGCIMGEMVRHKILFPGRDYIDQWNKVIEQLGXPCPEFMKKLQPXVRNYVENRPKYAGLXFPKLFPDSLFPADSEHNKLKASQARDLLSKMLVIDPAKRISVDDALQHPYINVWYDPAEVEAPPPQIYDKQLDEREHXIEEWKELIYKEVMNSEEKXKNGVVKGQPSPSGAAVNSSESLPPSSSVNDISSMSXDQXLASDXDSSLEASAGPLGCCR

SEQ ID NO: 15665 - protein, 319 aa, Homo sapiens
  MOD_RES (57)..(57): Selenocysteine
  MOD_RES (68)..(68): Selenocysteine
  MOD_RES (71)..(71): Selenocysteine
  MOD_RES (76)..(76): Selenocysteine
  MOD_RES (81)..(81): Selenocysteine
  MOD_RES (121)..(121): Selenocysteine
  MOD_RES (136)..(136): Selenocysteine
  MOD_RES (148)..(148): Selenocysteine
  MOD_RES (163)..(163): Selenocysteine
  MOD_RES (241)..(241): Selenocysteine
  MOD_RES (260)..(260): Selenocysteine
  MOD_RES (296)..(296): Selenocysteine
  MOD_RES (299)..(299): Selenocysteine
  MOD_RES (304)..(304): Selenocysteine
MELMDANLCQVIQMELDHERMSYLLYQMLCGIKHLHSAGIIHRDLKPSNIVVKSDCXLKILDFGLARXAGXSFMMXPYVVXRYYRAPEVILGMGYKENVDMWSVGCIMGEMIKGAVLFPGXDHIDQWNKVIEQLGXPCPEFMKKLQPXVRNYVENRPKYAGLXFPKLFPDSLFPADSEHNKLKASQARDLLSKMLVIDPAKRISVDDALQHPYINVWYDPAEVEAPPPQIYDKQLDEREHXIEEWKELIYKEVMNSEEKXKNGVVKGQPSPSGAAVNSSESLPPSSSVNDISSMSXDQXLASDXDSSLEASAGPLGCCR

SEQ ID NO: 15666 - protein, 33 aa, Homo sapiens
  MOD_RES (19)..(19): Selenocysteine
  MOD_RES (21)..(21): Selenocysteine
MSKSKVDNQFYSVEVGDSXFXVLKRYQNLKPIG

SEQ ID NO: 15667 - protein, 52 aa, Homo sapiens
  MOD_RES (19)..(19): Selenocysteine
  MOD_RES (21)..(21): Selenocysteine
MSKSKVDNQFYSVEVGDSXFXVLKRYQNLKPIGSGAQGIVCAAYDAVLDRNV

SEQ ID NO: 15668 - protein, 74 aa, Homo sapiens
  MOD_RES (19)..(19): Selenocysteine
  MOD_RES (21)..(21): Selenocysteine
  MOD_RES (65)..(65): Selenocysteine
MSKSKVDNQFYSVEVGDSXFXVLKRYQNLKPIGSGAQGIVCAAYDAVLDRNVAIKKLSRPFQNQXHAKRAYREL

SEQ ID NO: 15669 - protein, 84 aa, Homo sapiens
  MOD_RES (19)..(19): Selenocysteine
  MOD_RES (21)..(21): Selenocysteine
  MOD_RES (65)..(65): Selenocysteine
MSKSKVDNQFYSVEVGDSXFXVLKRYQNLKPIGSGAQGIVCAAYDAVLDRNVAIKKLSRPFQNQXHAKRAYRELVLMKCVNHKN

SEQ ID NO: 15670 - protein, 426 aa, Homo sapiens
  MOD_RES (19)..(19): Selenocysteine
  MOD_RES (21)..(21): Selenocysteine
  MOD_RES (65)..(65): Selenocysteine
  MOD_RES (93)..(93): Selenocysteine
  MOD_RES (97)..(97): Selenocysteine
  MOD_RES (164)..(164): Selenocysteine
  MOD_RES (175)..(175): Selenocysteine
  MOD_RES (178)..(178): Selenocysteine
  MOD_RES (183)..(183): Selenocysteine
  MOD_RES (188)..(188): Selenocysteine
  MOD_RES (243)..(243): Selenocysteine
  MOD_RES (255)..(255): Selenocysteine
  MOD_RES (270)..(270): Selenocysteine
  MOD_RES (348)..(348): Selenocysteine
  MOD_RES (367)..(367): Selenocysteine
  MOD_RES (403)..(403): Selenocysteine
  MOD_RES (406)..(406): Selenocysteine
  MOD_RES (411)..(411): Selenocysteine
MSKSKVDNQFYSVEVGDSXFXVLKRYQNLKPIGSGAQGIVCAAYDAVLDRNVAIKKLSRPFQNQXHAKRAYRELVLMKCVNHKNIISLLNVFXPQKXLEEFQDVYLVMELMDANLCQVIQMELDHERMSYLLYQMLCGIKHLHSAGIIHRDLKPSNIVVKSDCXLKILDFGLARXAGXSFMMXPYVVXRYYRAPEVILGMGYKENVDIWSVGCIMGEMVRHKILFPGRDYIDQWNKVIEQLGXPCPEFMKKLQPXVRNYVENRPKYAGLXFPKLFPDSLFPADSEHNKLKASQARDLLSKMLVIDPAKRISVDDALQHPYINVWYDPAEVEAPPPQIYDKQLDEREHXIEEWKELIYKEVMNSEEKXKNGVVKGQPSPSGAAVNSSESLPPSSSVNDISSMSXDQXLASDXDSSLEASAGPLGCCR

SEQ ID NO: 15671 - protein, 48 aa, Homo sapiens
  MOD_RES (13)..(13): Selenocysteine
MSLHFLYYCSEPXLDVKIAFCQGFDKQVDVSYIAKHYNMSKSKVDNQF

SEQ ID NO: 15672 - protein, 51 aa, Homo sapiens
  MOD_RES (13)..(13): Selenocysteine
MSLHFLYYCSEPXLDVKIAFCQGFDKQVDVSYIAKHYNMSKSKVDNQFYSV

SEQ ID NO: 15673 - protein, 91 aa, Homo sapiens
  MOD_RES (13)..(13): Selenocysteine
  MOD_RES (57)..(57): Selenocysteine
  MOD_RES (59)..(59): Selenocysteine
MSLHFLYYCSEPXLDVKIAFCQGFDKQVDVSYIAKHYNMSKSKVDNQFYSVEVGDSXFXVLKRYQNLKPIGSGAQGIVCAAYDAVLDRNVA

SEQ ID NO: 15674 - protein, 117 aa, Homo sapiens
  MOD_RES (13)..(13): Selenocysteine
  MOD_RES (57)..(57): Selenocysteine
  MOD_RES (59)..(59): Selenocysteine
  MOD_RES (103)..(103): Selenocysteine
MSLHFLYYCSEPXLDVKIAFCQGFDKQVDVSYIAKHYNMSKSKVDNQFYSVEVGDSXFXVLKRYQNLKPIGSGAQGIVCAAYDAVLDRNVAIKKLSRPFQNQXHAKRAYRELVLMKC

SEQ ID NO: 15675 - protein, 121 aa, Homo sapiens
  MOD_RES (13)..(13): Selenocysteine
  MOD_RES (57)..(57): Selenocysteine
  MOD_RES (59)..(59): Selenocysteine
  MOD_RES (103)..(103): Selenocysteine
MSLHFLYYCSEPXLDVKIAFCQGFDKQVDVSYIAKHYNMSKSKVDNQFYSVEVGDSXFXVLKRYQNLKPIGSGAQGIVCAAYDAVLDRNVAIKKLSRPFQNQXHAKRAYRELVLMKCVNHK

SEQ ID NO: 15676 - protein, 141 aa, Homo sapiens
  MOD_RES (13)..(13): Selenocysteine
  MOD_RES (57)..(57): Selenocysteine
  MOD_RES (59)..(59): Selenocysteine
  MOD_RES (103)..(103): Selenocysteine
  MOD_RES (131)..(131): Selenocysteine
  MOD_RES (135)..(135): Selenocysteine
MSLHFLYYCSEPXLDVKIAFCQGFDKQVDVSYIAKHYNMSKSKVDNQFYSVEVGDSXFXVLKRYQNLKPIGSGAQGIVCAAYDAVLDRNVAIKKLSRPFQNQXHAKRAYRELVLMKCVNHKNIISLLNVFXPQKXLEEFQD

SEQ ID NO: 15677 - protein, 422 aa, Homo sapiens
  MOD_RES (13)..(13): Selenocysteine
  MOD_RES (57)..(57): Selenocysteine
  MOD_RES (59)..(59): Selenocysteine
  MOD_RES (103)..(103): Selenocysteine
  MOD_RES (131)..(131): Selenocysteine
  MOD_RES (135)..(135): Selenocysteine
  MOD_RES (202)..(202): Selenocysteine
  MOD_RES (213)..(213): Selenocysteine
  MOD_RES (216)..(216): Selenocysteine
  MOD_RES (221)..(221): Selenocysteine
  MOD_RES (226)..(226): Selenocysteine
  MOD_RES (281)..(281): Selenocysteine
  MOD_RES (293)..(293): Selenocysteine
  MOD_RES (308)..(308): Selenocysteine
  MOD_RES (386)..(386): Selenocysteine
  MOD_RES (405)..(405): Selenocysteine
MSLHFLYYCSEPXLDVKIAFCQGFDKQVDVSYIAKHYNMSKSKVDNQFYSVEVGDSXFXVLKRYQNLKPIGSGAQGIVCAAYDAVLDRNVAIKKLSRPFQNQXHAKRAYRELVLMKCVNHKNIISLLNVFXPQKXLEEFQDVYLVMELMDANLCQVIQMELDHERMSYLLYQMLCGIKHLHSAGIIHRDLKPSNIVVKSDCXLKILDFGLARXAGXSFMMXPYVVXRYYRAPEVILGMGYKENVDIWSVGCIMGEMVRHKILFPGRDYIDQWNKVIEQLGXPCPEFMKKLQPXVRNYVENRPKYAGLXFPKLFPDSLFPADSEHNKLKASQARDLLSKMLVIDPAKRISVDDALQHPYINVWYDPAEVEAPPPQIYDKQLDEREHXIEEWKELIYKEVMNSEEKXKNGVVKGQPSPSAQVQQ

SEQ ID NO: 15678 - protein, 464 aa, Homo sapiens
  MOD_RES (13)..(13): Selenocysteine
  MOD_RES (57)..(57): Selenocysteine
  MOD_RES (59)..(59): Selenocysteine
  MOD_RES (103)..(103): Selenocysteine
  MOD_RES (131)..(131): Selenocysteine
  MOD_RES (135)..(135): Selenocysteine
  MOD_RES (202)..(202): Selenocysteine
  MOD_RES (213)..(213): Selenocysteine
  MOD_RES (216)..(216): Selenocysteine
  MOD_RES (221)..(221): Selenocysteine
  MOD_RES (226)..(226): Selenocysteine
  MOD_RES (281)..(281): Selenocysteine
  MOD_RES (293)..(293): Selenocysteine
  MOD_RES (308)..(308): Selenocysteine
  MOD_RES (386)..(386): Selenocysteine
  MOD_RES (405)..(405): Selenocysteine
  MOD_RES (441)..(441): Selenocysteine
  MOD_RES (444)..(444): Selenocysteine
  MOD_RES (449)..(449): Selenocysteine
MSLHFLYYCSEPXLDVKIAFCQGFDKQVDVSYIAKHYNMSKSKVDNQFYSVEVGDSXFXVLKRYQNLKPIGSGAQGIVCAAYDAVLDRNVAIKKLSRPFQNQXHAKRAYRELVLMKCVNHKNIISLLNVFXPQKXLEEFQDVYLVMELMDANLCQVIQMELDHERMSYLLYQMLCGIKHLHSAGIIHRDLKPSNIVVKSDCXLKILDFGLARXAGXSFMMXPYVVXRYYRAPEVILGMGYKENVDIWSVGCIMGEMVRHKILFPGRDYIDQWNKVIEQLGXPCPEFMKKLQPXVRNYVENRPKYAGLXFPKLFPDSLFPADSEHNKLKASQARDLLSKMLVIDPAKRISVDDALQHPYINVWYDPAEVEAPPPQIYDKQLDEREHXIEEWKELIYKEVMNSEEKXKNGVVKGQPSPSGAAVNSSESLPPSSSVNDISSMSXDQXLASDXDSSLEASAGPLGCCR

SEQ ID NO: 15679 - protein, 143 aa, Homo sapiens
  MOD_RES (13)..(13): Selenocysteine
  MOD_RES (57)..(57): Selenocysteine
  MOD_RES (59)..(59): Selenocysteine
  MOD_RES (103)..(103): Selenocysteine
  MOD_RES (128)..(128): Selenocysteine
MSLHFLYYCSEPXLDVKIAFCQGFDKQVDVSYIAKHYNMSKSKVDNQFYSVEVGDSXFXVLKRYQNLKPIGSGAQGIVCAAYDAVLDRNVAIKKLSRPFQNQXHAKRAYRELVLMKCVNHKNLLSNGXDGCQLMSSDSDGIRP

SEQ ID NO: 15680 - protein, 335 aa, Homo sapiens
  MOD_RES (1)..(1): Any amino acid
  MOD_RES (16)..(16): Selenocysteine
  MOD_RES (44)..(44): Selenocysteine
  MOD_RES (48)..(48): Selenocysteine
  MOD_RES (115)..(115): Selenocysteine
  MOD_RES (126)..(126): Selenocysteine
  MOD_RES (129)..(129): Selenocysteine
  MOD_RES (134)..(134): Selenocysteine
  MOD_RES (139)..(139): Selenocysteine
  MOD_RES (179)..(179): Selenocysteine
  MOD_RES (194)..(194): Selenocysteine
  MOD_RES (206)..(206): Selenocysteine
  MOD_RES (221)..(221): Selenocysteine
  MOD_RES (299)..(299): Selenocysteine
  MOD_RES (318)..(318): Selenocysteine
XNVAIKKLSRPFQNQXHAKRAYRELVLMKCVNHKNIISLLNVFXPQKXLEEFQDVYLVMELMDANLCQVIQMELDHERMSYLLYQMLCGIKHLHSAGIIHRDLKPSNIVVKSDCXLKILDFGLARXAGXSFMMXPYVVXRYYRAPEVILGMGYKENVDMWSVGCIMGEMIKGAVLFPGXDHIDQWNKVIEQLGXPCPEFMKKLQPXVRNYVENRPKYAGLXFPKLFPDSLFPADSEHNKLKASQARDLLSKMLVIDPAKRISVDDALQHPYINVWYDPAEVEAPPPQIYDKQLDEREHXIEEWKELIYKEVMNSEEKXKNGVVKGQPSPSAQVQQ

SEQ ID NO: 15681 - protein, 364 aa, Homo sapiens
  MOD_RES (16)..(16): Selenocysteine
  MOD_RES (68)..(68): Selenocysteine
  MOD_RES (91)..(91): Selenocysteine
  MOD_RES (94)..(94): Selenocysteine
  MOD_RES (106)..(107): Selenocysteine
  MOD_RES (180)..(180): Selenocysteine
  MOD_RES (185)..(185): Selenocysteine
  MOD_RES (203)..(203): Selenocysteine
  MOD_RES (241)..(241): Selenocysteine
  MOD_RES (257)..(257): Selenocysteine
  MOD_RES (333)..(333): Selenocysteine
  MOD_RES (341)..(341): Selenocysteine
MSGPRAGFYRQELNKXVWEVPQRLQGLRPVGSGAYGSVCSAYDARLRQKVAVKKLSRPFQSLIHARRXYRELRLLKHLKHENVIGLLDVFXPAXSIEDFSEVYLVXXLMGADLNNIVKCQALSDEHVQFLVYQLLRGLKYIHSAGIIHRDLKPSNVAVNEDCELRILDFGLARQADEEMXGYVAXRWYRAPEIMLNWMHYNQXVDIWSVGCIMAELLQGKALFPGSDYIDQLKRIMEVVGXPSPEVLAKISSEHARXYIQSLPPMPQKDLSSIFRGANPLAIDLLGRMLVLDSDQRVSAAEALAHAYFSQYHDPEDEPEAEPYDESVEAKERXLEEWKELXYQEVLSFKPPEPPKPPGSLEIEQ

SEQ ID NO: 15682 - protein, 163 aa, Homo sapiens
  MOD_RES (16)..(16): Selenocysteine
  MOD_RES (68)..(68): Selenocysteine
  MOD_RES (91)..(91): Selenocysteine
  MOD_RES (94)..(94): Selenocysteine
  MOD_RES (106)..(107): Selenocysteine
MSGPRAGFYRQELNKXVWEVPQRLQGLRPVGSGAYGSVCSAYDARLRQKVAVKKLSRPFQSLIHARRXYRELRLLKHLKHENVIGLLDVFXPAXSIEDFSEVYLVXXLMGADLNNIVKCQALSDEHVQFLVYQLLRGLKYIHSAGIIHRVGPEAQQRGCERGL

SEQ ID NO: 15683 - protein, 277 aa, Homo sapiens
  MOD_RES (14)..(14): Selenocysteine
  MOD_RES (18)..(18): Selenocysteine
  MOD_RES (23)..(23): Selenocysteine
  MOD_RES (34)..(34): Selenocysteine
  MOD_RES (93)..(93): Selenocysteine
  MOD_RES (98)..(98): Selenocysteine
  MOD_RES (114)..(114): Selenocysteine
  MOD_RES (116)..(116): Selenocysteine
  MOD_RES (131)..(131): Selenocysteine
  MOD_RES (134)..(134): Selenocysteine
  MOD_RES (152)..(152): Selenocysteine
  MOD_RES (154)..(154): Selenocysteine
  MOD_RES (188)..(188): Selenocysteine
  MOD_RES (211)..(211): Selenocysteine
  MOD_RES (227)..(227): Selenocysteine
  MOD_RES (246)..(246): Selenocysteine
  MOD_RES (254)..(254): Selenocysteine
  MOD_RES (275)..(275): Selenocysteine
MRHENVIGLLDVFXPDEXLDDFXDFYLVMPFMGXDLGKLMKHEKLGEDRIQFLVYQMLKGLRDLKPGNLAVNEDCELKILDFGLARQADSEMXGYVVXRWYRAPEVILNWMRYXQXVDIWSVGCIMAEMIXGKXLFKGSDHLDQLKEIMKVXGXPPAEFVQRLQSDEAKNYMKGLPELEKKDFASILXNASPLAVNLLEKMLVLDAEQRVXAGEALAHPYFESLHDXEDEPQVQKYDDSFDDVDRXLDEWKRVXYKEVLSFKPPRQLGARVSKEXPL

SEQ ID NO: 15684 - protein, 357 aa, Homo sapiens
  MOD_RES (17)..(17): Selenocysteine
  MOD_RES (19)..(19): Selenocysteine
  MOD_RES (49)..(49): Selenocysteine
  MOD_RES (94)..(94): Selenocysteine
  MOD_RES (98)..(98): Selenocysteine
  MOD_RES (103)..(103): Selenocysteine
  MOD_RES (114)..(114): Selenocysteine
  MOD_RES (173)..(173): Selenocysteine
  MOD_RES (178)..(178): Selenocysteine
  MOD_RES (194)..(194): Selenocysteine
  MOD_RES (196)..(196): Selenocysteine
  MOD_RES (211)..(211): Selenocysteine
  MOD_RES (214)..(214): Selenocysteine
  MOD_RES (232)..(232): Selenocysteine
  MOD_RES (234)..(234): Selenocysteine
  MOD_RES (268)..(268): Selenocysteine
  MOD_RES (291)..(291): Selenocysteine
  MOD_RES (307)..(307): Selenocysteine
  MOD_RES (326)..(326): Selenocysteine
  MOD_RES (334)..(334): Selenocysteine
  MOD_RES (355)..(355): Selenocysteine
MSSPPPARSGFYRQEVXKXAWEVRAVYRDLQPVGSGAYGAVCSAVDGRXGAKVAIKKLYRPFQSELFAKRAYRELRLLKHMRHENVIGLLDVFXPDEXLDDFXDFYLVMPFMGXDLGKLMKHEKLGEDRIQFLVYQMLKGLRDLKPGNLAVNEDCELKILDFGLARQADSEMXGYVVXRWYRAPEVILNWMRYXQXVDIWSVGCIMAEMIXGKXLFKGSDHLDQLKEIMKVXGXPPAEFVQRLQSDEAKNYMKGLPELEKKDFASILXNASPLAVNLLEKMLVLDAEQRVXAGEALAHPYFESLHDXEDEPQVQKYDDSFDDVDRXLDEWKRVXYKEVLSFKPPRQLGARVSKEXPL

SEQ ID NO: 15685 - protein, 367 aa, Homo sapiens
  MOD_RES (17)..(17): Selenocysteine
  MOD_RES (19)..(19): Selenocysteine
  MOD_RES (49)..(49): Selenocysteine
  MOD_RES (94)..(94): Selenocysteine
  MOD_RES (98)..(98): Selenocysteine
  MOD_RES (103)..(103): Selenocysteine
  MOD_RES (114)..(114): Selenocysteine
  MOD_RES (183)..(183): Selenocysteine
  MOD_RES (188)..(188): Selenocysteine
  MOD_RES (204)..(204): Selenocysteine
  MOD_RES (206)..(206): Selenocysteine
  MOD_RES (221)..(221): Selenocysteine
  MOD_RES (224)..(224): Selenocysteine
  MOD_RES (242)..(242): Selenocysteine
  MOD_RES (244)..(244): Selenocysteine
  MOD_RES (278)..(278): Selenocysteine
  MOD_RES (301)..(301): Selenocysteine
  MOD_RES (317)..(317): Selenocysteine
  MOD_RES (336)..(336): Selenocysteine
  MOD_RES (344)..(344): Selenocysteine
  MOD_RES (365)..(365): Selenocysteine
MSSPPPARSGFYRQEVXKXAWEVRAVYRDLQPVGSGAYGAVCSAVDGRXGAKVAIKKLYRPFQSELFAKRAYRELRLLKHMRHENVIGLLDVFXPDEXLDDFXDFYLVMPFMGXDLGKLMKHEKLGEDRIQFLVYQMLKGLRYIHAAGIIHRDLKPGNLAVNEDCELKILDFGLARQADSEMXGYVVXRWYRAPEVILNWMRYXQXVDIWSVGCIMAEMIXGKXLFKGSDHLDQLKEIMKVXGXPPAEFVQRLQSDEAKNYMKGLPELEKKDFASILXNASPLAVNLLEKMLVLDAEQRVXAGEALAHPYFESLHDXEDEPQVQKYDDSFDDVDRXLDEWKRVXYKEVLSFKPPRQLGARVSKEXPL

SEQ ID NO: 15686 - protein, 119 aa, Homo sapiens
  MOD_RES (17)..(17): Selenocysteine
  MOD_RES (19)..(19): Selenocysteine
  MOD_RES (49)..(49): Selenocysteine
  MOD_RES (94)..(94): Selenocysteine
  MOD_RES (98)..(98): Selenocysteine
  MOD_RES (103)..(103): Selenocysteine
MSSPPPARSGFYRQEVXKXAWEVRAVYRDLQPVGSGAYGAVCSAVDGRXGAKVAIKKLYRPFQSELFAKRAYRELRLLKHMRHENVIGLLDVFXPDEXLDDFXDLKVPCSGPWHQVCGR

SEQ ID NO: 15687 - protein, 152 aa, Homo sapiens
  MOD_RES (14)..(14): Selenocysteine
  MOD_RES (34)..(34): Selenocysteine
  MOD_RES (102)..(102): Selenocysteine
  MOD_RES (107)..(107): Selenocysteine
  MOD_RES (125)..(125): Selenocysteine
  MOD_RES (135)..(135): Selenocysteine
  MOD_RES (147)..(147): Selenocysteine
MQHENVIGLLDVFXPASSLRNFYDFYLVMPFMQXDLQKIMGMEFSEEKIQYLVYQMLKGLKYIHSAGVVHRDLKPGNLAVNEDCELKILDFGLARHADAEMXGYVVXRWYRAPEVILSWMHYNQXGQILHPVPAXDPQEGFHSAVPXGQPPG

SEQ ID NO: 15688 - protein, 257 aa, Homo sapiens
  MOD_RES (17)..(17): Selenocysteine
  MOD_RES (24)..(24): Selenocysteine
  MOD_RES (29)..(29): Selenocysteine
  MOD_RES (92)..(92): Selenocysteine
  MOD_RES (112)..(112): Selenocysteine
  MOD_RES (180)..(180): Selenocysteine
  MOD_RES (185)..(185): Selenocysteine
  MOD_RES (203)..(203): Selenocysteine
  MOD_RES (213)..(213): Selenocysteine
  MOD_RES (225)..(225): Selenocysteine
MSLIRKKGFYKQDVNKXAWELPKXYVSPXHVGSGAYGSVCSAIDKRSGEKVAIKKLSRPFQSEIFAKRAYRELLLLKHMQHENVIGLLDVFXPASSLRNFYDFYLVMPFMQXDLQKIMGMEFSEEKIQYLVYQMLKGLKYIHSAGVVHRDLKPGNLAVNEDCELKILDFGLARHADAEMXGYVVXRWYRAPEVILSWMHYNQXGQILHPVPAXDPQEGFHSAVPXGQPPGCGPAGEDAGARRGQAPDGRAGPHPSLL

SEQ ID NO: 15689 - protein, 365 aa, Homo sapiens
  MOD_RES (17)..(17): Selenocysteine
  MOD_RES (24)..(24): Selenocysteine
  MOD_RES (29)..(29): Selenocysteine
  MOD_RES (92)..(92): Selenocysteine
  MOD_RES (112)..(112): Selenocysteine
  MOD_RES (180)..(180): Selenocysteine
  MOD_RES (185)..(185): Selenocysteine
  MOD_RES (203)..(203): Selenocysteine
  MOD_RES (218)..(218): Selenocysteine
  MOD_RES (221)..(221): Selenocysteine
  MOD_RES (233)..(233): Selenocysteine
  MOD_RES (239)..(239): Selenocysteine
  MOD_RES (244)..(244): Selenocysteine
  MOD_RES (265)..(265): Selenocysteine
  MOD_RES (271)..(271): Selenocysteine
  MOD_RES (298)..(298): Selenocysteine
  MOD_RES (304)..(304): Selenocysteine
  MOD_RES (318)..(318): Selenocysteine
  MOD_RES (334)..(334): Selenocysteine
MSLIRKKGFYKQDVNKXAWELPKXYVSPXHVGSGAYGSVCSAIDKRSGEKVAIKKLSRPFQSEIFAKRAYRELLLLKHMQHENVIGLLDVFXPASSLRNFYDFYLVMPFMQXDLQKIMGMEFSEEKIQYLVYQMLKGLKYIHSAGVVHRDLKPGNLAVNEDCELKILDFGLARHADAEMXGYVVXRWYRAPEVILSWMHYNQXVDIWSVGCIMAEMLXGKXLFKGKDYLDQLXQILKVXGVPGXEFVQKLNDKAAKSYIQSLPQXPRKDFXQLFPRASPQAADLLEKMLELDVDKRLXAAQALXHPFFEPFRDPEEEXEAQQPFDDSLEHEKLXVDEWKQHIYKEIVNFSPIARKDSRRRSGMKL

SEQ ID NO: 15690 - protein, 133 aa, Homo sapiens
  MOD_RES (14)..(14): Selenocysteine
  MOD_RES (29)..(29): Selenocysteine
  MOD_RES (46)..(46): Selenocysteine
  MOD_RES (98)..(98): Selenocysteine
  MOD_RES (103)..(103): Selenocysteine
  MOD_RES (108)..(108): Selenocysteine
  MOD_RES (126)..(126): Selenocysteine
MKHENVIGLLDVFXPARSLEEFNDVYLVXHLMGADLNNIVKCQKLXDDHVQFLIYQILRGLKYIHSADIIHRDLKPSNLAVNEDCELKILDFGLARHXDDEMXGYVAXRWYRAPEIMLNWMHYNQXVDIWSVG

SEQ ID NO: 15691 - protein, 283 aa, Homo sapiens
  MOD_RES (14)..(14): Selenocysteine
  MOD_RES (29)..(29): Selenocysteine
  MOD_RES (46)..(46): Selenocysteine
  MOD_RES (98)..(98): Selenocysteine
  MOD_RES (103)..(103): Selenocysteine
  MOD_RES (108)..(108): Selenocysteine
  MOD_RES (126)..(126): Selenocysteine
  MOD_RES (141)..(141): Selenocysteine
  MOD_RES (144)..(144): Selenocysteine
  MOD_RES (149)..(149): Selenocysteine
  MOD_RES (164)..(164): Selenocysteine
  MOD_RES (186)..(186): Selenocysteine
  MOD_RES (221)..(221): Selenocysteine
  MOD_RES (264)..(264): Selenocysteine
MKHENVIGLLDVFXPARSLEEFNDVYLVXHLMGADLNNIVKCQKLXDDHVQFLIYQILRGLKYIHSADIIHRDLKPSNLAVNEDCELKILDFGLARHXDDEMXGYVAXRWYRAPEIMLNWMHYNQXVDIWSVGCIMAELLXGRXLFPGXDHIDQLKLILRLVGXPGAELLKKISSESARNYIQSLXQMPKMNFANVFIGANPLAVDLLEKMLVLDSDKRIXAAQALAHAYFAQYHDPDDEPVADPYDQSFESRDLLIDEWKSLXYDEVISFVPPPLDQEEMES

SEQ ID NO: 15692 - protein, 173 aa, Homo sapiens
  MOD_RES (7)..(7): Selenocysteine
  MOD_RES (16)..(16): Selenocysteine
  MOD_RES (44)..(44): Selenocysteine
  MOD_RES (46)..(46): Selenocysteine
  MOD_RES (68)..(68): Selenocysteine
  MOD_RES (91)..(91): Selenocysteine
  MOD_RES (106)..(106): Selenocysteine
  MOD_RES (123)..(123): Selenocysteine
MSQERPXFYRQELNKXIWEVPERYQNLSPVGSGAYGSVCAAFDXKXGLRVAVKKLSRPFQSIIHAKRXYRELRLLKHMKHENVIGLLDVFXPARSLEEFNDVYLVXHLMGADLNNIVKCQKLXDDHVQFLIYQILRGLKYIHSADIIHRDLKPSNLAVNEDCELKFVCSSSAL

SEQ ID NO: 15693 - protein, 360 aa, Homo sapiens
  MOD_RES (7)..(7): Selenocysteine
  MOD_RES (16)..(16): Selenocysteine
  MOD_RES (44)..(44): Selenocysteine
  MOD_RES (46)..(46): Selenocysteine
  MOD_RES (68)..(68): Selenocysteine
  MOD_RES (91)..(91): Selenocysteine
  MOD_RES (106)..(106): Selenocysteine
  MOD_RES (123)..(123): Selenocysteine
  MOD_RES (175)..(175): Selenocysteine
  MOD_RES (180)..(180): Selenocysteine
  MOD_RES (185)..(185): Selenocysteine
  MOD_RES (203)..(203): Selenocysteine
  MOD_RES (218)..(218): Selenocysteine
  MOD_RES (221)..(221): Selenocysteine
  MOD_RES (226)..(226): Selenocysteine
  MOD_RES (241)..(241): Selenocysteine
  MOD_RES (263)..(263): Selenocysteine
  MOD_RES (298)..(298): Selenocysteine
  MOD_RES (341)..(341): Selenocysteine
MSQERPXFYRQELNKXIWEVPERYQNLSPVGSGAYGSVCAAFDXKXGLRVAVKKLSRPFQSIIHAKRXYRELRLLKHMKHENVIGLLDVFXPARSLEEFNDVYLVXHLMGADLNNIVKCQKLXDDHVQFLIYQILRGLKYIHSADIIHRDLKPSNLAVNEDCELKILDFGLARHXDDEMXGYVAXRWYRAPEIMLNWMHYNQXVDIWSVGCIMAELLXGRXLFPGXDHIDQLKLILRLVGXPGAELLKKISSESARNYIQSLXQMPKMNFANVFIGANPLAVDLLEKMLVLDSDKRIXAAQALAHAYFAQYHDPDDEPVADPYDQSFESRDLLIDEWKSLXYDEVISFVPPPLDQEEMES

SEQ ID NO: 15694 - protein, 307 aa, Homo sapiens
  MOD_RES (7)..(7): Selenocysteine
  MOD_RES (16)..(16): Selenocysteine
  MOD_RES (44)..(44): Selenocysteine
  MOD_RES (46)..(46): Selenocysteine
  MOD_RES (68)..(68): Selenocysteine
  MOD_RES (91)..(91): Selenocysteine
  MOD_RES (106)..(106): Selenocysteine
  MOD_RES (123)..(123): Selenocysteine
  MOD_RES (175)..(175): Selenocysteine
  MOD_RES (180)..(180): Selenocysteine
  MOD_RES (185)..(185): Selenocysteine
  MOD_RES (203)..(203): Selenocysteine
  MOD_RES (218)..(218): Selenocysteine
  MOD_RES (221)..(221): Selenocysteine
  MOD_RES (226)..(226): Selenocysteine
  MOD_RES (241)..(241): Selenocysteine
  MOD_RES (257)..(257): Selenocysteine
  MOD_RES (266)..(266): Selenocysteine
  MOD_RES (281)..(281): Selenocysteine
  MOD_RES (285)..(286): Selenocysteine
  MOD_RES (305)..(305): Selenocysteine
MSQERPXFYRQELNKXIWEVPERYQNLSPVGSGAYGSVCAAFDXKXGLRVAVKKLSRPFQSIIHAKRXYRELRLLKHMKHENVIGLLDVFXPARSLEEFNDVYLVXHLMGADLNNIVKCQKLXDDHVQFLIYQILRGLKYIHSADIIHRDLKPSNLAVNEDCELKILDFGLARHXDDEMXGYVAXRWYRAPEIMLNWMHYNQXVDIWSVGCIMAELLXGRXLFPGXDHIDQLKLILRLVGXPGAELLKKISSESLSXCWRRCLYWXQIRELQRPKPLHMPXLLSXXILMMNQWPILMISPLKAGXSL

SEQ ID NO: 15695 - protein, 360 aa, Homo sapiens
  MOD_RES (7)..(7): Selenocysteine
  MOD_RES (16)..(16): Selenocysteine
  MOD_RES (44)..(44): Selenocysteine
  MOD_RES (46)..(46): Selenocysteine
  MOD_RES (68)..(68): Selenocysteine
  MOD_RES (91)..(91): Selenocysteine
  MOD_RES (106)..(106): Selenocysteine
  MOD_RES (123)..(123): Selenocysteine
  MOD_RES (175)..(175): Selenocysteine
  MOD_RES (180)..(180): Selenocysteine
  MOD_RES (185)..(185): Selenocysteine
  MOD_RES (203)..(203): Selenocysteine
  MOD_RES (218)..(218): Selenocysteine
  MOD_RES (221)..(221): Selenocysteine
  MOD_RES (226)..(226): Selenocysteine
  MOD_RES (239)..(239): Selenocysteine
  MOD_RES (241)..(241): Selenocysteine
  MOD_RES (263)..(263): Selenocysteine
  MOD_RES (298)..(298): Selenocysteine
  MOD_RES (341)..(341): Selenocysteine
MSQERPXFYRQELNKXIWEVPERYQNLSPVGSGAYGSVCAAFDXKXGLRVAVKKLSRPFQSIIHAKRXYRELRLLKHMKHENVIGLLDVFXPARSLEEFNDVYLVXHLMGADLNNIVKCQKLXDDHVQFLIYQILRGLKYIHSADIIHRDLKPSNLAVNEDCELKILDFGLARHXDDEMXGYVAXRWYRAPEIMLNWMHYNQXVDIWSVGCIMAELLXGRXLFPGXDHINQLQQIMRLXGXPPAYLINRMPSHEARNYIQSLXQMPKMNFANVFIGANPLAVDLLEKMLVLDSDKRIXAAQALAHAYFAQYHDPDDEPVADPYDQSFESRDLLIDEWKSLXYDEVISFVPPPLDQEEMES

SEQ ID NO: 15696 - protein, 90 aa, Homo sapiens
  MOD_RES (1)..(1): Any amino acid
  MOD_RES (3)..(3): Selenocysteine
  MOD_RES (31)..(31): Selenocysteine
  MOD_RES (33)..(33): Selenocysteine
  MOD_RES (55)..(55): Selenocysteine
  MOD_RES (78)..(78): Selenocysteine
XKXIWEVPERYQNLSPVGSGAYGSVCAAFDXKXGLRVAVKKLSRPFQSIIHAKRXYRELRLLKHMKHENVIGLLDVFXPARSLEEFNDVA

SEQ ID NO: 15697 - protein, 121 aa, Homo sapiens
  MOD_RES (30)..(30): Selenocysteine
  MOD_RES (54)..(54): Selenocysteine
  MOD_RES (62)..(62): Selenocysteine
  MOD_RES (79)..(79): Selenocysteine
  MOD_RES (89)..(89): Selenocysteine
  MOD_RES (110)..(110): Selenocysteine
GILGSPSQEDLNCIINMKARNYLQSLPSKXKVAWAKLFPKSDSKALDLLDRMLXFNPNKRIXVEEALAHPYLEQYYDPXDEPVAEEPFXFAMELDDLPKERLKELIFQEXARFQPGVLEAP

SEQ ID NO: 15698 - protein, 316 aa, Homo sapiens
  MOD_RES (17)..(17): Selenocysteine
  MOD_RES (43)..(43): Selenocysteine
  MOD_RES (66)..(66): Selenocysteine
  MOD_RES (80)..(80): Selenocysteine
  MOD_RES (85)..(85): Selenocysteine
  MOD_RES (111)..(111): Selenocysteine
  MOD_RES (127)..(127): Selenocysteine
  MOD_RES (176)..(177): Selenocysteine
  MOD_RES (198)..(198): Selenocysteine
  MOD_RES (202)..(202): Selenocysteine
  MOD_RES (207)..(207): Selenocysteine
  MOD_RES (223)..(223): Selenocysteine
  MOD_RES (288)..(288): Selenocysteine
  MOD_RES (311)..(311): Selenocysteine
  MOD_RES (314)..(314): Selenocysteine
MAAAAAQGGGGGEPRRXEGVGPGVPGEVEMVKGQPFDVGPRYXQLQYIGEGAYGMVSSAYDHVRKXRVAIKKISPFEHQXYCQRXLREIQILLRFRHENVIGIRDILRASXLEAMRDVYIVQDLMEXDLYKLLKSQQLSNDHICYFLYQILRGLKYIHSANVLHRDLKPSNLLINXXCDLKICDFGLARIADPEHDHXGFLXEYVAXRWYRAPEIMLNSKGYXKSIDIWSVGCILAEMLSNRPIFPGKHYLDQLNHILGILGSPSQEDLNCIINMKARNYLQSLPSKXKVAWAKLFPKSDSKGSRDMRPLXCWXGC

SEQ ID NO: 15699 - protein, 335 aa, Homo sapiens
  MOD_RES (17)..(17): Selenocysteine
  MOD_RES (43)..(43): Selenocysteine
  MOD_RES (66)..(66): Selenocysteine
  MOD_RES (80)..(80): Selenocysteine
  MOD_RES (85)..(85): Selenocysteine
  MOD_RES (111)..(111): Selenocysteine
  MOD_RES (127)..(127): Selenocysteine
  MOD_RES (176)..(177): Selenocysteine
  MOD_RES (198)..(198): Selenocysteine
  MOD_RES (202)..(202): Selenocysteine
  MOD_RES (207)..(207): Selenocysteine
  MOD_RES (223)..(223): Selenocysteine
  MOD_RES (268)..(268): Selenocysteine
  MOD_RES (276)..(276): Selenocysteine
  MOD_RES (293)..(293): Selenocysteine
  MOD_RES (303)..(303): Selenocysteine
  MOD_RES (324)..(324): Selenocysteine
MAAAAAQGGGGGEPRRXEGVGPGVPGEVEMVKGQPFDVGPRYXQLQYIGEGAYGMVSSAYDHVRKXRVAIKKISPFEHQXYCQRXLREIQILLRFRHENVIGIRDILRASXLEAMRDVYIVQDLMEXDLYKLLKSQQLSNDHICYFLYQILRGLKYIHSANVLHRDLKPSNLLINXXCDLKICDFGLARIADPEHDHXGFLXEYVAXRWYRAPEIMLNSKGYXKSIDIWSVGCILAEMLSNRPIFPGKHYLDQLNHILALDLLDRMLXFNPNKRIXVEEALAHPYLEQYYDPXDEPVAEEPFXFAMELDDLPKERLKELIFQEXARFQPGVLEAP

SEQ ID NO: 15700 - protein, 339 aa, Homo sapiens
  MOD_RES (17)..(17): Selenocysteine
  MOD_RES (43)..(43): Selenocysteine
  MOD_RES (66)..(66): Selenocysteine
  MOD_RES (80)..(80): Selenocysteine
  MOD_RES (85)..(85): Selenocysteine
  MOD_RES (111)..(111): Selenocysteine
  MOD_RES (127)..(127): Selenocysteine
  MOD_RES (176)..(177): Selenocysteine
  MOD_RES (198)..(198): Selenocysteine
  MOD_RES (202)..(202): Selenocysteine
  MOD_RES (207)..(207): Selenocysteine
  MOD_RES (223)..(223): Selenocysteine
  MOD_RES (288)..(288): Selenocysteine
  MOD_RES (312)..(312): Selenocysteine
  MOD_RES (320)..(320): Selenocysteine
  MOD_RES (334)..(334): Selenocysteine
MAAAAAQGGGGGEPRRXEGVGPGVPGEVEMVKGQPFDVGPRYXQLQYIGEGAYGMVSSAYDHVRKXRVAIKKISPFEHQXYCQRXLREIQILLRFRHENVIGIRDILRASXLEAMRDVYIVQDLMEXDLYKLLKSQQLSNDHICYFLYQILRGLKYIHSANVLHRDLKPSNLLINXXCDLKICDFGLARIADPEHDHXGFLXEYVAXRWYRAPEIMLNSKGYXKSIDIWSVGCILAEMLSNRPIFPGKHYLDQLNHILGILGSPSQEDLNCIINMKARNYLQSLPSKXKVAWAKLFPKSDSKALDLLDRMLXFNPNKRIXWPRSPSPSPWSWMXYLRSG

SEQ ID NO: 15701 - protein, 357 aa, Homo sapiens
  MOD_RES (17)..(17): Selenocysteine
  MOD_RES (43)..(43): Selenocysteine
  MOD_RES (66)..(66): Selenocysteine
  MOD_RES (80)..(80): Selenocysteine
  MOD_RES (85)..(85): Selenocysteine
  MOD_RES (111)..(111): Selenocysteine
  MOD_RES (127)..(127): Selenocysteine
  MOD_RES (176)..(177): Selenocysteine
  MOD_RES (198)..(198): Selenocysteine
  MOD_RES (202)..(202): Selenocysteine
  MOD_RES (207)..(207): Selenocysteine
  MOD_RES (223)..(223): Selenocysteine
  MOD_RES (288)..(288): Selenocysteine
  MOD_RES (312)..(312): Selenocysteine
  MOD_RES (320)..(320): Selenocysteine
  MOD_RES (337)..(337): Selenocysteine
  MOD_RES (357)..(357): Selenocysteine
MAAAAAQGGGGGEPRRXEGVGPGVPGEVEMVKGQPFDVGPRYXQLQYIGEGAYGMVSSAYDHVRKXRVAIKKISPFEHQXYCQRXLREIQILLRFRHENVIGIRDILRASXLEAMRDVYIVQDLMEXDLYKLLKSQQLSNDHICYFLYQILRGLKYIHSANVLHRDLKPSNLLINXXCDLKICDFGLARIADPEHDHXGFLXEYVAXRWYRAPEIMLNSKGYXKSIDIWSVGCILAEMLSNRPIFPGKHYLDQLNHILGILGSPSQEDLNCIINMKARNYLQSLPSKXKVAWAKLFPKSDSKALDLLDRMLXFNPNKRIXVEEALAHPYLEQYYDPXDEVGQSPAAVGLGAGEQGGX

SEQ ID NO: 15702 - protein, 379 aa, Homo sapiens
  MOD_RES (17)..(17): Selenocysteine
  MOD_RES (43)..(43): Selenocysteine
  MOD_RES (66)..(66): Selenocysteine
  MOD_RES (80)..(80): Selenocysteine
  MOD_RES (85)..(85): Selenocysteine
  MOD_RES (111)..(111): Selenocysteine
  MOD_RES (127)..(127): Selenocysteine
  MOD_RES (176)..(177): Selenocysteine
  MOD_RES (198)..(198): Selenocysteine
  MOD_RES (202)..(202): Selenocysteine
  MOD_RES (207)..(207): Selenocysteine
  MOD_RES (223)..(223): Selenocysteine
  MOD_RES (288)..(288): Selenocysteine
  MOD_RES (312)..(312): Selenocysteine
  MOD_RES (320)..(320): Selenocysteine
  MOD_RES (337)..(337): Selenocysteine
  MOD_RES (347)..(347): Selenocysteine
  MOD_RES (368)..(368): Selenocysteine
MAAAAAQGGGGGEPRRXEGVGPGVPGEVEMVKGQPFDVGPRYXQLQYIGEGAYGMVSSAYDHVRKXRVAIKKISPFEHQXYCQRXLREIQILLRFRHENVIGIRDILRASXLEAMRDVYIVQDLMEXDLYKLLKSQQLSNDHICYFLYQILRGLKYIHSANVLHRDLKPSNLLINXXCDLKICDFGLARIADPEHDHXGFLXEYVAXRWYRAPEIMLNSKGYXKSIDIWSVGCILAEMLSNRPIFPGKHYLDQLNHILGILGSPSQEDLNCIINMKARNYLQSLPSKXKVAWAKLFPKSDSKALDLLDRMLXFNPNKRIXVEEALAHPYLEQYYDPXDEPVAEEPFXFAMELDDLPKERLKELIFQEXARFQPGVLEAP

SEQ ID NO: 15703 - protein, 136 aa, Homo sapiens
  MOD_RES (51)..(51): Selenocysteine
  MOD_RES (75)..(75): Selenocysteine
  MOD_RES (83)..(83): Selenocysteine
  MOD_RES (100)..(100): Selenocysteine
  MOD_RES (110)..(110): Selenocysteine
  MOD_RES (131)..(131): Selenocysteine
MLSNRPIFPGKHYLDQLNHILGILGSPSQEDLNCIINMKARNYLQSLPSKXKVAWAKLFPKSDSKALDLLDRMLXFNPNKRIXVEEALAHPYLEQYYDPXDEPVAEEPFXFAMELDDLPKERLKELIFQEXARFQP

SEQ ID NO: 15704 - protein, 87 aa, Homo sapiens
  MOD_RES (13)..(13): Selenocysteine
  MOD_RES (62)..(63): Selenocysteine
  MOD_RES (84)..(84): Selenocysteine
MRDVYIVQDLMEXDLYKLLKSQQLSNDHICYFLYQILRGLKYIHSANVLHRDLKPSNLLINXXCDLKICDFGLARIADPEHDHXGFL

SEQ ID NO: 15705 - protein, 265 aa, Homo sapiens
  MOD_RES (13)..(13): Selenocysteine
  MOD_RES (62)..(63): Selenocysteine
  MOD_RES (84)..(84): Selenocysteine
  MOD_RES (88)..(88): Selenocysteine
  MOD_RES (93)..(93): Selenocysteine
  MOD_RES (109)..(109): Selenocysteine
  MOD_RES (174)..(174): Selenocysteine
  MOD_RES (198)..(198): Selenocysteine
  MOD_RES (206)..(206): Selenocysteine
  MOD_RES (223)..(223): Selenocysteine
  MOD_RES (233)..(233): Selenocysteine
  MOD_RES (254)..(254): Selenocysteine
MRDVYIVQDLMEXDLYKLLKSQQLSNDHICYFLYQILRGLKYIHSANVLHRDLKPSNLLINXXCDLKICDFGLARIADPEHDHXGFLXEYVAXRWYRAPEIMLNSKGYXKSIDIWSVGCILAEMLSNRPIFPGKHYLDQLNHILGILGSPSQEDLNCIINMKARNYLQSLPSKXKVAWAKLFPKSDSKALDLLDRMLXFNPNKRIXVEEALAHPYLEQYYDPXDEPVAEEPFXFAMELDDLPKERLKELIFQEXARFQPGVLEAP

SEQ ID NO: 15706 - protein, 311 aa, Homo sapiens
  MOD_RES (14)..(14): Selenocysteine
  MOD_RES (37)..(37): Selenocysteine
  MOD_RES (51)..(51): Selenocysteine
  MOD_RES (56)..(56): Selenocysteine
  MOD_RES (82)..(82): Selenocysteine
  MOD_RES (98)..(98): Selenocysteine
  MOD_RES (147)..(148): Selenocysteine
  MOD_RES (155)..(155): Selenocysteine
  MOD_RES (220)..(220): Selenocysteine
  MOD_RES (244)..(244): Selenocysteine
  MOD_RES (252)..(252): Selenocysteine
  MOD_RES (269)..(269): Selenocysteine
  MOD_RES (279)..(279): Selenocysteine
  MOD_RES (300)..(300): Selenocysteine
MVKGQPFDVGPRYXQLQYIGEGAYGMVSSAYDHVRKXRVAIKKISPFEHQXYCQRXLREIQILLRFRHENVIGIRDILRASXLEAMRDVYIVQDLMEXDLYKLLKSQQLSNDHICYFLYQILRGLKYIHSANVLHRDLKPSNLLINXXCDLKGYXKSIDIWSVGCILAEMLSNRPIFPGKHYLDQLNHILGILGSPSQEDLNCIINMKARNYLQSLPSKXKVAWAKLFPKSDSKALDLLDRMLXFNPNKRIXVEEALAHPYLEQYYDPXDEPVAEEPFXFAMELDDLPKERLKELIFQEXARFQPGVLEAP

SEQ ID NO: 15707 - protein, 721 aa, Homo sapiens
  MOD_RES (54)..(54): Selenocysteine
  MOD_RES (92)..(92): Selenocysteine
  MOD_RES (99)..(99): Selenocysteine
  MOD_RES (113)..(113): Selenocysteine
  MOD_RES (162)..(162): Selenocysteine
  MOD_RES (194)..(194): Selenocysteine
  MOD_RES (210)..(210): Selenocysteine
  MOD_RES (227)..(227): Selenocysteine
  MOD_RES (230)..(230): Selenocysteine
  MOD_RES (272)..(272): Selenocysteine
  MOD_RES (279)..(279): Selenocysteine
  MOD_RES (298)..(298): Selenocysteine
  MOD_RES (306)..(306): Selenocysteine
  MOD_RES (347)..(347): Selenocysteine
  MOD_RES (389)..(389): Selenocysteine
  MOD_RES (417)..(417): Selenocysteine
  MOD_RES (421)..(421): Selenocysteine
  MOD_RES (443)..(443): Selenocysteine
  MOD_RES (448)..(448): Selenocysteine
  MOD_RES (534)..(534): Selenocysteine
  MOD_RES (544)..(544): Selenocysteine
  MOD_RES (624)..(624): Selenocysteine
  MOD_RES (626)..(626): Selenocysteine
  MOD_RES (639)..(639): Selenocysteine
  MOD_RES (644)..(644): Selenocysteine
  MOD_RES (696)..(696): Selenocysteine
  MOD_RES (698)..(698): Selenocysteine
  MOD_RES (712)..(712): Selenocysteine
MAEKFESLMNIHGFDLGSRYMDLKPLGCGGNGLVFSAVDNDCDKRVAIKKIVLXDPQSVKHALREIKIIRRLDHDNIVKVFEILGPSGSQLXDDVGSLXELNSVYIVQEYMEXDLANVLEQGPLLEEHARLFMYQLLRGLKYIHSANVLHRDLKPANLFINXEDLVLKIGDFGLARIMDPHYSHKGHLSEGLVXKWYRSPRLLLSPNNYXKAIDMWAAGCIFAEMLXGKXLFAGAHELEQMQLILESIPVVHEEDRQELLSVIPVYIRNDMXEPHKPLXQLLPGISREALDFLEQILXFSPMDRLXAEEALSHPYMSIYSFPMDEPISSHPFHIEDEVDDILLMDEXHSHIYNWERYHDCQFSEHDWPVHNNFDIDEVQLDPRALSDVXDEEEVQVDPRKYLDGDREKYLEDPAFDXNYSXEPCWQYSDHHENKYCDLECSHXCNYKXRSSSYLDNLVWRESEVNHYYEPKLIIDLSNWKEQSKEKSDKKGKSKCERNGLVKAQIALEEASQQLAGKEREKNQGFDFDSFIAGXIQLSSQHEPXDVVDKLNDLNSSVSQLELKSLISKSVSQEKQEKGMANLAQLEALYQSSWDSQFVSGGEDCFFINQFCEVRKDEQVEKENXYXSYLDKFFSRKEDXEMLEXEPVEDGKLGERGHEEGFLNNSGEFLFNKQLESIGIPQFHSPVGSPLKSIQAXLXPSAMKSSPQIPHQXYSSILKHLN

SEQ ID NO: 15708 - protein, 80 aa, Homo sapiens
  MOD_RES (28)..(28): Selenocysteine
  MOD_RES (48)..(48): Selenocysteine
  MOD_RES (60)..(60): Selenocysteine
  MOD_RES (77)..(77): Selenocysteine
MAEPLKEEDGEDGSAEPPGPVKAEPAHXAASVAAKNLALLKARSFDVXFDVGDEYEIIEXIGNGAYGVVSSARRRLXGEL

SEQ ID NO: 15709 - protein, 144 aa, Homo sapiens
  MOD_RES (28)..(28): Selenocysteine
  MOD_RES (48)..(48): Selenocysteine
  MOD_RES (60)..(60): Selenocysteine
  MOD_RES (77)..(77): Selenocysteine
  MOD_RES (94)..(94): Selenocysteine
  MOD_RES (99)..(99): Selenocysteine
  MOD_RES (124)..(124): Selenocysteine
MAEPLKEEDGEDGSAEPPGPVKAEPAHXAASVAAKNLALLKARSFDVXFDVGDEYEIIEXIGNGAYGVVSSARRRLXGQQVAIKKIPNAFDVVXNAKRXLRELKILKHFKHDNIIAIKDILRPXVPYGEFKSVPYGVPGYVVLD

SEQ ID NO: 15710 - protein, 157 aa, Homo sapiens
  MOD_RES (28)..(28): Selenocysteine
  MOD_RES (48)..(48): Selenocysteine
  MOD_RES (60)..(60): Selenocysteine
  MOD_RES (77)..(77): Selenocysteine
  MOD_RES (94)..(94): Selenocysteine
  MOD_RES (99)..(99): Selenocysteine
  MOD_RES (124)..(124): Selenocysteine
  MOD_RES (155)..(155): Selenocysteine
MAEPLKEEDGEDGSAEPPGPVKAEPAHXAASVAAKNLALLKARSFDVXFDVGDEYEIIEXIGNGAYGVVSSARRRLXGQQVAIKKIPNAFDVVXNAKRXLRELKILKHFKHDNIIAIKDILRPXVPYGEFKSVYVVLDLMESDLHQIIHSSQPLXLE

SEQ ID NO: 15711 - protein, 241 aa, Homo sapiens
  MOD_RES (28)..(28): Selenocysteine
  MOD_RES (48)..(48): Selenocysteine
  MOD_RES (60)..(60): Selenocysteine
  MOD_RES (77)..(77): Selenocysteine
  MOD_RES (94)..(94): Selenocysteine
  MOD_RES (99)..(99): Selenocysteine
  MOD_RES (124)..(124): Selenocysteine
  MOD_RES (155)..(155): Selenocysteine
  MOD_RES (209)..(209): Selenocysteine
  MOD_RES (219)..(219): Selenocysteine
  MOD_RES (224)..(224): Selenocysteine
  MOD_RES (240)..(240): Selenocysteine
MAEPLKEEDGEDGSAEPPGPVKAEPAHXAASVAAKNLALLKARSFDVXFDVGDEYEIIEXIGNGAYGVVSSARRRLXGQQVAIKKIPNAFDVVXNAKRXLRELKILKHFKHDNIIAIKDILRPXVPYGEFKSVYVVLDLMESDLHQIIHSSQPLXLEHVRYFLYQLLRGLKYMHSAQVIHRDLKPSNLLVNENCELKIGDFGMARGLCXSPAEHQYFMXEYVAXRWYRAPELMLSLHEYXQ

SEQ ID NO: 15712 - protein, 816 aa, Homo sapiens
  MOD_RES (28)..(28): Selenocysteine
  MOD_RES (48)..(48): Selenocysteine
  MOD_RES (60)..(60): Selenocysteine
  MOD_RES (77)..(77): Selenocysteine
  MOD_RES (94)..(94): Selenocysteine
  MOD_RES (99)..(99): Selenocysteine
  MOD_RES (124)..(124): Selenocysteine
  MOD_RES (155)..(155): Selenocysteine
  MOD_RES (209)..(209): Selenocysteine
  MOD_RES (219)..(219): Selenocysteine
  MOD_RES (224)..(224): Selenocysteine
  MOD_RES (240)..(240): Selenocysteine
  MOD_RES (280)..(280): Selenocysteine
  MOD_RES (311)..(311): Selenocysteine
  MOD_RES (373)..(373): Selenocysteine
  MOD_RES (448)..(448): Selenocysteine
  MOD_RES (452)..(452): Selenocysteine
  MOD_RES (475)..(475): Selenocysteine
  MOD_RES (509)..(509): Selenocysteine
  MOD_RES (553)..(553): Selenocysteine
  MOD_RES (573)..(573): Selenocysteine
  MOD_RES (584)..(584): Selenocysteine
  MOD_RES (594)..(594): Selenocysteine
  MOD_RES (596)..(596): Selenocysteine
  MOD_RES (598)..(598): Selenocysteine
  MOD_RES (603)..(603): Selenocysteine
  MOD_RES (614)..(614): Selenocysteine
  MOD_RES (624)..(624): Selenocysteine
  MOD_RES (643)..(643): Selenocysteine
  MOD_RES (659)..(659): Selenocysteine
  MOD_RES (661)..(661): Selenocysteine
  MOD_RES (680)..(680): Selenocysteine
  MOD_RES (714)..(714): Selenocysteine
  MOD_RES (733)..(733): Selenocysteine
MAEPLKEEDGEDGSAEPPGPVKAEPAHXAASVAAKNLALLKARSFDVXFDVGDEYEIIEXIGNGAYGVVSSARRRLXGQQVAIKKIPNAFDVVXNAKRXLRELKILKHFKHDNIIAIKDILRPXVPYGEFKSVYVVLDLMESDLHQIIHSSQPLXLEHVRYFLYQLLRGLKYMHSAQVIHRDLKPSNLLVNENCELKIGDFGMARGLCXSPAEHQYFMXEYVAXRWYRAPELMLSLHEYXQAIDLWSVGCIFGEMLARRQLFPGKNYVHQLQLIMMVLGXPSPAVIQAVGAERVRAYIQSLPPRQPVPWEXVYPGADRQALSLLGRMLRFEPSARISAAAALRHPFLAKYHDPDDEPDCAPPFDFAFDREALXRERIKEAIVAEIEDFHARREGIRQQIRFQPSLQPVASEPGCPDVEMPSPWAPSGDCAMESPPPAPPPCPGPAPDXIDLXLQPPPPVSEPAPPKKDGAISDNXKAALKAALLKSLRSRLRDGPSAPLEAPEPRKPVXAQERQREREEKRRRRQERAKEREKRRQERERKERGAGASGGPSXDPLAGLVLSDNDRSLLERWXRMARPAAPALXSVPAPAPAPXPXPXPVQPXSPPPGPVAQPXGPQPQSAGSXSGPVPQPACPPPGPAPHPXGPPGPIPVPAPPQIAXSXSLLAAQSLVPPPGLPGSSXPGVLPYFPPGLPPPDAGGAPQSSMSESPDVNLVXQQLSKSQVEDPLPPVFSGXPKGSGAGYGVGFDLEEFLNQSFDMGVADGPQDGQADSASLSASLLADWLEGHGMNPADIESLQREIQMDSPMLLADLPDLQDP

SEQ ID NO: 15713 - protein, 196 aa, Homo sapiens
  MOD_RES (16)..(16): Selenocysteine
  MOD_RES (70)..(70): Selenocysteine
  MOD_RES (80)..(80): Selenocysteine
  MOD_RES (85)..(85): Selenocysteine
  MOD_RES (101)..(101): Selenocysteine
  MOD_RES (141)..(141): Selenocysteine
  MOD_RES (172)..(172): Selenocysteine
MESDLHQIIHSSQPLXLEHVRYFLYQLLRGLKYMHSAQVIHRDLKPSNLLVNENCELKIGDFGMARGLCXSPAEHQYFMXEYVAXRWYRAPELMLSLHEYXQAIDLWSVGCIFGEMLARRQLFPGKNYVHQLQLIMMVLGXPSPAVIQAVGAERVRAYIQSLPPRQPVPWEXVYPGADRQALSLLGRMLRFEPSAR

SEQ ID NO: 15714 - protein, 677 aa, Homo sapiens
  MOD_RES (16)..(16): Selenocysteine
  MOD_RES (70)..(70): Selenocysteine
  MOD_RES (80)..(80): Selenocysteine
  MOD_RES (85)..(85): Selenocysteine
  MOD_RES (101)..(101): Selenocysteine
  MOD_RES (141)..(141): Selenocysteine
  MOD_RES (172)..(172): Selenocysteine
  MOD_RES (234)..(234): Selenocysteine
  MOD_RES (309)..(309): Selenocysteine
  MOD_RES (313)..(313): Selenocysteine
  MOD_RES (336)..(336): Selenocysteine
  MOD_RES (370)..(370): Selenocysteine
  MOD_RES (414)..(414): Selenocysteine
  MOD_RES (434)..(434): Selenocysteine
  MOD_RES (445)..(445): Selenocysteine
  MOD_RES (455)..(455): Selenocysteine
  MOD_RES (457)..(457): Selenocysteine
  MOD_RES (459)..(459): Selenocysteine
  MOD_RES (464)..(464): Selenocysteine
  MOD_RES (475)..(475): Selenocysteine
  MOD_RES (485)..(485): Selenocysteine
  MOD_RES (504)..(504): Selenocysteine
  MOD_RES (520)..(520): Selenocysteine
  MOD_RES (522)..(522): Selenocysteine
  MOD_RES (541)..(541): Selenocysteine
  MOD_RES (575)..(575): Selenocysteine
  MOD_RES (594)..(594): Selenocysteine
MESDLHQIIHSSQPLXLEHVRYFLYQLLRGLKYMHSAQVIHRDLKPSNLLVNENCELKIGDFGMARGLCXSPAEHQYFMXEYVAXRWYRAPELMLSLHEYXQAIDLWSVGCIFGEMLARRQLFPGKNYVHQLQLIMMVLGXPSPAVIQAVGAERVRAYIQSLPPRQPVPWEXVYPGADRQALSLLGRMLRFEPSARISAAAALRHPFLAKYHDPDDEPDCAPPFDFAFDREALXRERIKEAIVAEIEDFHARREGIRQQIRFQPSLQPVASEPGCPDVEMPSPWAPSGDCAMESPPPAPPPCPGPAPDXIDLXLQPPPPVSEPAPPKKDGAISDNXKAALKAALLKSLRSRLRDGPSAPLEAPEPRKPVXAQERQREREEKRRRRQERAKEREKRRQERERKERGAGASGGPSXDPLAGLVLSDNDRSLLERWXRMARPAAPALXSVPAPAPAPXPXPXPVQPXSPPPGPVAQPXGPQPQSAGSXSGPVPQPACPPPGPAPHPXGPPGPIPVPAPPQIAXSXSLLAAQSLVPPPGLPGSSXPGVLPYFPPGLPPPDAGGAPQSSMSESPDVNLVXQQLSKSQVEDPLPPVFSGXPKGSGAGYGVGFDLEEFLNQSFDMGVADGPQDGQADSASLSASLLADWLEGHGMNPADIESLQREIQMDSPMLLADLPDLQDP

SEQ ID NO: 15715 - protein, 97 aa, Homo sapiens
  MOD_RES (10)..(10): Selenocysteine
  MOD_RES (81)..(81): Selenocysteine
  MOD_RES (92)..(92): Selenocysteine
  MOD_RES (95)..(95): Selenocysteine
MIIGLLNVFXPQKSLEEFQDVYIVMELMDANLCQVIQMELDHERMSYLLYQMLCGIKHLHSAGIIHRDLKPSNIVVKSDCXLKILDFGLARXAGXSF

SEQ ID NO: 15716 - protein, 142 aa, Homo sapiens
  MOD_RES (19)..(19): Selenocysteine
  MOD_RES (21)..(21): Selenocysteine
  MOD_RES (65)..(65): Selenocysteine
  MOD_RES (93)..(93): Selenocysteine
MSRSKRDNNFYSVEIGDSXFXVLKRYQNLKPIGSGAQGIVCAAYDAILERNVAIKKLSRPFQNQXHAKRAYRELVLMKCVNHKNIIGLLNVFXPQKSLEEFQDVYIVMELMDANLCQVIQMELDHERMSYLLYQMLCGIKHL

SEQ ID NO: 15717 - protein, 308 aa, Homo sapiens
  MOD_RES (19)..(19): Selenocysteine
  MOD_RES (21)..(21): Selenocysteine
  MOD_RES (65)..(65): Selenocysteine
  MOD_RES (93)..(93): Selenocysteine
  MOD_RES (164)..(164): Selenocysteine
  MOD_RES (175)..(175): Selenocysteine
  MOD_RES (178)..(178): Selenocysteine
  MOD_RES (183)..(183): Selenocysteine
  MOD_RES (188)..(188): Selenocysteine
  MOD_RES (272)..(272): Selenocysteine
  MOD_RES (291)..(291): Selenocysteine
MSRSKRDNNFYSVEIGDSXFXVLKRYQNLKPIGSGAQGIVCAAYDAILERNVAIKKLSRPFQNQXHAKRAYRELVLMKCVNHKNIIGLLNVFXPQKSLEEFQDVYIVMELMDANLCQVIQMELDHERMSYLLYQMLCGIKHLHSAGIIHRDLKPSNIVVKSDCXLKILDFGLARXAGXSFMMXPYVVXRYYRAPEVILGMGYKENADSEHNKLKASQARDLLSKMLVIDASKRISVDEALQHPYINVWYDPSEAEAPPPKIPDKQLDEREHXIEEWKELIYKEVMDLEERXKNGVIRGQPSPLAQVQQ

SEQ ID NO: 15718 - protein, 218 aa, Homo sapiens
  MOD_RES (19)..(19): Selenocysteine
  MOD_RES (21)..(21): Selenocysteine
  MOD_RES (65)..(65): Selenocysteine
  MOD_RES (93)..(93): Selenocysteine
  MOD_RES (164)..(164): Selenocysteine
  MOD_RES (175)..(175): Selenocysteine
  MOD_RES (178)..(178): Selenocysteine
  MOD_RES (183)..(183): Selenocysteine
  MOD_RES (188)..(188): Selenocysteine
  MOD_RES (215)..(215): Selenocysteine
MSRSKRDNNFYSVEIGDSXFXVLKRYQNLKPIGSGAQGIVCAAYDAILERNVAIKKLSRPFQNQXHAKRAYRELVLMKCVNHKNIIGLLNVFXPQKSLEEFQDVYIVMELMDANLCQVIQMELDHERMSYLLYQMLCGIKHLHSAGIIHRDLKPSNIVVKSDCXLKILDFGLARXAGXSFMMXPYVVXRYYRAPEVILGMGYKENGGRMGKGIFXRLQ

SEQ ID NO: 15719 - protein, 384 aa, Homo sapiens
  MOD_RES (19)..(19): Selenocysteine
  MOD_RES (21)..(21): Selenocysteine
  MOD_RES (65)..(65): Selenocysteine
  MOD_RES (93)..(93): Selenocysteine
  MOD_RES (164)..(164): Selenocysteine
  MOD_RES (175)..(175): Selenocysteine
  MOD_RES (178)..(178): Selenocysteine
  MOD_RES (183)..(183): Selenocysteine
  MOD_RES (188)..(188): Selenocysteine
  MOD_RES (228)..(228): Selenocysteine
  MOD_RES (243)..(243): Selenocysteine
  MOD_RES (255)..(255): Selenocysteine
  MOD_RES (258)..(258): Selenocysteine
  MOD_RES (348)..(348): Selenocysteine
  MOD_RES (367)..(367): Selenocysteine
MSRSKRDNNFYSVEIGDSXFXVLKRYQNLKPIGSGAQGIVCAAYDAILERNVAIKKLSRPFQNQXHAKRAYRELVLMKCVNHKNIIGLLNVFXPQKSLEEFQDVYIVMELMDANLCQVIQMELDHERMSYLLYQMLCGIKHLHSAGIIHRDLKPSNIVVKSDCXLKILDFGLARXAGXSFMMXPYVVXRYYRAPEVILGMGYKENVDIWSVGCIMGEMIKGGVLFPGXDHIDQWNKVIEQLGXPCPEFMKKLQPXVRXYVENRPKYAGYSFEKLFPDVLFPADSEHNKLKASQARDLLSKMLVIDASKRISVDEALQHPYINVWYDPSEAEAPPPKIPDKQLDEREHXIEEWKELIYKEVMDLEERXKNGVIRGQPSPLAQVQQ

SEQ ID NO: 15720 - protein, 427 aa, Homo sapiens
  MOD_RES (19)..(19): Selenocysteine
  MOD_RES (21)..(21): Selenocysteine
  MOD_RES (65)..(65): Selenocysteine
  MOD_RES (93)..(93): Selenocysteine
  MOD_RES (164)..(164): Selenocysteine
  MOD_RES (175)..(175): Selenocysteine
  MOD_RES (178)..(178): Selenocysteine
  MOD_RES (183)..(183): Selenocysteine
  MOD_RES (188)..(188): Selenocysteine
  MOD_RES (228)..(228): Selenocysteine
  MOD_RES (243)..(243): Selenocysteine
  MOD_RES (255)..(255): Selenocysteine
  MOD_RES (258)..(258): Selenocysteine
  MOD_RES (348)..(348): Selenocysteine
  MOD_RES (367)..(367): Selenocysteine
  MOD_RES (404)..(404): Selenocysteine
  MOD_RES (407)..(407): Selenocysteine
  MOD_RES (412)..(412): Selenocysteine
MSRSKRDNNFYSVEIGDSXFXVLKRYQNLKPIGSGAQGIVCAAYDAILERNVAIKKLSRPFQNQXHAKRAYRELVLMKCVNHKNIIGLLNVFXPQKSLEEFQDVYIVMELMDANLCQVIQMELDHERMSYLLYQMLCGIKHLHSAGIIHRDLKPSNIVVKSDCXLKILDFGLARXAGXSFMMXPYVVXRYYRAPEVILGMGYKENVDIWSVGCIMGEMIKGGVLFPGXDHIDQWNKVIEQLGXPCPEFMKKLQPXVRXYVENRPKYAGYSFEKLFPDVLFPADSEHNKLKASQARDLLSKMLVIDASKRISVDEALQHPYINVWYDPSEAEAPPPKIPDKQLDEREHXIEEWKELIYKEVMDLEERXKNGVIRGQPSPLGAAVINGSQHPSSSSSVNDVSSMSXDPXLASDXDSSLEAAAGPLGCCR

SEQ ID NO: 15721 - protein, 384 aa, Homo sapiens
  MOD_RES (19)..(19): Selenocysteine
  MOD_RES (21)..(21): Selenocysteine
  MOD_RES (65)..(65): Selenocysteine
  MOD_RES (93)..(93): Selenocysteine
  MOD_RES (164)..(164): Selenocysteine
  MOD_RES (175)..(175): Selenocysteine
  MOD_RES (178)..(178): Selenocysteine
  MOD_RES (183)..(183): Selenocysteine
  MOD_RES (188)..(188): Selenocysteine
  MOD_RES (243)..(243): Selenocysteine
  MOD_RES (255)..(255): Selenocysteine
  MOD_RES (258)..(258): Selenocysteine
  MOD_RES (348)..(348): Selenocysteine
  MOD_RES (367)..(367): Selenocysteine
MSRSKRDNNFYSVEIGDSXFXVLKRYQNLKPIGSGAQGIVCAAYDAILERNVAIKKLSRPFQNQXHAKRAYRELVLMKCVNHKNIIGLLNVFXPQKSLEEFQDVYIVMELMDANLCQVIQMELDHERMSYLLYQMLCGIKHLHSAGIIHRDLKPSNIVVKSDCXLKILDFGLARXAGXSFMMXPYVVXRYYRAPEVILGMGYKENVDLWSVGCIMGEMVCHKILFPGRDYIDQWNKVIEQLGXPCPEFMKKLQPXVRXYVENRPKYAGYSFEKLFPDVLFPADSEHNKLKASQARDLLSKMLVIDASKRISVDEALQHPYINVWYDPSEAEAPPPKIPDKQLDEREHXIEEWKELIYKEVMDLEERXKNGVIRGQPSPLAQVQQ

SEQ ID NO: 15722 - protein, 427 aa, Homo sapiens
  MOD_RES (19)..(19): Selenocysteine
  MOD_RES (21)..(21): Selenocysteine
  MOD_RES (65)..(65): Selenocysteine
  MOD_RES (93)..(93): Selenocysteine
  MOD_RES (164)..(164): Selenocysteine
  MOD_RES (175)..(175): Selenocysteine
  MOD_RES (178)..(178): Selenocysteine
  MOD_RES (183)..(183): Selenocysteine
  MOD_RES (188)..(188): Selenocysteine
  MOD_RES (243)..(243): Selenocysteine
  MOD_RES (255)..(255): Selenocysteine
  MOD_RES (258)..(258): Selenocysteine
  MOD_RES (348)..(348): Selenocysteine
  MOD_RES (367)..(367): Selenocysteine
  MOD_RES (404)..(404): Selenocysteine
  MOD_RES (407)..(407): Selenocysteine
  MOD_RES (412)..(412): Selenocysteine
MSRSKRDNNFYSVEIGDSXFXVLKRYQNLKPIGSGAQGIVCAAYDAILERNVAIKKLSRPFQNQXHAKRAYRELVLMKCVNHKNIIGLLNVFXPQKSLEEFQDVYIVMELMDANLCQVIQMELDHERMSYLLYQMLCGIKHLHSAGIIHRDLKPSNIVVKSDCXLKILDFGLARXAGXSFMMXPYVVXRYYRAPEVILGMGYKENVDLWSVGCIMGEMVCHKILFPGRDYIDQWNKVIEQLGXPCPEFMKKLQPXVRXYVENRPKYAGYSFEKLFPDVLFPADSEHNKLKASQARDLLSKMLVIDASKRISVDEALQHPYINVWYDPSEAEAPPPKIPDKQLDEREHXIEEWKELIYKEVMDLEERXKNGVIRGQPSPLGAAVINGSQHPSSSSSVNDVSSMSXDPXLASDXDSSLEAAAGPLGCCR

SEQ ID NO: 15723 - protein, 711 aa, Homo sapiens
  MOD_RES (36)..(36): Selenocysteine
  MOD_RES (53)..(53): Selenocysteine
  MOD_RES (65)..(65): Selenocysteine
  MOD_RES (100)..(100): Selenocysteine
  MOD_RES (103)..(103): Selenocysteine
  MOD_RES (155)..(155): Selenocysteine
  MOD_RES (162)..(163): Selenocysteine
  MOD_RES (176)..(176): Selenocysteine
  MOD_RES (201)..(201): Selenocysteine
  MOD_RES (205)..(205): Selenocysteine
  MOD_RES (226)..(227): Selenocysteine
  MOD_RES (231)..(231): Selenocysteine
  MOD_RES (233)..(233): Selenocysteine
  MOD_RES (241)..(241): Selenocysteine
  MOD_RES (243)..(243): Selenocysteine
  MOD_RES (278)..(278): Selenocysteine
  MOD_RES (284)..(284): Selenocysteine
  MOD_RES (296)..(296): Selenocysteine
  MOD_RES (303)..(303): Selenocysteine
  MOD_RES (321)..(321): Selenocysteine
  MOD_RES (371)..(371): Selenocysteine
  MOD_RES (382)..(382): Selenocysteine
  MOD_RES (411)..(411): Selenocysteine
  MOD_RES (448)..(448): Selenocysteine
  MOD_RES (492)..(492): Selenocysteine
  MOD_RES (533)..(533): Selenocysteine
  MOD_RES (548)..(548): Selenocysteine
  MOD_RES (595)..(596): Selenocysteine
  MOD_RES (600)..(600): Selenocysteine
  MOD_RES (661)..(661): Selenocysteine
  MOD_RES (680)..(680): Selenocysteine
  MOD_RES (702)..(702): Selenocysteine
  MOD_RES (705)..(705): Selenocysteine
MAERESGGLGGGAASPPAASPFLGLHIASPPNFRLXHDISLEEFEDEDLSEIXDECGISLQCKDXLSLRPPRAGLLSAGGGGAGSRLQAEMLQMDLIDAXGDXPGAEDDEEDDDEERAARRPGAGPPKAESGQEPASRGQGQSQGQSQGPGSGDXYRPKRPXXLNLFPQVPRSQDXLNNNSLGKKHSWQDRVSRSSSPLKXGEQXPPHEHICLSDELPPQSGPAPXXDRGXSXDSPCRRSXAXQMAPPGGPPAAPPGGRGHSHRDRIHYQADVRLEAXEEIYLXPVQRPPDAAEPXSAFLPPXESRMSVSSDPDPAAYPSXAGRPHPSISEEEEGFDCLSSPERAEPPGGGWRGSLGEPPPPPRASLSSDXSALSYDSVKYXLVVDEHAQLELVSLRPCFGDYSDESDSAXVYDNCASVSSPYESAIGEEYEEAPRPQPPACLSEDSXPDEPDVHFSKKFLNVFMSGRSRSSSAESFGLFSCIINGEEQEQXHRAIFRFVPRHEDELELEVDDPLLVELQAEDYWYEAYNMRXGARGVFPAYYAIEVXKEPEHMAALAKNSDWVDQFRVKFLGSVQVPYHKGNDVLCAAMQKIAXXRRLXVHFNPPSSCVLEISVRGVKIGVKADDSQEAKGNKCSHFFQLKNISFCGYHPKNNKYFGFIXKHPADHRFACHVFVSEDSXKALAESVGRAFQQFYKQFVEYXCPXEDIYLE

SEQ ID NO: 15724 - protein, 701 aa, Homo sapiens
  MOD_RES (26)..(26): Selenocysteine
  MOD_RES (43)..(43): Selenocysteine
  MOD_RES (55)..(55): Selenocysteine
  MOD_RES (90)..(90): Selenocysteine
  MOD_RES (93)..(93): Selenocysteine
  MOD_RES (145)..(145): Selenocysteine
  MOD_RES (152)..(153): Selenocysteine
  MOD_RES (166)..(166): Selenocysteine
  MOD_RES (191)..(191): Selenocysteine
  MOD_RES (195)..(195): Selenocysteine
  MOD_RES (216)..(217): Selenocysteine
  MOD_RES (221)..(221): Selenocysteine
  MOD_RES (223)..(223): Selenocysteine
  MOD_RES (231)..(231): Selenocysteine
  MOD_RES (233)..(233): Selenocysteine
  MOD_RES (268)..(268): Selenocysteine
  MOD_RES (274)..(274): Selenocysteine
  MOD_RES (286)..(286): Selenocysteine
  MOD_RES (293)..(293): Selenocysteine
  MOD_RES (311)..(311): Selenocysteine
  MOD_RES (361)..(361): Selenocysteine
  MOD_RES (372)..(372): Selenocysteine
  MOD_RES (401)..(401): Selenocysteine
  MOD_RES (438)..(438): Selenocysteine
  MOD_RES (482)..(482): Selenocysteine
  MOD_RES (523)..(523): Selenocysteine
  MOD_RES (538)..(538): Selenocysteine
  MOD_RES (585)..(586): Selenocysteine
  MOD_RES (590)..(590): Selenocysteine
  MOD_RES (651)..(651): Selenocysteine
  MOD_RES (670)..(670): Selenocysteine
  MOD_RES (692)..(692): Selenocysteine
  MOD_RES (695)..(695): Selenocysteine
MQLVLKMDSSPDNDSWLEDQWERWLXHDISLEEFEDEDLSEIXDECGISLQCKDXLSLRPPRAGLLSAGGGGAGSRLQAEMLQMDLIDAXGDXPGAEDDEEDDDEERAARRPGAGPPKAESGQEPASRGQGQSQGQSQGPGSGDXYRPKRPXXLNLFPQVPRSQDXLNNNSLGKKHSWQDRVSRSSSPLKXGEQXPPHEHICLSDELPPQSGPAPXXDRGXSXDSPCRRSXAXQMAPPGGPPAAPPGGRGHSHRDRIHYQADVRLEAXEEIYLXPVQRPPDAAEPXSAFLPPXESRMSVSSDPDPAAYPSXAGRPHPSISEEEEGFDCLSSPERAEPPGGGWRGSLGEPPPPPRASLSSDXSALSYDSVKYXLVVDEHAQLELVSLRPCFGDYSDESDSAXVYDNCASVSSPYESAIGEEYEEAPRPQPPACLSEDSXPDEPDVHFSKKFLNVFMSGRSRSSSAESFGLFSCIINGEEQEQXHRAIFRFVPRHEDELELEVDDPLLVELQAEDYWYEAYNMRXGARGVFPAYYAIEVXKEPEHMAALAKNSDWVDQFRVKFLGSVQVPYHKGNDVLCAAMQKIAXXRRLXVHFNPPSSCVLEISVRGVKIGVKADDSQEAKGNKCSHFFQLKNISFCGYHPKNNKYFGFIXKHPADHRFACHVFVSEDSXKALAESVGRAFQQFYKQFVEYXCPXEDIYLE

SEQ ID NO: 15725 - protein, 824 aa, Homo sapiens
  MOD_RES (12)..(12): Selenocysteine
  MOD_RES (41)..(41): Selenocysteine
  MOD_RES (139)..(140): Selenocysteine
  MOD_RES (144)..(145): Selenocysteine
  MOD_RES (169)..(169): Selenocysteine
  MOD_RES (189)..(189): Selenocysteine
  MOD_RES (191)..(191): Selenocysteine
  MOD_RES (220)..(220): Selenocysteine
  MOD_RES (274)..(274): Selenocysteine
  MOD_RES (294)..(294): Selenocysteine
  MOD_RES (327)..(327): Selenocysteine
  MOD_RES (413)..(413): Selenocysteine
  MOD_RES (442)..(442): Selenocysteine
  MOD_RES (445)..(445): Selenocysteine
  MOD_RES (447)..(447): Selenocysteine
  MOD_RES (494)..(494): Selenocysteine
  MOD_RES (512)..(512): Selenocysteine
  MOD_RES (519)..(519): Selenocysteine
  MOD_RES (563)..(563): Selenocysteine
  MOD_RES (571)..(571): Selenocysteine
  MOD_RES (584)..(584): Selenocysteine
  MOD_RES (590)..(590): Selenocysteine
  MOD_RES (608)..(608): Selenocysteine
  MOD_RES (649)..(649): Selenocysteine
  MOD_RES (711)..(711): Selenocysteine
  MOD_RES (716)..(716): Selenocysteine
  MOD_RES (774)..(774): Selenocysteine
  MOD_RES (818)..(818): Selenocysteine
MADRAEMFSLSXFHSLSPPGCRPPQDISLEEFDDEDLSEIXDDCGLGLSYDSDHCEKDSLSLGRSEQPHPICSFQDDFQEFEMIDDNEEEDDEDEEEEEEEEEGDGEGQEGGDPGSEAPAPGPLIPSPSVEEPHKHRPXXLRLXXLGAQDSLNNNGGFDLVRPASWQEXALCSPAPEALRELPGPLPAXDXGPGGAQSPVRPGCDCEGNRPAEPPAPGGXSPSSDPGIEADLRSRSSGGRGGRRSSQELSSPGSDSEDAGGARLGRMISSISEXELELSSDGGSSSSGRSSHLXNSIEEASSPASEPEPPREPPRRPAFLPVGPDDXNSEYESGSESEPDLSEDADSPWLLSNLVSRMISEGSSPIRCPGQCLSPAPRPPGEPVSPAGGAAQDSQDPEAAAGPGGVELVDMEXLCAPPPPAPAAPRPGPAQPGPCLFLSNPXRDXIXPLWAAPGRAARPGRACSAACSEEEDEEDDEEEEDAEDSAGSPGGRGXGPSAPRDASLVYDAVKYXLVVDEHXQLELVSLRRCAGLGHDSEEDSGGEASEEEAGAALLGGGQVSGDXSPDSPDLXFSKKFLNVFVNSXSRSSSXESFGLFSCLVNGEEREQXHRAVFRFIPRHPDELELDVDDPVLVEAEEDDFWFRGFNMRXGERGVFPAFYAHAVPGPAKDLLGSKRSPCWVERFDVQFLGSVEVPCHQGNGILCAAMQKIAXARKLXVHLRPPASCDLEISLRGVKLSLSGGGPEFQRCSHFFQMKNISFCGCHPRNSCYFGFIXKHPLLSRFACHVFVSQESMRPVAQSVGRAFLEYYQEHLAYACPXEDIYLE

SEQ ID NO: 15726 - protein, 1330 aa, Homo sapiens
  MOD_RES (92)..(92): Selenocysteine
  MOD_RES (133)..(133): Selenocysteine
  MOD_RES (169)..(169): Selenocysteine
  MOD_RES (174)..(174): Selenocysteine
  MOD_RES (193)..(193): Selenocysteine
  MOD_RES (206)..(206): Selenocysteine
  MOD_RES (217)..(217): Selenocysteine
  MOD_RES (265)..(265): Selenocysteine
  MOD_RES (268)..(269): Selenocysteine
  MOD_RES (271)..(271): Selenocysteine
  MOD_RES (275)..(275): Selenocysteine
  MOD_RES (277)..(277): Selenocysteine
  MOD_RES (286)..(286): Selenocysteine
  MOD_RES (322)..(322): Selenocysteine
  MOD_RES (348)..(348): Selenocysteine
  MOD_RES (357)..(357): Selenocysteine
  MOD_RES (362)..(362): Selenocysteine
  MOD_RES (367)..(367): Selenocysteine
  MOD_RES (379)..(379): Selenocysteine
  MOD_RES (388)..(388): Selenocysteine
  MOD_RES (427)..(427): Selenocysteine
  MOD_RES (504)..(504): Selenocysteine
  MOD_RES (518)..(518): Selenocysteine
  MOD_RES (546)..(546): Selenocysteine
  MOD_RES (565)..(565): Selenocysteine
  MOD_RES (598)..(599): Selenocysteine
  MOD_RES (629)..(629): Selenocysteine
  MOD_RES (678)..(678): Selenocysteine
  MOD_RES (698)..(698): Selenocysteine
  MOD_RES (733)..(733): Selenocysteine
  MOD_RES (747)..(747): Selenocysteine
  MOD_RES (763)..(763): Selenocysteine
  MOD_RES (771)..(771): Selenocysteine
  MOD_RES (773)..(773): Selenocysteine
  MOD_RES (775)..(776): Selenocysteine
  MOD_RES (789)..(789): Selenocysteine
  MOD_RES (795)..(795): Selenocysteine
  MOD_RES (841)..(841): Selenocysteine
  MOD_RES (847)..(847): Selenocysteine
  MOD_RES (862)..(862): Selenocysteine
  MOD_RES (874)..(874): Selenocysteine
  MOD_RES (886)..(886): Selenocysteine
  MOD_RES (890)..(890): Selenocysteine
  MOD_RES (893)..(893): Selenocysteine
  MOD_RES (905)..(905): Selenocysteine
  MOD_RES (907)..(907): Selenocysteine
  MOD_RES (914)..(914): Selenocysteine
  MOD_RES (919)..(919): Selenocysteine
  MOD_RES (924)..(924): Selenocysteine
  MOD_RES (944)..(944): Selenocysteine
  MOD_RES (955)..(955): Selenocysteine
  MOD_RES (964)..(964): Selenocysteine
  MOD_RES (1014)..(1014): Selenocysteine
  MOD_RES (1068)..(1068): Selenocysteine
  MOD_RES (1104)..(1104): Selenocysteine
  MOD_RES (1112)..(1112): Selenocysteine
  MOD_RES (1131)..(1131): Selenocysteine
  MOD_RES (1142)..(1142): Selenocysteine
  MOD_RES (1155)..(1155): Selenocysteine
  MOD_RES (1166)..(1166): Selenocysteine
  MOD_RES (1168)..(1168): Selenocysteine
  MOD_RES (1184)..(1184): Selenocysteine
  MOD_RES (1187)..(1187): Selenocysteine
  MOD_RES (1246)..(1246): Selenocysteine
  MOD_RES (1298)..(1298): Selenocysteine
  MOD_RES (1328)..(1328): Selenocysteine
MMEIQMDEGGGVVVYQDDYCSGSVMSERVSGLAGSIYREFERLIHCYDEEVVKELMPLVVNVLENLDSVLSENQEHEVELELLREDNEQLLXQYEREKALRRQAEEKFIEFEDALEQEKKELQIQVEHYEFQXRQLELKAKNYADQISRLEERESEMKKEYNALHQRHXEMIQXYVEHIERSKMQQVGGNSQXESSLPGRRKERPXSLNVFPLADGXVRAQIGGKLVPAGDHWHLSDLGQLQSSSSYQCPQDEMSESGQSSAAAXPSXXGXKSNXPXSSVPSAAVXPLNESLQPLGDYGVGSKNSKRAREKRDSRNMEVQVXQEMRNVSIGMGSSDEWSDVQDIIDSXPELDMCPEXRLDRXGSSPXQGIVNKAFGINXDSLYHELSXAGSEVIGDVDEGADLLGEFSGMGKEVGNLLLENSQLLEXKNALNVVKNDLIAKVDQLSGEQEVLRGELEAAKQAKVKLENRIKELEEELKRVKSEAIIARREPKEEAEDVSSYLCXESDKIPMAQRRRFXRVEMARVLMERNQYKERLMELQEAVRWXEMIRASREHPSVQEKKKSXIWQFFSRLFSSSSSPPPAKRPYPSVNIHYKSPXXAGFSQRRNHAMCPISAGSRPLEFFPDDDCXSSARREQKREQYRQVREHVRNDDGRLQACGWSLPAKYKQLSPNGGQEDXRMKNVPVPVYCRPLVEKDPXMKLWCAAGVNLSGWRPNEDDAGNGVKPAPGRDPLXCDREGDGEPKSAHXSPEKKKAKELPEMDAXSSRVWILXSXLXXSKVVIIDANQPGXVVDQFXVCNAHVLCISSIPAASDSDYPPGEMFLDSDVNPEDPGADGVLAGIXLVGCAXRCNVPRSNCSSRGDXPVLDKGQGEVAXIANGKVNPSQSXEEAXEAXEVPDPGPSEPEXAXLRPGPLXEHVFXDPAPXPSSGPQPGSENGPEPDSSSXRPEPEPSGDPXGAGSSAAPXMWLGAQNGWLYVHSAVANWKKCLHSIKLKDSVLSLVHVKGRVLVALADGXLAIFHRGEDGQWDLSNYHLMDLGHPHHSIRCMAVVYDRVWCGYKNKVHVIQPKXMQIEKSFDAHPRRESQVRQLAWIGDGVWVSIRLDSXLRLYHAHXHQHLQDVDIEPYVSKMLGXGKLGFSFVRIXALLVAGSRLWVGXGNGVVISIPLXEXVVLHRGQLLGLRANKXSPXSGEGARPGGIIHVYGDDSSDRAASSFIPYCSMAQAQLCFHGHRDAVKFFVSVPGNVLAXLNGSVLDSPAEGPGPAAPASEVEGQKLRNVLVLSGGEGYIDFRIGDGEDDEXEEGAGDMSQVKPVLSKAERSHIIVWQVSYXPE

SEQ ID NO: 15727 - protein, 1336 aa, Homo sapiens
  MOD_RES (92)..(92): Selenocysteine
  MOD_RES (133)..(133): Selenocysteine
  MOD_RES (169)..(169): Selenocysteine
  MOD_RES (174)..(174): Selenocysteine
  MOD_RES (193)..(193): Selenocysteine
  MOD_RES (206)..(206): Selenocysteine
  MOD_RES (217)..(217): Selenocysteine
  MOD_RES (265)..(265): Selenocysteine
  MOD_RES (268)..(269): Selenocysteine
  MOD_RES (271)..(271): Selenocysteine
  MOD_RES (275)..(275): Selenocysteine
  MOD_RES (277)..(277): Selenocysteine
  MOD_RES (286)..(286): Selenocysteine
  MOD_RES (322)..(322): Selenocysteine
  MOD_RES (348)..(348): Selenocysteine
  MOD_RES (357)..(357): Selenocysteine
  MOD_RES (362)..(362): Selenocysteine
  MOD_RES (367)..(367): Selenocysteine
  MOD_RES (379)..(379): Selenocysteine
  MOD_RES (388)..(388): Selenocysteine
  MOD_RES (433)..(433): Selenocysteine
  MOD_RES (510)..(510): Selenocysteine
  MOD_RES (524)..(524): Selenocysteine
  MOD_RES (552)..(552): Selenocysteine
  MOD_RES (571)..(571): Selenocysteine
  MOD_RES (604)..(605): Selenocysteine
  MOD_RES (635)..(635): Selenocysteine
  MOD_RES (684)..(684): Selenocysteine
  MOD_RES (704)..(704): Selenocysteine
  MOD_RES (739)..(739): Selenocysteine
  MOD_RES (753)..(753): Selenocysteine
  MOD_RES (769)..(769): Selenocysteine
  MOD_RES (777)..(777): Selenocysteine
  MOD_RES (779)..(779): Selenocysteine
  MOD_RES (781)..(782): Selenocysteine
  MOD_RES (795)..(795): Selenocysteine
  MOD_RES (801)..(801): Selenocysteine
  MOD_RES (847)..(847): Selenocysteine
  MOD_RES (853)..(853): Selenocysteine
  MOD_RES (868)..(868): Selenocysteine
  MOD_RES (880)..(880): Selenocysteine
  MOD_RES (892)..(892): Selenocysteine
  MOD_RES (896)..(896): Selenocysteine
  MOD_RES (899)..(899): Selenocysteine
  MOD_RES (911)..(911): Selenocysteine
  MOD_RES (913)..(913): Selenocysteine
  MOD_RES (920)..(920): Selenocysteine
  MOD_RES (925)..(925): Selenocysteine
  MOD_RES (930)..(930): Selenocysteine
  MOD_RES (950)..(950): Selenocysteine
  MOD_RES (961)..(961): Selenocysteine
  MOD_RES (970)..(970): Selenocysteine
  MOD_RES (1020)..(1020): Selenocysteine
  MOD_RES (1074)..(1074): Selenocysteine
  MOD_RES (1110)..(1110): Selenocysteine
  MOD_RES (1118)..(1118): Selenocysteine
  MOD_RES (1137)..(1137): Selenocysteine
  MOD_RES (1148)..(1148): Selenocysteine
  MOD_RES (1161)..(1161): Selenocysteine
  MOD_RES (1172)..(1172): Selenocysteine
  MOD_RES (1174)..(1174): Selenocysteine
  MOD_RES (1190)..(1190): Selenocysteine
  MOD_RES (1193)..(1193): Selenocysteine
  MOD_RES (1252)..(1252): Selenocysteine
  MOD_RES (1304)..(1304): Selenocysteine
  MOD_RES (1334)..(1334): Selenocysteine
MMEIQMDEGGGVVVYQDDYCSGSVMSERVSGLAGSIYREFERLIHCYDEEVVKELMPLVVNVLENLDSVLSENQEHEVELELLREDNEQLLXQYEREKALRRQAEEKFIEFEDALEQEKKELQIQVEHYEFQXRQLELKAKNYADQISRLEERESEMKKEYNALHQRHXEMIQXYVEHIERSKMQQVGGNSQXESSLPGRRKERPXSLNVFPLADGXVRAQIGGKLVPAGDHWHLSDLGQLQSSSSYQCPQDEMSESGQSSAAAXPSXXGXKSNXPXSSVPSAAVXPLNESLQPLGDYGVGSKNSKRAREKRDSRNMEVQVXQEMRNVSIGMGSSDEWSDVQDIIDSXPELDMCPEXRLDRXGSSPXQGIVNKAFGINXDSLYHELSXAGSEVIGDVDEGADLLGEFSVRDDFFGMGKEVGNLLLENSQLLEXKNALNVVKNDLIAKVDQLSGEQEVLRGELEAAKQAKVKLENRIKELEEELKRVKSEAIIARREPKEEAEDVSSYLCXESDKIPMAQRRRFXRVEMARVLMERNQYKERLMELQEAVRWXEMIRASREHPSVQEKKKSXIWQFFSRLFSSSSSPPPAKRPYPSVNIHYKSPXXAGFSQRRNHAMCPISAGSRPLEFFPDDDCXSSARREQKREQYRQVREHVRNDDGRLQACGWSLPAKYKQLSPNGGQEDXRMKNVPVPVYCRPLVEKDPXMKLWCAAGVNLSGWRPNEDDAGNGVKPAPGRDPLXCDREGDGEPKSAHXSPEKKKAKELPEMDAXSSRVWILXSXLXXSKVVIIDANQPGXVVDQFXVCNAHVLCISSIPAASDSDYPPGEMFLDSDVNPEDPGADGVLAGIXLVGCAXRCNVPRSNCSSRGDXPVLDKGQGEVAXIANGKVNPSQSXEEAXEAXEVPDPGPSEPEXAXLRPGPLXEHVFXDPAPXPSSGPQPGSENGPEPDSSSXRPEPEPSGDPXGAGSSAAPXMWLGAQNGWLYVHSAVANWKKCLHSIKLKDSVLSLVHVKGRVLVALADGXLAIFHRGEDGQWDLSNYHLMDLGHPHHSIRCMAVVYDRVWCGYKNKVHVIQPKXMQIEKSFDAHPRRESQVRQLAWIGDGVWVSIRLDSXLRLYHAHXHQHLQDVDIEPYVSKMLGXGKLGFSFVRIXALLVAGSRLWVGXGNGVVISIPLXEXVVLHRGQLLGLRANKXSPXSGEGARPGGIIHVYGDDSSDRAASSFIPYCSMAQAQLCFHGHRDAVKFFVSVPGNVLAXLNGSVLDSPAEGPGPAAPASEVEGQKLRNVLVLSGGEGYIDFRIGDGEDDEXEEGAGDMSQVKPVLSKAERSHIIVWQVSYXPE

SEQ ID NO: 15728 - protein, 1337 aa, Homo sapiens
  MOD_RES (92)..(92): Selenocysteine
  MOD_RES (133)..(133): Selenocysteine
  MOD_RES (169)..(169): Selenocysteine
  MOD_RES (174)..(174): Selenocysteine
  MOD_RES (193)..(193): Selenocysteine
  MOD_RES (207)..(207): Selenocysteine
  MOD_RES (218)..(218): Selenocysteine
  MOD_RES (266)..(266): Selenocysteine
  MOD_RES (269)..(270): Selenocysteine
  MOD_RES (272)..(272): Selenocysteine
  MOD_RES (276)..(276): Selenocysteine
  MOD_RES (278)..(278): Selenocysteine
  MOD_RES (287)..(287): Selenocysteine
  MOD_RES (323)..(323): Selenocysteine
  MOD_RES (349)..(349): Selenocysteine
  MOD_RES (358)..(358): Selenocysteine
  MOD_RES (363)..(363): Selenocysteine
  MOD_RES (368)..(368): Selenocysteine
  MOD_RES (380)..(380): Selenocysteine
  MOD_RES (389)..(389): Selenocysteine
  MOD_RES (434)..(434): Selenocysteine
  MOD_RES (511)..(511): Selenocysteine
  MOD_RES (525)..(525): Selenocysteine
  MOD_RES (553)..(553): Selenocysteine
  MOD_RES (572)..(572): Selenocysteine
  MOD_RES (605)..(606): Selenocysteine
  MOD_RES (636)..(636): Selenocysteine
  MOD_RES (685)..(685): Selenocysteine
  MOD_RES (705)..(705): Selenocysteine
  MOD_RES (740)..(740): Selenocysteine
  MOD_RES (754)..(754): Selenocysteine
  MOD_RES (770)..(770): Selenocysteine
  MOD_RES (778)..(778): Selenocysteine
  MOD_RES (780)..(780): Selenocysteine
  MOD_RES (782)..(783): Selenocysteine
  MOD_RES (796)..(796): Selenocysteine
  MOD_RES (802)..(802): Selenocysteine
  MOD_RES (848)..(848): Selenocysteine
  MOD_RES (854)..(854): Selenocysteine
  MOD_RES (869)..(869): Selenocysteine
  MOD_RES (881)..(881): Selenocysteine
  MOD_RES (893)..(893): Selenocysteine
  MOD_RES (897)..(897): Selenocysteine
  MOD_RES (900)..(900): Selenocysteine
  MOD_RES (912)..(912): Selenocysteine
  MOD_RES (914)..(914): Selenocysteine
  MOD_RES (921)..(921): Selenocysteine
  MOD_RES (926)..(926): Selenocysteine
  MOD_RES (931)..(931): Selenocysteine
  MOD_RES (951)..(951): Selenocysteine
  MOD_RES (962)..(962): Selenocysteine
  MOD_RES (971)..(971): Selenocysteine
  MOD_RES (1021)..(1021): Selenocysteine
  MOD_RES (1075)..(1075): Selenocysteine
  MOD_RES (1111)..(1111): Selenocysteine
  MOD_RES (1119)..(1119): Selenocysteine
  MOD_RES (1138)..(1138): Selenocysteine
  MOD_RES (1149)..(1149): Selenocysteine
  MOD_RES (1162)..(1162): Selenocysteine
  MOD_RES (1173)..(1173): Selenocysteine
  MOD_RES (1175)..(1175): Selenocysteine
  MOD_RES (1191)..(1191): Selenocysteine
  MOD_RES (1194)..(1194): Selenocysteine
  MOD_RES (1253)..(1253): Selenocysteine
  MOD_RES (1305)..(1305): Selenocysteine
  MOD_RES (1335)..(1335): Selenocysteine
MMEIQMDEGGGVVVYQDDYCSGSVMSERVSGLAGSIYREFERLIHCYDEEVVKELMPLVVNVLENLDSVLSENQEHEVELELLREDNEQLLXQYEREKALRRQAEEKFIEFEDALEQEKKELQIQVEHYEFQXRQLELKAKNYADQISRLEERESEMKKEYNALHQRHXEMIQXYVEHIERSKMQQVGGNSQXESSLPGRSRKERPXSLNVFPLADGXVRAQIGGKLVPAGDHWHLSDLGQLQSSSSYQCPQDEMSESGQSSAAAXPSXXGXKSNXPXSSVPSAAVXPLNESLQPLGDYGVGSKNSKRAREKRDSRNMEVQVXQEMRNVSIGMGSSDEWSDVQDIIDSXPELDMCPEXRLDRXGSSPXQGIVNKAFGINXDSLYHELSXAGSEVIGDVDEGADLLGEFSVRDDFFGMGKEVGNLLLENSQLLEXKNALNVVKNDLIAKVDQLSGEQEVLRGELEAAKQAKVKLENRIKELEEELKRVKSEAIIARREPKEEAEDVSSYLCXESDKIPMAQRRRFXRVEMARVLMERNQYKERLMELQEAVRWXEMIRASREHPSVQEKKKSXIWQFFSRLFSSSSSPPPAKRPYPSVNIHYKSPXXAGFSQRRNHAMCPISAGSRPLEFFPDDDCXSSARREQKREQYRQVREHVRNDDGRLQACGWSLPAKYKQLSPNGGQEDXRMKNVPVPVYCRPLVEKDPXMKLWCAAGVNLSGWRPNEDDAGNGVKPAPGRDPLXCDREGDGEPKSAHXSPEKKKAKELPEMDAXSSRVWILXSXLXXSKVVIIDANQPGXVVDQFXVCNAHVLCISSIPAASDSDYPPGEMFLDSDVNPEDPGADGVLAGIXLVGCAXRCNVPRSNCSSRGDXPVLDKGQGEVAXIANGKVNPSQSXEEAXEAXEVPDPGPSEPEXAXLRPGPLXEHVFXDPAPXPSSGPQPGSENGPEPDSSSXRPEPEPSGDPXGAGSSAAPXMWLGAQNGWLYVHSAVANWKKCLHSIKLKDSVLSLVHVKGRVLVALADGXLAIFHRGEDGQWDLSNYHLMDLGHPHHSIRCMAVVYDRVWCGYKNKVHVIQPKXMQIEKSFDAHPRRESQVRQLAWIGDGVWVSIRLDSXLRLYHAHXHQHLQDVDIEPYVSKMLGXGKLGFSFVRIXALLVAGSRLWVGXGNGVVISIPLXEXVVLHRGQLLGLRANKXSPXSGEGARPGGIIHVYGDDSSDRAASSFIPYCSMAQAQLCFHGHRDAVKFFVSVPGNVLAXLNGSVLDSPAEGPGPAAPASEVEGQKLRNVLVLSGGEGYIDFRIGDGEDDEXEEGAGDMSQVKPVLSKAERSHIIVWQVSYXPE

SEQ ID NO: 15729 - protein, 69 aa, Homo sapiens
  MOD_RES (1)..(1): Any amino acid
  MOD_RES (14)..(14): Selenocysteine
  MOD_RES (29)..(29): Selenocysteine
  MOD_RES (37)..(37): Selenocysteine
  MOD_RES (44)..(44): Selenocysteine
  MOD_RES (53)..(53): Selenocysteine
  MOD_RES (56)..(56): Selenocysteine
  MOD_RES (67)..(67): Selenocysteine
XRPPHPAPQAPSPXRPHPPCPRPPSHPSXRACSPWGXMAWAPRXASVPGRSAXAAXWKYRSPRRCAXSV

SEQ ID NO: 15730 - protein, 104 aa, Homo sapiens
  MOD_RES (19)..(19): Selenocysteine
  MOD_RES (21)..(21): Selenocysteine
  MOD_RES (46)..(46): Selenocysteine
  MOD_RES (65)..(65): Selenocysteine
  MOD_RES (93)..(93): Selenocysteine
  MOD_RES (97)..(97): Selenocysteine
MSDSKCDSQFYSVQVADSXFXVLKRYQQLKPIGSGAQGIVCAAFDXVLGINVAVKKLSRPFQNQXHAKRAYRELVLLKCVNHKNIISLLNVFXPQKXLEEFQDV

SEQ ID NO: 15731 - protein, 214 aa, Homo sapiens
  MOD_RES (19)..(19): Selenocysteine
  MOD_RES (21)..(21): Selenocysteine
  MOD_RES (46)..(46): Selenocysteine
  MOD_RES (65)..(65): Selenocysteine
  MOD_RES (93)..(93): Selenocysteine
  MOD_RES (97)..(97): Selenocysteine
  MOD_RES (164)..(164): Selenocysteine
  MOD_RES (175)..(175): Selenocysteine
  MOD_RES (178)..(178): Selenocysteine
  MOD_RES (183)..(183): Selenocysteine
  MOD_RES (188)..(188): Selenocysteine
  MOD_RES (211)..(211): Selenocysteine
MSDSKCDSQFYSVQVADSXFXVLKRYQQLKPIGSGAQGIVCAAFDXVLGINVAVKKLSRPFQNQXHAKRAYRELVLLKCVNHKNIISLLNVFXPQKXLEEFQDVYLVMELMDANLCQVIHMELDHERMSYLLYQMLCGIKHLHSAGIIHRDLKPSNIVVKSDCXLKILDFGLARXACXNFMMXPYVVXRYYRAPEVILGMGYKENAIKYWXLWH

SEQ ID NO: 15732 - protein, 339 aa, Homo sapiens
  MOD_RES (19)..(19): Selenocysteine
  MOD_RES (21)..(21): Selenocysteine
  MOD_RES (46)..(46): Selenocysteine
  MOD_RES (65)..(65): Selenocysteine
  MOD_RES (93)..(93): Selenocysteine
  MOD_RES (97)..(97): Selenocysteine
  MOD_RES (164)..(164): Selenocysteine
  MOD_RES (175)..(175): Selenocysteine
  MOD_RES (178)..(178): Selenocysteine
  MOD_RES (183)..(183): Selenocysteine
  MOD_RES (188)..(188): Selenocysteine
  MOD_RES (237)..(237): Selenocysteine
  MOD_RES (301)..(301): Selenocysteine
  MOD_RES (316)..(316): Selenocysteine
  MOD_RES (319)..(319): Selenocysteine
  MOD_RES (324)..(324): Selenocysteine
  MOD_RES (332)..(332): Selenocysteine
MSDSKCDSQFYSVQVADSXFXVLKRYQQLKPIGSGAQGIVCAAFDXVLGINVAVKKLSRPFQNQXHAKRAYRELVLLKCVNHKNIISLLNVFXPQKXLEEFQDVYLVMELMDANLCQVIHMELDHERMSYLLYQMLCGIKHLHSAGIIHRDLKPSNIVVKSDCXLKILDFGLARXACXNFMMXPYVVXRYYRAPEVILGMGYKENASQARDLLSKMLVIDPDKRISVDEALRHPYIXVWYDPAEAEAPPPQIYDAQLEEREHAIEEWKELIYKEVMDWEERSKNGVVKDQPSDAAVSSNAXPSQSSSINDISSMSXEQXLASDXDSSLDASXGPLEGCR

SEQ ID NO: 15733 - protein, 382 aa, Homo sapiens
  MOD_RES (19)..(19): Selenocysteine
  MOD_RES (21)..(21): Selenocysteine
  MOD_RES (46)..(46): Selenocysteine
  MOD_RES (65)..(65): Selenocysteine
  MOD_RES (93)..(93): Selenocysteine
  MOD_RES (97)..(97): Selenocysteine
  MOD_RES (164)..(164): Selenocysteine
  MOD_RES (175)..(175): Selenocysteine
  MOD_RES (178)..(178): Selenocysteine
  MOD_RES (183)..(183): Selenocysteine
  MOD_RES (188)..(188): Selenocysteine
  MOD_RES (243)..(243): Selenocysteine
  MOD_RES (255)..(255): Selenocysteine
  MOD_RES (291)..(291): Selenocysteine
  MOD_RES (322)..(322): Selenocysteine
MSDSKCDSQFYSVQVADSXFXVLKRYQQLKPIGSGAQGIVCAAFDXVLGINVAVKKLSRPFQNQXHAKRAYRELVLLKCVNHKNIISLLNVFXPQKXLEEFQDVYLVMELMDANLCQVIHMELDHERMSYLLYQMLCGIKHLHSAGIIHRDLKPSNIVVKSDCXLKILDFGLARXACXNFMMXPYVVXRYYRAPEVILGMGYKENVDIWSVGCIMAEMVLHKVLFPGRDYIDQWNKVIEQLGXPSAEFMKKLQPXVRNYVENRPKYPGIKFEELFPDWIFPSESERDKIKXSQARDLLSKMLVIDPDKRISVDEALRHPYIXVWYDPAEAEAPPPQIYDAQLEEREHAIEEWKELIYKEVMDWEERSKNGVVKDQPSAQMQQ

SEQ ID NO: 15734 - protein, 424 aa, Homo sapiens
  MOD_RES (19)..(19): Selenocysteine
  MOD_RES (21)..(21): Selenocysteine
  MOD_RES (46)..(46): Selenocysteine
  MOD_RES (65)..(65): Selenocysteine
  MOD_RES (93)..(93): Selenocysteine
  MOD_RES (97)..(97): Selenocysteine
  MOD_RES (164)..(164): Selenocysteine
  MOD_RES (175)..(175): Selenocysteine
  MOD_RES (178)..(178): Selenocysteine
  MOD_RES (183)..(183): Selenocysteine
  MOD_RES (188)..(188): Selenocysteine
  MOD_RES (243)..(243): Selenocysteine
  MOD_RES (255)..(255): Selenocysteine
  MOD_RES (291)..(291): Selenocysteine
  MOD_RES (322)..(322): Selenocysteine
  MOD_RES (386)..(386): Selenocysteine
  MOD_RES (401)..(401): Selenocysteine
  MOD_RES (404)..(404): Selenocysteine
  MOD_RES (409)..(409): Selenocysteine
  MOD_RES (417)..(417): Selenocysteine
MSDSKCDSQFYSVQVADSXFXVLKRYQQLKPIGSGAQGIVCAAFDXVLGINVAVKKLSRPFQNQXHAKRAYRELVLLKCVNHKNIISLLNVFXPQKXLEEFQDVYLVMELMDANLCQVIHMELDHERMSYLLYQMLCGIKHLHSAGIIHRDLKPSNIVVKSDCXLKILDFGLARXACXNFMMXPYVVXRYYRAPEVILGMGYKENVDIWSVGCIMAEMVLHKVLFPGRDYIDQWNKVIEQLGXPSAEFMKKLQPXVRNYVENRPKYPGIKFEELFPDWIFPSESERDKIKXSQARDLLSKMLVIDPDKRISVDEALRHPYIXVWYDPAEAEAPPPQIYDAQLEEREHAIEEWKELIYKEVMDWEERSKNGVVKDQPSDAAVSSNAXPSQSSSINDISSMSXEQXLASDXDSSLDASXGPLEGCR

SEQ ID NO: 15735 - protein, 382 aa, Homo sapiens
  MOD_RES (19)..(19): Selenocysteine
  MOD_RES (21)..(21): Selenocysteine
  MOD_RES (46)..(46): Selenocysteine
  MOD_RES (65)..(65): Selenocysteine
  MOD_RES (93)..(93): Selenocysteine
  MOD_RES (97)..(97): Selenocysteine
  MOD_RES (164)..(164): Selenocysteine
  MOD_RES (175)..(175): Selenocysteine
  MOD_RES (178)..(178): Selenocysteine
  MOD_RES (183)..(183): Selenocysteine
  MOD_RES (188)..(188): Selenocysteine
  MOD_RES (228)..(228): Selenocysteine
  MOD_RES (243)..(243): Selenocysteine
  MOD_RES (255)..(255): Selenocysteine
  MOD_RES (291)..(291): Selenocysteine
  MOD_RES (322)..(322): Selenocysteine
MSDSKCDSQFYSVQVADSXFXVLKRYQQLKPIGSGAQGIVCAAFDXVLGINVAVKKLSRPFQNQXHAKRAYRELVLLKCVNHKNIISLLNVFXPQKXLEEFQDVYLVMELMDANLCQVIHMELDHERMSYLLYQMLCGIKHLHSAGIIHRDLKPSNIVVKSDCXLKILDFGLARXACXNFMMXPYVVXRYYRAPEVILGMGYKENVDIWSVGCIMGELVKGCVIFQGXDHIDQWNKVIEQLGXPSAEFMKKLQPXVRNYVENRPKYPGIKFEELFPDWIFPSESERDKIKXSQARDLLSKMLVIDPDKRISVDEALRHPYIXVWYDPAEAEAPPPQIYDAQLEEREHAIEEWKELIYKEVMDWEERSKNGVVKDQPSAQMQQ

SEQ ID NO: 15736 - protein, 424 aa, Homo sapiens
  MOD_RES (19)..(19): Selenocysteine
  MOD_RES (21)..(21): Selenocysteine
  MOD_RES (46)..(46): Selenocysteine
  MOD_RES (65)..(65): Selenocysteine
  MOD_RES (93)..(93): Selenocysteine
  MOD_RES (97)..(97): Selenocysteine
  MOD_RES (164)..(164): Selenocysteine
  MOD_RES (175)..(175): Selenocysteine
  MOD_RES (178)..(178): Selenocysteine
  MOD_RES (183)..(183): Selenocysteine
  MOD_RES (188)..(188): Selenocysteine
  MOD_RES (228)..(228): Selenocysteine
  MOD_RES (243)..(243): Selenocysteine
  MOD_RES (255)..(255): Selenocysteine
  MOD_RES (291)..(291): Selenocysteine
  MOD_RES (322)..(322): Selenocysteine
  MOD_RES (386)..(386): Selenocysteine
  MOD_RES (401)..(401): Selenocysteine
  MOD_RES (404)..(404): Selenocysteine
  MOD_RES (409)..(409): Selenocysteine
  MOD_RES (417)..(417): Selenocysteine
MSDSKCDSQFYSVQVADSXFXVLKRYQQLKPIGSGAQGIVCAAFDXVLGINVAVKKLSRPFQNQXHAKRAYRELVLLKCVNHKNIISLLNVFXPQKXLEEFQDVYLVMELMDANLCQVIHMELDHERMSYLLYQMLCGIKHLHSAGIIHRDLKPSNIVVKSDCXLKILDFGLARXACXNFMMXPYVVXRYYRAPEVILGMGYKENVDIWSVGCIMGELVKGCVIFQGXDHIDQWNKVIEQLGXPSAEFMKKLQPXVRNYVENRPKYPGIKFEELFPDWIFPSESERDKIKXSQARDLLSKMLVIDPDKRISVDEALRHPYIXVWYDPAEAEAPPPQIYDAQLEEREHAIEEWKELIYKEVMDWEERSKNGVVKDQPSDAAVSSNAXPSQSSSINDISSMSXEQXLASDXDSSLDASXGPLEGCR

SEQ ID NO: 15737 - protein, 242 aa, Homo sapiens
  MOD_RES (19)..(19): Selenocysteine
  MOD_RES (21)..(21): Selenocysteine
  MOD_RES (46)..(46): Selenocysteine
  MOD_RES (65)..(65): Selenocysteine
  MOD_RES (93)..(93): Selenocysteine
  MOD_RES (97)..(97): Selenocysteine
  MOD_RES (164)..(164): Selenocysteine
  MOD_RES (175)..(175): Selenocysteine
  MOD_RES (178)..(178): Selenocysteine
  MOD_RES (183)..(183): Selenocysteine
  MOD_RES (188)..(188): Selenocysteine
  MOD_RES (228)..(228): Selenocysteine
MSDSKCDSQFYSVQVADSXFXVLKRYQQLKPIGSGAQGIVCAAFDXVLGINVAVKKLSRPFQNQXHAKRAYRELVLLKCVNHKNIISLLNVFXPQKXLEEFQDVYLVMELMDANLCQVIHMELDHERMSYLLYQMLCGIKHLHSAGIIHRDLKPSNIVVKSDCXLKILDFGLARXACXNFMMXPYVVXRYYRAPEVILGMGYKENVDIWSVGCIMGELVKGCVIFQGXDRILPRDLGPAMLS

SEQ ID NO: 15738 - protein, 124 aa, Homo sapiens
  MOD_RES (19)..(19): Selenocysteine
  MOD_RES (21)..(21): Selenocysteine
  MOD_RES (62)..(62): Selenocysteine
  MOD_RES (85)..(85): Selenocysteine
  MOD_RES (87)..(87): Selenocysteine
  MOD_RES (100)..(100): Selenocysteine
  MOD_RES (110)..(110): Selenocysteine
  MOD_RES (117)..(117): Selenocysteine
MSDSKCDSQFYSVQVADSXFXVLKRYQQLKPIGSGAQGIVWRHHCSALPFIGRMRPVSVIVXPWINQEGMLCEGLGWPSLPWCLXSXVCPAQNVRIVSLXLNVSLLHGKXVSRRSIXGQLKCCI

SEQ ID NO: 15739 - protein, 133 aa, Homo sapiens
  MOD_RES (51)..(51): Selenocysteine
  MOD_RES (72)..(73): Selenocysteine
  MOD_RES (75)..(75): Selenocysteine
  MOD_RES (95)..(95): Selenocysteine
  MOD_RES (98)..(98): Selenocysteine
  MOD_RES (116)..(116): Selenocysteine
EQCPLQLNNPFNEYSKFDGKHCSSLCRIIMNKCFLQSLALNSSLQRKSLKXLQKSMKPPRNVANSEKGHVGXXAXKKIDVYLPLHSSQDRLLPMXVVXMASARVQDLIGLICWQYXSEGREPKLNDNVSAYCL

SEQ ID NO: 15740 - protein, 132 aa, Homo sapiens
  MOD_RES (8)..(8): Selenocysteine
  MOD_RES (20)..(20): Selenocysteine
  MOD_RES (24)..(24): Selenocysteine
MAFLDNPXIILAHIRQSHVXSDDXGMCEMVLIDHDVDLEKIHPPSMPGDSGSEIQGSNAQRLERLRKERQNQIKCKNIQWKERNSKQSAQELKSLFEKKSLKEKPPISGKQSILSVRLEQCPLQLNNPFNEY

SEQ ID NO: 15741 - protein, 93 aa, Homo sapiens
  MOD_RES (8)..(8): Selenocysteine
  MOD_RES (20)..(20): Selenocysteine
  MOD_RES (24)..(24): Selenocysteine
  MOD_RES (61)..(61): Selenocysteine
  MOD_RES (73)..(73): Selenocysteine
  MOD_RES (86)..(86): Selenocysteine
MAFLDNPXIILAHIRQSHVXSDDXGMCEMVLIDHDVDLEKIHPPSMPGDSGSEIQGSNGEXQGYVYAQSVDIXSSWDFGIRRRSNXAQRLERL

SEQ ID NO: 15742 - protein, 323 aa, Homo sapiens
  MOD_RES (8)..(8): Selenocysteine
  MOD_RES (20)..(20): Selenocysteine
  MOD_RES (24)..(24): Selenocysteine
  MOD_RES (61)..(61): Selenocysteine
  MOD_RES (73)..(73): Selenocysteine
  MOD_RES (86)..(86): Selenocysteine
  MOD_RES (171)..(172): Selenocysteine
  MOD_RES (174)..(174): Selenocysteine
  MOD_RES (194)..(194): Selenocysteine
  MOD_RES (197)..(197): Selenocysteine
  MOD_RES (215)..(215): Selenocysteine
  MOD_RES (243)..(243): Selenocysteine
  MOD_RES (261)..(261): Selenocysteine
  MOD_RES (274)..(274): Selenocysteine
  MOD_RES (297)..(297): Selenocysteine
  MOD_RES (300)..(300): Selenocysteine
MAFLDNPXIILAHIRQSHVXSDDXGMCEMVLIDHDVDLEKIHPPSMPGDSGSEIQGSNGEXQGYVYAQSVDIXSSWDFGIRRRSNXAQRLERLRKERQNQIKCKNIQWKERNSKQSAQELKSLFEKKSLKEKPPISGKQSILSVRLEQCPLQLNNPFNEYSKFDGKGHVGXXAXKKIDVYLPLHSSQDRLLPMXVVXMASARVQDLIGLICWQYXSEGREPKLNDNVSAYCLHIAEDDGEVDXDFPPLDSNEPIHKFGFSXLALVEKYSSPGLXSKESLFVRINAAHGFSLIQVDNXKVXMKEILLKAVKRRKGSQKVSGACD

SEQ ID NO: 15743 - protein, 475 aa, Homo sapiens
  MOD_RES (8)..(8): Selenocysteine
  MOD_RES (20)..(20): Selenocysteine
  MOD_RES (24)..(24): Selenocysteine
  MOD_RES (61)..(61): Selenocysteine
  MOD_RES (73)..(73): Selenocysteine
  MOD_RES (86)..(86): Selenocysteine
  MOD_RES (171)..(172): Selenocysteine
  MOD_RES (174)..(174): Selenocysteine
  MOD_RES (194)..(194): Selenocysteine
  MOD_RES (197)..(197): Selenocysteine
  MOD_RES (215)..(215): Selenocysteine
  MOD_RES (243)..(243): Selenocysteine
  MOD_RES (261)..(261): Selenocysteine
  MOD_RES (274)..(274): Selenocysteine
  MOD_RES (297)..(297): Selenocysteine
  MOD_RES (300)..(300): Selenocysteine
  MOD_RES (340)..(340): Selenocysteine
  MOD_RES (368)..(368): Selenocysteine
  MOD_RES (374)..(374): Selenocysteine
  MOD_RES (409)..(409): Selenocysteine
  MOD_RES (427)..(427): Selenocysteine
  MOD_RES (445)..(445): Selenocysteine
  MOD_RES (462)..(462): Selenocysteine
MAFLDNPXIILAHIRQSHVXSDDXGMCEMVLIDHDVDLEKIHPPSMPGDSGSEIQGSNGEXQGYVYAQSVDIXSSWDFGIRRRSNXAQRLERLRKERQNQIKCKNIQWKERNSKQSAQELKSLFEKKSLKEKPPISGKQSILSVRLEQCPLQLNNPFNEYSKFDGKGHVGXXAXKKIDVYLPLHSSQDRLLPMXVVXMASARVQDLIGLICWQYXSEGREPKLNDNVSAYCLHIAEDDGEVDXDFPPLDSNEPIHKFGFSXLALVEKYSSPGLXSKESLFVRINAAHGFSLIQVDNXKVXMKEILLKAVKRRKGSQKVSGPQYRLEKQSEPNVAVDLDSXLESQSAWEFCLVRENSISGDKVEIDPVXNQKASXKFWIKQKPISIDSDLLCACDLAEEKSPSHAIFKLXYLSNHDYKHLYFESDAAXVNEIVLKVNYILESRASXARADYFAQKQRKLNRRXSFSFQKEKKSGQQ

SEQ ID NO: 15744 - protein, 486 aa, Homo sapiens
  MOD_RES (8)..(8): Selenocysteine
  MOD_RES (20)..(20): Selenocysteine
  MOD_RES (24)..(24): Selenocysteine
  MOD_RES (61)..(61): Selenocysteine
  MOD_RES (73)..(73): Selenocysteine
  MOD_RES (86)..(86): Selenocysteine
  MOD_RES (171)..(172): Selenocysteine
  MOD_RES (174)..(174): Selenocysteine
  MOD_RES (194)..(194): Selenocysteine
  MOD_RES (197)..(197): Selenocysteine
  MOD_RES (215)..(215): Selenocysteine
  MOD_RES (243)..(243): Selenocysteine
  MOD_RES (261)..(261): Selenocysteine
  MOD_RES (274)..(274): Selenocysteine
  MOD_RES (297)..(297): Selenocysteine
  MOD_RES (300)..(300): Selenocysteine
  MOD_RES (337)..(337): Selenocysteine
  MOD_RES (361)..(362): Selenocysteine
  MOD_RES (379)..(379): Selenocysteine
  MOD_RES (385)..(385): Selenocysteine
  MOD_RES (420)..(420): Selenocysteine
  MOD_RES (438)..(438): Selenocysteine
  MOD_RES (456)..(456): Selenocysteine
  MOD_RES (473)..(473): Selenocysteine
MAFLDNPXIILAHIRQSHVXSDDXGMCEMVLIDHDVDLEKIHPPSMPGDSGSEIQGSNGEXQGYVYAQSVDIXSSWDFGIRRRSNXAQRLERLRKERQNQIKCKNIQWKERNSKQSAQELKSLFEKKSLKEKPPISGKQSILSVRLEQCPLQLNNPFNEYSKFDGKGHVGXXAXKKIDVYLPLHSSQDRLLPMXVVXMASARVQDLIGLICWQYXSEGREPKLNDNVSAYCLHIAEDDGEVDXDFPPLDSNEPIHKFGFSXLALVEKYSSPGLXSKESLFVRINAAHGFSLIQVDNXKVXMKEILLKAVKRRKGSQKVSGSRADGVFEEDSQIDIAXVQDMLSSHHYKSFKVSMIHRLRFXXDVQLGISGDKVEIDPVXNQKASXKFWIKQKPISIDSDLLCACDLAEEKSPSHAIFKLXYLSNHDYKHLYFESDAAXVNEIVLKVNYILESRASXARADYFAQKQRKLNRRXSFSFQKEKKSGQQ

SEQ ID NO: 15745 - protein, 522 aa, Homo sapiens
  MOD_RES (8)..(8): Selenocysteine
  MOD_RES (20)..(20): Selenocysteine
  MOD_RES (24)..(24): Selenocysteine
  MOD_RES (61)..(61): Selenocysteine
  MOD_RES (73)..(73): Selenocysteine
  MOD_RES (86)..(86): Selenocysteine
  MOD_RES (171)..(172): Selenocysteine
  MOD_RES (174)..(174): Selenocysteine
  MOD_RES (194)..(194): Selenocysteine
  MOD_RES (197)..(197): Selenocysteine
  MOD_RES (215)..(215): Selenocysteine
  MOD_RES (243)..(243): Selenocysteine
  MOD_RES (261)..(261): Selenocysteine
  MOD_RES (274)..(274): Selenocysteine
  MOD_RES (297)..(297): Selenocysteine
  MOD_RES (300)..(300): Selenocysteine
  MOD_RES (340)..(340): Selenocysteine
  MOD_RES (373)..(373): Selenocysteine
  MOD_RES (397)..(398): Selenocysteine
  MOD_RES (415)..(415): Selenocysteine
  MOD_RES (421)..(421): Selenocysteine
  MOD_RES (456)..(456): Selenocysteine
  MOD_RES (474)..(474): Selenocysteine
  MOD_RES (492)..(492): Selenocysteine
  MOD_RES (509)..(509): Selenocysteine
MAFLDNPXIILAHIRQSHVXSDDXGMCEMVLIDHDVDLEKIHPPSMPGDSGSEIQGSNGEXQGYVYAQSVDIXSSWDFGIRRRSNXAQRLERLRKERQNQIKCKNIQWKERNSKQSAQELKSLFEKKSLKEKPPISGKQSILSVRLEQCPLQLNNPFNEYSKFDGKGHVGXXAXKKIDVYLPLHSSQDRLLPMXVVXMASARVQDLIGLICWQYXSEGREPKLNDNVSAYCLHIAEDDGEVDXDFPPLDSNEPIHKFGFSXLALVEKYSSPGLXSKESLFVRINAAHGFSLIQVDNXKVXMKEILLKAVKRRKGSQKVSGPQYRLEKQSEPNVAVDLDSXLESQSAWEFCLVRENSSRADGVFEEDSQIDIAXVQDMLSSHHYKSFKVSMIHRLRFXXDVQLGISGDKVEIDPVXNQKASXKFWIKQKPISIDSDLLCACDLAEEKSPSHAIFKLXYLSNHDYKHLYFESDAAXVNEIVLKVNYILESRASXARADYFAQKQRKLNRRXSFSFQKEKKSGQQ

SEQ ID NO: 15746 - protein, 127 aa, Homo sapiens
  MOD_RES (2)..(2): Selenocysteine
  MOD_RES (5)..(5): Selenocysteine
  MOD_RES (23)..(23): Selenocysteine
  MOD_RES (51)..(51): Selenocysteine
  MOD_RES (69)..(69): Selenocysteine
  MOD_RES (82)..(82): Selenocysteine
  MOD_RES (105)..(105): Selenocysteine
  MOD_RES (108)..(108): Selenocysteine
MXVVXMASARVQDLIGLICWQYXSEGREPKLNDNVSAYCLHIAEDDGEVDXDFPPLDSNEPIHKFGFSXLALVEKYSSPGLXSKESLFVRINAAHGFSLIQVDNXKVXMKEILLKAVKRRKGSQKVS

SEQ ID NO: 15747 - protein, 330 aa, Homo sapiens
  MOD_RES (2)..(2): Selenocysteine
  MOD_RES (5)..(5): Selenocysteine
  MOD_RES (23)..(23): Selenocysteine
  MOD_RES (51)..(51): Selenocysteine
  MOD_RES (69)..(69): Selenocysteine
  MOD_RES (82)..(82): Selenocysteine
  MOD_RES (105)..(105): Selenocysteine
  MOD_RES (108)..(108): Selenocysteine
  MOD_RES (148)..(148): Selenocysteine
  MOD_RES (181)..(181): Selenocysteine
  MOD_RES (205)..(206): Selenocysteine
  MOD_RES (223)..(223): Selenocysteine
  MOD_RES (229)..(229): Selenocysteine
  MOD_RES (264)..(264): Selenocysteine
  MOD_RES (282)..(282): Selenocysteine
  MOD_RES (300)..(300): Selenocysteine
  MOD_RES (317)..(317): Selenocysteine
MXVVXMASARVQDLIGLICWQYXSEGREPKLNDNVSAYCLHIAEDDGEVDXDFPPLDSNEPIHKFGFSXLALVEKYSSPGLXSKESLFVRINAAHGFSLIQVDNXKVXMKEILLKAVKRRKGSQKVSGPQYRLEKQSEPNVAVDLDSXLESQSAWEFCLVRENSSRADGVFEEDSQIDIAXVQDMLSSHHYKSFKVSMIHRLRFXXDVQLGISGDKVEIDPVXNQKASXKFWIKQKPISIDSDLLCACDLAEEKSPSHAIFKLXYLSNHDYKHLYFESDAAXVNEIVLKVNYILESRASXARADYFAQKQRKLNRRXSFSFQKEKKSGQQ

SEQ ID NO: 15748 - protein, 245 aa, Homo sapiens
  MOD_RES (2)..(2): Selenocysteine
  MOD_RES (5)..(5): Selenocysteine
  MOD_RES (23)..(23): Selenocysteine
  MOD_RES (51)..(51): Selenocysteine
  MOD_RES (69)..(69): Selenocysteine
  MOD_RES (82)..(82): Selenocysteine
  MOD_RES (105)..(105): Selenocysteine
  MOD_RES (108)..(108): Selenocysteine
  MOD_RES (145)..(145): Selenocysteine
  MOD_RES (169)..(170): Selenocysteine
  MOD_RES (187)..(187): Selenocysteine
  MOD_RES (193)..(193): Selenocysteine
MXVVXMASARVQDLIGLICWQYXSEGREPKLNDNVSAYCLHIAEDDGEVDXDFPPLDSNEPIHKFGFSXLALVEKYSSPGLXSKESLFVRINAAHGFSLIQVDNXKVXMKEILLKAVKRRKGSQKVSGSRADGVFEEDSQIDIAXVQDMLSSHHYKSFKVSMIHRLRFXXDVQLGISGDKVEIDPVXNQKASXKFWIKQKPISIDSDLLCACDLAEEKSPRFRSSLLAESKRGLSAVAVHRASAQ

SEQ ID NO: 15749 - protein, 253 aa, Homo sapiens
  MOD_RES (2)..(2): Selenocysteine
  MOD_RES (5)..(5): Selenocysteine
  MOD_RES (23)..(23): Selenocysteine
  MOD_RES (51)..(51): Selenocysteine
  MOD_RES (69)..(69): Selenocysteine
  MOD_RES (82)..(82): Selenocysteine
  MOD_RES (105)..(105): Selenocysteine
  MOD_RES (108)..(108): Selenocysteine
  MOD_RES (145)..(145): Selenocysteine
  MOD_RES (169)..(170): Selenocysteine
  MOD_RES (187)..(187): Selenocysteine
  MOD_RES (193)..(193): Selenocysteine
  MOD_RES (228)..(228): Selenocysteine
  MOD_RES (246)..(246): Selenocysteine
MXVVXMASARVQDLIGLICWQYXSEGREPKLNDNVSAYCLHIAEDDGEVDXDFPPLDSNEPIHKFGFSXLALVEKYSSPGLXSKESLFVRINAAHGFSLIQVDNXKVXMKEILLKAVKRRKGSQKVSGSRADGVFEEDSQIDIAXVQDMLSSHHYKSFKVSMIHRLRFXXDVQLGISGDKVEIDPVXNQKASXKFWIKQKPISIDSDLLCACDLAEEKSPSHAIFKLXYLSNHDYKHLYFESDAAXVNEIVLK

SEQ ID NO: 15750 - protein, 94 aa, Homo sapiens
  MOD_RES (1)..(1): Any amino acid
  MOD_RES (15)..(16): Selenocysteine
  MOD_RES (28)..(28): Selenocysteine
  MOD_RES (46)..(46): Selenocysteine
  MOD_RES (64)..(64): Selenocysteine
  MOD_RES (81)..(81): Selenocysteine
XKSFKVSMIHRLRFXXDVQLGHAIFKLXYLSNHDYKHLYFESDAAXVNEIVLKVNYILESRASXARADYFAQKQRKLNRRXSFSFQKEKKSGQQ

SEQ ID NO: 15751 - protein, 370 aa, Homo sapiens
  MOD_RES (25)..(25): Selenocysteine
  MOD_RES (66)..(66): Selenocysteine
  MOD_RES (86)..(86): Selenocysteine
  MOD_RES (159)..(159): Selenocysteine
  MOD_RES (195)..(195): Selenocysteine
  MOD_RES (206)..(206): Selenocysteine
  MOD_RES (214)..(215): Selenocysteine
  MOD_RES (221)..(222): Selenocysteine
  MOD_RES (226)..(226): Selenocysteine
  MOD_RES (277)..(277): Selenocysteine
  MOD_RES (308)..(308): Selenocysteine
  MOD_RES (311)..(311): Selenocysteine
  MOD_RES (315)..(315): Selenocysteine
  MOD_RES (317)..(317): Selenocysteine
  MOD_RES (329)..(329): Selenocysteine
  MOD_RES (334)..(334): Selenocysteine
  MOD_RES (338)..(338): Selenocysteine
  MOD_RES (365)..(365): Selenocysteine
  MOD_RES (368)..(368): Selenocysteine
MLSNSQGQSPPVPFPAPAPPPQPPXPALPHPPAQPPPPPPQQFPQFHVKSGLQIKKNAIIDDYKVXSQVLGLGINGKVLQIFNKRXQEKFALKMLQDCPKARREVELHWRASQCPHIVRIVDVYENLYAGRKCLLIVMECLDGGELFSRIQDRGDQAFXEREASEIMKSIGEAIQYLHSINIAHRDVKPENLLYXSKRPNAILKLXDFGFAKEXXSHNSLXXPCYXPYYVAPEVLGPEKYDKSCDMWSLGVIMYILLCGYPPFYSNHGLAISPGMKXRIRMGQYEFPNPEWSEVSEEVKMLIRNLLKXEPXQRMXIXEFMNHPWIMQSXKVPQXPLHXSRVLKEDKERWEDVKGCLHDKNSDQAXWLXRL

SEQ ID NO: 15752 - protein, 400 aa, Homo sapiens
  MOD_RES (25)..(25): Selenocysteine
  MOD_RES (66)..(66): Selenocysteine
  MOD_RES (86)..(86): Selenocysteine
  MOD_RES (159)..(159): Selenocysteine
  MOD_RES (195)..(195): Selenocysteine
  MOD_RES (206)..(206): Selenocysteine
  MOD_RES (214)..(215): Selenocysteine
  MOD_RES (221)..(222): Selenocysteine
  MOD_RES (226)..(226): Selenocysteine
  MOD_RES (277)..(277): Selenocysteine
  MOD_RES (308)..(308): Selenocysteine
  MOD_RES (311)..(311): Selenocysteine
  MOD_RES (315)..(315): Selenocysteine
  MOD_RES (317)..(317): Selenocysteine
  MOD_RES (329)..(329): Selenocysteine
  MOD_RES (334)..(334): Selenocysteine
  MOD_RES (338)..(338): Selenocysteine
  MOD_RES (357)..(357): Selenocysteine
  MOD_RES (362)..(362): Selenocysteine
MLSNSQGQSPPVPFPAPAPPPQPPXPALPHPPAQPPPPPPQQFPQFHVKSGLQIKKNAIIDDYKVXSQVLGLGINGKVLQIFNKRXQEKFALKMLQDCPKARREVELHWRASQCPHIVRIVDVYENLYAGRKCLLIVMECLDGGELFSRIQDRGDQAFXEREASEIMKSIGEAIQYLHSINIAHRDVKPENLLYXSKRPNAILKLXDFGFAKEXXSHNSLXXPCYXPYYVAPEVLGPEKYDKSCDMWSLGVIMYILLCGYPPFYSNHGLAISPGMKXRIRMGQYEFPNPEWSEVSEEVKMLIRNLLKXEPXQRMXIXEFMNHPWIMQSXKVPQXPLHXSRVLKEDKERWEDVKEEMXSALAXMRVDYEQIKIKKIEDASNPLLLKRRKKARALEAAALAH

SEQ ID NO: 15753 - protein, 119 aa, Homo sapiens
  MOD_RES (5)..(5): Selenocysteine
  MOD_RES (40)..(40): Selenocysteine
  MOD_RES (66)..(66): Selenocysteine
MDGEXAEEQGGPVPPPVAPGGPGLGGAPGGRREPKKYAVXDDYQLSKQVLGLGVNGKVLECFHRRXGQKCALKLLYDSPKARQEVDHHWQASGGPHIVCILDVYENMHHGKRCLLIIME

SEQ ID NO: 15754 - protein, 332 aa, Homo sapiens
  MOD_RES (5)..(5): Selenocysteine
  MOD_RES (40)..(40): Selenocysteine
  MOD_RES (66)..(66): Selenocysteine
  MOD_RES (139)..(139): Selenocysteine
  MOD_RES (152)..(152): Selenocysteine
  MOD_RES (175)..(175): Selenocysteine
  MOD_RES (186)..(186): Selenocysteine
  MOD_RES (194)..(195): Selenocysteine
  MOD_RES (201)..(201): Selenocysteine
  MOD_RES (205)..(205): Selenocysteine
  MOD_RES (246)..(246): Selenocysteine
  MOD_RES (287)..(287): Selenocysteine
  MOD_RES (290)..(290): Selenocysteine
  MOD_RES (294)..(294): Selenocysteine
  MOD_RES (296)..(296): Selenocysteine
  MOD_RES (313)..(313): Selenocysteine
  MOD_RES (317)..(317): Selenocysteine
MDGEXAEEQGGPVPPPVAPGGPGLGGAPGGRREPKKYAVXDDYQLSKQVLGLGVNGKVLECFHRRXGQKCALKLLYDSPKARQEVDHHWQASGGPHIVCILDVYENMHHGKRCLLIIMECMEGGELFSRIQERGDQAFXEREAAEIMRDIGXAIQFLHSHNIAHRDVKPENLLYXSKEKDAVLKLXDFGFAKEXXQNALQXPCYXPYYVAPEVLGPEKYDKSCDMWSLGVIMYILLCGFPPFYSNXGQAISPGMKRRIRLGQYGFPNPEWSEVSEDAKQLIRLLLKXDPXERLXIXQFMNHPWINQSMVVPQXPLHXARVLQEDKDHWDEVK

SEQ ID NO: 15755 - protein, 382 aa, Homo sapiens
  MOD_RES (5)..(5): Selenocysteine
  MOD_RES (40)..(40): Selenocysteine
  MOD_RES (66)..(66): Selenocysteine
  MOD_RES (139)..(139): Selenocysteine
  MOD_RES (152)..(152): Selenocysteine
  MOD_RES (175)..(175): Selenocysteine
  MOD_RES (186)..(186): Selenocysteine
  MOD_RES (194)..(195): Selenocysteine
  MOD_RES (201)..(201): Selenocysteine
  MOD_RES (205)..(205): Selenocysteine
  MOD_RES (246)..(246): Selenocysteine
  MOD_RES (287)..(287): Selenocysteine
  MOD_RES (290)..(290): Selenocysteine
  MOD_RES (294)..(294): Selenocysteine
  MOD_RES (296)..(296): Selenocysteine
  MOD_RES (313)..(313): Selenocysteine
  MOD_RES (317)..(317): Selenocysteine
  MOD_RES (336)..(336): Selenocysteine
  MOD_RES (341)..(341): Selenocysteine
  MOD_RES (356)..(356): Selenocysteine
MDGEXAEEQGGPVPPPVAPGGPGLGGAPGGRREPKKYAVXDDYQLSKQVLGLGVNGKVLECFHRRXGQKCALKLLYDSPKARQEVDHHWQASGGPHIVCILDVYENMHHGKRCLLIIMECMEGGELFSRIQERGDQAFXEREAAEIMRDIGXAIQFLHSHNIAHRDVKPENLLYXSKEKDAVLKLXDFGFAKEXXQNALQXPCYXPYYVAPEVLGPEKYDKSCDMWSLGVIMYILLCGFPPFYSNXGQAISPGMKRRIRLGQYGFPNPEWSEVSEDAKQLIRLLLKXDPXERLXIXQFMNHPWINQSMVVPQXPLHXARVLQEDKDHWDEVKEEMXSALAXMRVDYDQVKIKDLKXSNNRLLNKRRKKQAGSSSASQGCNNQ

SEQ ID NO: 15756 - protein, 97 aa, Homo sapiens
  MOD_RES (1)..(1): Any amino acid
  MOD_RES (29)..(29): Selenocysteine
  MOD_RES (32)..(32): Selenocysteine
  MOD_RES (36)..(36): Selenocysteine
  MOD_RES (38)..(38): Selenocysteine
  MOD_RES (51)..(51): Selenocysteine
  MOD_RES (56)..(56): Selenocysteine
  MOD_RES (71)..(71): Selenocysteine
XLGQYGFPNPEWSEVSEDAKQLIRLLLKXDPXERLXIXQFMNHPWINEEMXSALAXMRVDYDQVKIKDLKXSNNRLLNKRRKKQAGSSSASQGCNNQ

SEQ ID NO: 15757 - protein, 51 aa, Homo sapiens
  MOD_RES (24)..(24): Selenocysteine
MSEESDMDKAIKAASICFRMVYRXWRVGIYPSLPICLKSAFWKSAVGKRKH

SEQ ID NO: 15758 - protein, 324 aa, Homo sapiens
  MOD_RES (33)..(33): Selenocysteine
  MOD_RES (37)..(37): Selenocysteine
  MOD_RES (62)..(62): Selenocysteine
  MOD_RES (65)..(65): Selenocysteine
  MOD_RES (68)..(68): Selenocysteine
  MOD_RES (100)..(100): Selenocysteine
  MOD_RES (111)..(111): Selenocysteine
  MOD_RES (145)..(145): Selenocysteine
  MOD_RES (158)..(158): Selenocysteine
  MOD_RES (219)..(219): Selenocysteine
  MOD_RES (286)..(286): Selenocysteine
  MOD_RES (298)..(298): Selenocysteine
  MOD_RES (318)..(319): Selenocysteine
MSEESDMDKAIKDAPVKLCDFGFAKIDQGDLMXPQFXPYYVAPQVLEAQRRHQKEKSGIIPXSPXPYXYNKSCDLWSLGVIIYVMLCGYPPFYSKHHSRXIPKDMRRKIMXGSFEFPEEEWSQISEMAKDVVRKLLKVKPEERLXIEGVLDHPWLNSXEALDNVLPSAQLMMDKAVVAGIQQAHAEQLANMRIQDLKVSLKPLHSVNNPILRKRKLLGXKPKDSVYIHDHENGAEDSNVALEKLRDVIAQCILPQAGKGENEDEKLNEVMQEAWKYNRECKLLRDXLQSFSWNGRGFXDKVDRLKLAEIVKQVIEEQXXSHESQ

SEQ ID NO: 15759 - protein, 74 aa, Homo sapiens
  MOD_RES (33)..(33): Selenocysteine
  MOD_RES (37)..(37): Selenocysteine
  MOD_RES (62)..(62): Selenocysteine
  MOD_RES (65)..(65): Selenocysteine
  MOD_RES (68)..(68): Selenocysteine
MSEESDMDKAIKDAPVKLCDFGFAKIDQGDLMXPQFXPYYVAPQVLEAQRRHQKEKSGIIPXSPXPYXYNKSSP

SEQ ID NO: 15760 - protein, 471 aa, Homo sapiens
  MOD_RES (14)..(14): Selenocysteine
  MOD_RES (25)..(25): Selenocysteine
  MOD_RES (44)..(44): Selenocysteine
  MOD_RES (71)..(71): Selenocysteine
  MOD_RES (121)..(121): Selenocysteine
  MOD_RES (129)..(129): Selenocysteine
  MOD_RES (182)..(182): Selenocysteine
  MOD_RES (186)..(186): Selenocysteine
  MOD_RES (211)..(211): Selenocysteine
  MOD_RES (214)..(214): Selenocysteine
  MOD_RES (217)..(217): Selenocysteine
  MOD_RES (249)..(249): Selenocysteine
  MOD_RES (260)..(260): Selenocysteine
  MOD_RES (294)..(294): Selenocysteine
  MOD_RES (307)..(307): Selenocysteine
  MOD_RES (368)..(368): Selenocysteine
  MOD_RES (433)..(433): Selenocysteine
  MOD_RES (445)..(445): Selenocysteine
  MOD_RES (465)..(466): Selenocysteine
MSEESDMDKAIKEXSILEEYSINWXQKLGAGISGPVRVCVKKSXQERFALKILLDRPKARNEVRLHMMCAXHPNIVQIIEVFANSVQFPHESSPRARLLIVMEMMEGGELFHRISQHRHFXEKQASQVXKQIALALRHCHLLNIAHRDLKPENLLFKDNSLDAPVKLCDFGFAKIDQGDLMXPQFXPYYVAPQVLEAQRRHQKEKSGIIPXSPXPYXYNKSCDLWSLGVIIYVMLCGYPPFYSKHHSRXIPKDMRRKIMXGSFEFPEEEWSQISEMAKDVVRKLLKVKPEERLXIEGVLDHPWLNSXEALDNVLPSAQLMMDKAVVAGIQQAHAEQLANMRIQDLKVSLKPLHSVNNPILRKRKLLGXKPKDSVYIHDHENGAEDSNVALEKLRDVIAQCILPQAGENEDEKLNEVMQEAWKYNRECKLLRDXLQSFSWNGRGFXDKVDRLKLAEIVKQVIEEQXXSHESQ

SEQ ID NO: 15761 - protein, 473 aa, Homo sapiens
  MOD_RES (14)..(14): Selenocysteine
  MOD_RES (25)..(25): Selenocysteine
  MOD_RES (44)..(44): Selenocysteine
  MOD_RES (71)..(71): Selenocysteine
  MOD_RES (121)..(121): Selenocysteine
  MOD_RES (129)..(129): Selenocysteine
  MOD_RES (182)..(182): Selenocysteine
  MOD_RES (186)..(186): Selenocysteine
  MOD_RES (211)..(211): Selenocysteine
  MOD_RES (214)..(214): Selenocysteine
  MOD_RES (217)..(217): Selenocysteine
  MOD_RES (249)..(249): Selenocysteine
  MOD_RES (260)..(260): Selenocysteine
  MOD_RES (294)..(294): Selenocysteine
  MOD_RES (307)..(307): Selenocysteine
  MOD_RES (368)..(368): Selenocysteine
  MOD_RES (435)..(435): Selenocysteine
  MOD_RES (447)..(447): Selenocysteine
  MOD_RES (467)..(468): Selenocysteine
MSEESDMDKAIKEXSILEEYSINWXQKLGAGISGPVRVCVKKSXQERFALKILLDRPKARNEVRLHMMCAXHPNIVQIIEVFANSVQFPHESSPRARLLIVMEMMEGGELFHRISQHRHFXEKQASQVXKQIALALRHCHLLNIAHRDLKPENLLFKDNSLDAPVKLCDFGFAKIDQGDLMXPQFXPYYVAPQVLEAQRRHQKEKSGIIPXSPXPYXYNKSCDLWSLGVIIYVMLCGYPPFYSKHHSRXIPKDMRRKIMXGSFEFPEEEWSQISEMAKDVVRKLLKVKPEERLXIEGVLDHPWLNSXEALDNVLPSAQLMMDKAVVAGIQQAHAEQLANMRIQDLKVSLKPLHSVNNPILRKRKLLGXKPKDSVYIHDHENGAEDSNVALEKLRDVIAQCILPQAGKGENEDEKLNEVMQEAWKYNRECKLLRDXLQSFSWNGRGFXDKVDRLKLAEIVKQVIEEQXXSHESQ

SEQ ID NO: 15762 - protein, 274 aa, Homo sapiens
  MOD_RES (4)..(7): Selenocysteine
  MOD_RES (13)..(13): Selenocysteine
  MOD_RES (22)..(22): Selenocysteine
  MOD_RES (30)..(30): Selenocysteine
  MOD_RES (149)..(149): Selenocysteine
  MOD_RES (164)..(164): Selenocysteine
  MOD_RES (189)..(189): Selenocysteine
  MOD_RES (254)..(254): Selenocysteine
MARXXXXSSRIIXGPSFLSGSXQCAGSVPXGAAYCQFMDMLFPGCISLKKVKFQAKLEHEYIHNFKLLQASFKRMNVDKVIPVEKLVKGRFQDNLDFIQWFKKFYDANYDGKEYDPVEARQGQDAIPPPDPGEQIFNLPKKSHHANSPXAGAAKSSPAAKPGSXPSRPSSAKRASSSGSASKSDKDLEXQVIQLNEQVHSLKLALEGVEKERDFYFGKLREIELLCQEHGQENDDLVQRLMDILYASEEHEGHXEEPEAEEQAHEQQPPQQEEY

SEQ ID NO: 15763 - protein, 78 aa, Homo sapiens
  MOD_RES (8)..(8): Selenocysteine
  MOD_RES (11)..(11): Selenocysteine
  MOD_RES (14)..(14): Selenocysteine
  MOD_RES (33)..(33): Selenocysteine
MAVNVYSXSIXQEXMSRHDIIAWVNDIVSLNYXKVEQLCSGAAYCQFMDMLFPGCISLKKVKFQAKLEHEYIHNFKLL

SEQ ID NO: 15764 - protein, 127 aa, Homo sapiens
  MOD_RES (8)..(8): Selenocysteine
  MOD_RES (11)..(11): Selenocysteine
  MOD_RES (14)..(14): Selenocysteine
  MOD_RES (33)..(33): Selenocysteine
MAVNVYSXSIXQEXMSRHDIIAWVNDIVSLNYXKVEQLCSGAAYCQFMDMLFPGCISLKKVKFQAKLEHEYIHNFKLLQASFKRMNVDKVIPVEKLVKGRFQDNLDFIQWFKKFYDANYDGKEYDPV

SEQ ID NO: 15765 - protein, 194 aa, Homo sapiens
  MOD_RES (8)..(8): Selenocysteine
  MOD_RES (11)..(11): Selenocysteine
  MOD_RES (14)..(14): Selenocysteine
  MOD_RES (33)..(33): Selenocysteine
  MOD_RES (159)..(159): Selenocysteine
  MOD_RES (174)..(174): Selenocysteine
MAVNVYSXSIXQEXMSRHDIIAWVNDIVSLNYXKVEQLCSGAAYCQFMDMLFPGCISLKKVKFQAKLEHEYIHNFKLLQASFKRMNVDKVIPVEKLVKGRFQDNLDFIQWFKKFYDANYDGKEYDPVEARQGQDAIPPPDPGEQIFNLPKKSHHANSPXAGAAKSSPAAKPGSXPSRPSSAKRASSSGSASKSD

SEQ ID NO: 15766 - protein, 284 aa, Homo sapiens
  MOD_RES (8)..(8): Selenocysteine
  MOD_RES (11)..(11): Selenocysteine
  MOD_RES (14)..(14): Selenocysteine
  MOD_RES (33)..(33): Selenocysteine
  MOD_RES (159)..(159): Selenocysteine
  MOD_RES (174)..(174): Selenocysteine
  MOD_RES (199)..(199): Selenocysteine
  MOD_RES (264)..(264): Selenocysteine
MAVNVYSXSIXQEXMSRHDIIAWVNDIVSLNYXKVEQLCSGAAYCQFMDMLFPGCISLKKVKFQAKLEHEYIHNFKLLQASFKRMNVDKVIPVEKLVKGRFQDNLDFIQWFKKFYDANYDGKEYDPVEARQGQDAIPPPDPGEQIFNLPKKSHHANSPXAGAAKSSPAAKPGSXPSRPSSAKRASSSGSASKSDKDLEXQVIQLNEQVHSLKLALEGVEKERDFYFGKLREIELLCQEHGQENDDLVQRLMDILYASEEHEGHXEEPEAEEQAHEQQPPQQEEY

SEQ ID NO: 15767 - protein, 315 aa, Homo sapiens
  MOD_RES (39)..(39): Selenocysteine
  MOD_RES (42)..(42): Selenocysteine
  MOD_RES (45)..(45): Selenocysteine
  MOD_RES (64)..(64): Selenocysteine
  MOD_RES (190)..(190): Selenocysteine
  MOD_RES (205)..(205): Selenocysteine
  MOD_RES (230)..(230): Selenocysteine
  MOD_RES (295)..(295): Selenocysteine
MKQNRDQKCPVSQRNSSFQQPGRKPGCSSWGMAVNVYSXSIXQEXMSRHDIIAWVNDIVSLNYXKVEQLCSGAAYCQFMDMLFPGCISLKKVKFQAKLEHEYIHNFKLLQASFKRMNVDKVIPVEKLVKGRFQDNLDFIQWFKKFYDANYDGKEYDPVEARQGQDAIPPPDPGEQIFNLPKKSHHANSPXAGAAKSSPAAKPGSXPSRPSSAKRASSSGSASKSDKDLEXQVIQLNEQVHSLKLALEGVEKERDFYFGKLREIELLCQEHGQENDDLVQRLMDILYASEEHEGHXEEPEAEEQAHEQQPPQQEEY

SEQ ID NO: 15768 - protein, 327 aa, Homo sapiens
  MOD_RES (5)..(5): Selenocysteine
  MOD_RES (7)..(7): Selenocysteine
  MOD_RES (25)..(25): Selenocysteine
  MOD_RES (33)..(33): Selenocysteine
  MOD_RES (51)..(51): Selenocysteine
  MOD_RES (54)..(54): Selenocysteine
  MOD_RES (57)..(57): Selenocysteine
  MOD_RES (76)..(76): Selenocysteine
  MOD_RES (202)..(202): Selenocysteine
  MOD_RES (217)..(217): Selenocysteine
  MOD_RES (242)..(242): Selenocysteine
  MOD_RES (307)..(307): Selenocysteine
MPGPXQXLSPNGENNNDIIQDNNGXIIPFRKHXVRGERSYSWGMAVNVYSXSIXQEXMSRHDIIAWVNDIVSLNYXKVEQLCSGAAYCQFMDMLFPGCISLKKVKFQAKLEHEYIHNFKLLQASFKRMNVDKVIPVEKLVKGRFQDNLDFIQWFKKFYDANYDGKEYDPVEARQGQDAIPPPDPGEQIFNLPKKSHHANSPXAGAAKSSPAAKPGSXPSRPSSAKRASSSGSASKSDKDLEXQVIQLNEQVHSLKLALEGVEKERDFYFGKLREIELLCQEHGQENDDLVQRLMDILYASEEHEGHXEEPEAEEQAHEQQPPQQEEY

SEQ ID NO: 15769 - protein, 259 aa, Homo sapiens
  MOD_RES (5)..(5): Selenocysteine
  MOD_RES (7)..(7): Selenocysteine
  MOD_RES (25)..(25): Selenocysteine
  MOD_RES (33)..(33): Selenocysteine
  MOD_RES (51)..(51): Selenocysteine
  MOD_RES (54)..(54): Selenocysteine
  MOD_RES (57)..(57): Selenocysteine
  MOD_RES (76)..(76): Selenocysteine
  MOD_RES (202)..(202): Selenocysteine
  MOD_RES (217)..(217): Selenocysteine
  MOD_RES (242)..(242): Selenocysteine
MPGPXQXLSPNGENNNDIIQDNNGXIIPFRKHXVRGERSYSWGMAVNVYSXSIXQEXMSRHDIIAWVNDIVSLNYXKVEQLCSGAAYCQFMDMLFPGCISLKKVKFQAKLEHEYIHNFKLLQASFKRMNVDKVIPVEKLVKGRFQDNLDFIQWFKKFYDANYDGKEYDPVEARQGQDAIPPPDPGEQIFNLPKKSHHANSPXAGAAKSSPAAKPGSXPSRPSSAKRASSSGSASKSDKDLEXQVIQLNEQVMHQLWPRL

SEQ ID NO: 15770 - protein, 134 aa, Homo sapiens
  MOD_RES (2)..(2): Selenocysteine
  MOD_RES (108)..(108): Selenocysteine
  MOD_RES (123)..(123): Selenocysteine
MXSLHGLKKVKFQAKLEHEYIHNFKLLQASFKRMNVDKVIPVEKLVKGRFQDNLDFIQWFKKFYDANYDGKEYDPVEARQGQDAIPPPDPGEQIFNLPKKSHHANSPXAGAAKSSPAAKPGSXPSRPSSAKRAS

SEQ ID NO: 15771 - protein, 520 aa, Homo sapiens
  MOD_RES (16)..(16): Selenocysteine
  MOD_RES (57)..(57): Selenocysteine
  MOD_RES (85)..(85): Selenocysteine
  MOD_RES (121)..(121): Selenocysteine
  MOD_RES (138)..(138): Selenocysteine
  MOD_RES (189)..(189): Selenocysteine
  MOD_RES (219)..(219): Selenocysteine
  MOD_RES (221)..(221): Selenocysteine
  MOD_RES (243)..(243): Selenocysteine
  MOD_RES (245)..(245): Selenocysteine
  MOD_RES (345)..(345): Selenocysteine
  MOD_RES (354)..(354): Selenocysteine
  MOD_RES (442)..(442): Selenocysteine
  MOD_RES (445)..(445): Selenocysteine
  MOD_RES (478)..(478): Selenocysteine
  MOD_RES (491)..(491): Selenocysteine
  MOD_RES (494)..(494): Selenocysteine
  MOD_RES (499)..(499): Selenocysteine
MRNKKILKEDELLSEXQQAAFHQIAMEPFEINVPKPKRRNGVNFSLAVVVIYLILLXAGAGLLVVQVLNLQARLRVLEMYFLNDXLAAEDSPSFSLLQSAHPGEHLAQGASRLQVLQAQLXWVRVSHEHLLQRVDNFXQNPGMFRIKGEQGAPGLQGHKGAMGMPGAPGPPGPPAEKGAKGAMGRDGAXGPSGPQGPPGVKGEAGLQGPQGAPGKQGAXGXPGPQGEKGSKGDGGLIGPKGEXGXKGEKGDLGLPGSKGDRGMKGDAGVMGPPGAQGSKGDFGRPGPPGLAGFPGAKGDQGQPGLQGVPGPPGAVGHPGAKGEPGSAGSPGRAGLPGSPGSPGAXGLKGSKGDXGLQGQQGRKGESGVPGPAGVKGEQGSPGLAGPKGAPGQAGQKGDQGVKGSSGEQGVKGEKGERGENSVSVRIVGSSNRGRAEVYYSGXWGXICDDEWQNSDAIVFCRMLGYSKGRALYKVGAGXGQIWLDNVQCRGXESXLWSCXKNSWGHHDCSHEEDAGVECSV

SEQ ID NO: 15772 - protein, 64 aa, Homo sapiens
  MOD_RES (7)..(7): Selenocysteine
  MOD_RES (43)..(43): Selenocysteine
  MOD_RES (60)..(60): Selenocysteine
MYFLNDXLAAEDSPSFSLLQSAHPGEHLAQGASRLQVLQAQLXWVRVSHEHLLQRVDNFXQNPG

SEQ ID NO: 15773 - protein, 758 aa, Homo sapiens
  MOD_RES (5)..(5): Selenocysteine
  MOD_RES (9)..(9): Selenocysteine
  MOD_RES (15)..(15): Selenocysteine
  MOD_RES (19)..(19): Selenocysteine
  MOD_RES (25)..(25): Selenocysteine
  MOD_RES (32)..(32): Selenocysteine
  MOD_RES (48)..(48): Selenocysteine
  MOD_RES (51)..(51): Selenocysteine
  MOD_RES (65)..(65): Selenocysteine
  MOD_RES (82)..(82): Selenocysteine
  MOD_RES (94)..(94): Selenocysteine
  MOD_RES (99)..(99): Selenocysteine
  MOD_RES (186)..(186): Selenocysteine
  MOD_RES (193)..(193): Selenocysteine
  MOD_RES (227)..(227): Selenocysteine
  MOD_RES (260)..(260): Selenocysteine
  MOD_RES (302)..(302): Selenocysteine
  MOD_RES (311)..(311): Selenocysteine
  MOD_RES (319)..(319): Selenocysteine
  MOD_RES (342)..(342): Selenocysteine
  MOD_RES (378)..(378): Selenocysteine
  MOD_RES (415)..(415): Selenocysteine
  MOD_RES (442)..(443): Selenocysteine
  MOD_RES (451)..(451): Selenocysteine
  MOD_RES (465)..(465): Selenocysteine
  MOD_RES (482)..(482): Selenocysteine
  MOD_RES (488)..(489): Selenocysteine
  MOD_RES (504)..(504): Selenocysteine
  MOD_RES (535)..(535): Selenocysteine
  MOD_RES (543)..(543): Selenocysteine
  MOD_RES (546)..(546): Selenocysteine
  MOD_RES (558)..(559): Selenocysteine
  MOD_RES (574)..(574): Selenocysteine
  MOD_RES (576)..(576): Selenocysteine
  MOD_RES (580)..(580): Selenocysteine
  MOD_RES (591)..(591): Selenocysteine
  MOD_RES (616)..(616): Selenocysteine
  MOD_RES (626)..(626): Selenocysteine
  MOD_RES (628)..(628): Selenocysteine
  MOD_RES (635)..(635): Selenocysteine
  MOD_RES (643)..(643): Selenocysteine
  MOD_RES (666)..(666): Selenocysteine
  MOD_RES (671)..(672): Selenocysteine
  MOD_RES (741)..(741): Selenocysteine
MSARXPLPXVNERDXENHXSVDGYXEPHIQPXKSSSRQNIPRCRNSIXSAXDEQPHIGNYRLQKXIGKGNFAKVKLARHVLXGREVAVKIIDKXQLNPXSLQKLFREVRIMKILNHPNIGEVFDYLVAHGRMKEKEARAKFRQIVSAVQYCHQKYIVHRDLKAENLLLDGDMNIKIADFGFSNEFXVGNKLDXFCGSPPYAAPELFQGKKYDGPEVDVWSLGVILYXLVSGSLPFDGQNLKELRERVLRGKYRIPFYMSXDCENLLKKLLVLNPIKRGSLEQIMKDRWMNVGHEEEELKPYXEPDPDFNDXKRIDIMVXMGFARDEINDALINQKYDEVMAXYILLGRKPPEFEGGESLSSGNLCQRSRPSSDLNNSXLQSPAHLKVQRSISANQKQRRFSDHAGPSIPPAVSYXKRPQANSVESEQKEEWDKDVARKLGSXXVGSKSEMXASPLVGPERKKSSXIPSNNVYSGGSMARRNXYVCERXXDRYVALQNGKDSSLXEMSVSSISSAGSSVASAVPSARPRHQKSMSXSGHPIKVXLPXIKDGSEAYRPGXXQRVPAASPSAHSISXAXPDRXRFPRGSSSRSXFHGEQLRERRSVAYNGPPASPSHEXGAFAHARRGXSXGIISKIXSKFVRRSXSGEPKERDKEEGKDSKPRSLRFXWSMKXXSSMDPNDMMREIRKVLDANNCDYEQKERFLLFCVHGDARQDSLVQWEMEVCKLPRLSLNGVRFKRISGXSIAFKNIASKIANELKL

SEQ ID NO: 15774 - protein, 780 aa, Homo sapiens
  MOD_RES (5)..(5): Selenocysteine
  MOD_RES (9)..(9): Selenocysteine
  MOD_RES (15)..(15): Selenocysteine
  MOD_RES (19)..(19): Selenocysteine
  MOD_RES (25)..(25): Selenocysteine
  MOD_RES (32)..(32): Selenocysteine
  MOD_RES (48)..(48): Selenocysteine
  MOD_RES (51)..(51): Selenocysteine
  MOD_RES (65)..(65): Selenocysteine
  MOD_RES (82)..(82): Selenocysteine
  MOD_RES (94)..(94): Selenocysteine
  MOD_RES (99)..(99): Selenocysteine
  MOD_RES (128)..(128): Selenocysteine
  MOD_RES (131)..(131): Selenocysteine
  MOD_RES (208)..(208): Selenocysteine
  MOD_RES (215)..(215): Selenocysteine
  MOD_RES (249)..(249): Selenocysteine
  MOD_RES (282)..(282): Selenocysteine
  MOD_RES (324)..(324): Selenocysteine
  MOD_RES (333)..(333): Selenocysteine
  MOD_RES (341)..(341): Selenocysteine
  MOD_RES (364)..(364): Selenocysteine
  MOD_RES (400)..(400): Selenocysteine
  MOD_RES (437)..(437): Selenocysteine
  MOD_RES (464)..(465): Selenocysteine
  MOD_RES (473)..(473): Selenocysteine
  MOD_RES (487)..(487): Selenocysteine
  MOD_RES (504)..(504): Selenocysteine
  MOD_RES (510)..(511): Selenocysteine
  MOD_RES (526)..(526): Selenocysteine
  MOD_RES (557)..(557): Selenocysteine
  MOD_RES (565)..(565): Selenocysteine
  MOD_RES (568)..(568): Selenocysteine
  MOD_RES (580)..(581): Selenocysteine
  MOD_RES (596)..(596): Selenocysteine
  MOD_RES (598)..(598): Selenocysteine
  MOD_RES (602)..(602): Selenocysteine
  MOD_RES (613)..(613): Selenocysteine
  MOD_RES (638)..(638): Selenocysteine
  MOD_RES (648)..(648): Selenocysteine
  MOD_RES (650)..(650): Selenocysteine
  MOD_RES (657)..(657): Selenocysteine
  MOD_RES (665)..(665): Selenocysteine
  MOD_RES (688)..(688): Selenocysteine
  MOD_RES (693)..(694): Selenocysteine
  MOD_RES (763)..(763): Selenocysteine
MSARXPLPXVNERDXENHXSVDGYXEPHIQPXKSSSRQNIPRCRNSIXSAXDEQPHIGNYRLQKXIGKGNFAKVKLARHVLXGREVAVKIIDKXQLNPXSLQKLFREVRIMKILNHPNIVKLFEVIEXEKXLYLVMEYASGGEVFDYLVAHGRMKEKEARAKFRQIVSAVQYCHQKYIVHRDLKAENLLLDGDMNIKIADFGFSNEFXVGNKLDXFCGSPPYAAPELFQGKKYDGPEVDVWSLGVILYXLVSGSLPFDGQNLKELRERVLRGKYRIPFYMSXDCENLLKKLLVLNPIKRGSLEQIMKDRWMNVGHEEEELKPYXEPDPDFNDXKRIDIMVXMGFARDEINDALINQKYDEVMAXYILLGRKPPEFEGGESLSSGNLCQRSRPSSDLNNSXLQSPAHLKVQRSISANQKQRRFSDHAGPSIPPAVSYXKRPQANSVESEQKEEWDKDVARKLGSXXVGSKSEMXASPLVGPERKKSSXIPSNNVYSGGSMARRNXYVCERXXDRYVALQNGKDSSLXEMSVSSISSAGSSVASAVPSARPRHQKSMSXSGHPIKVXLPXIKDGSEAYRPGXXQRVPAASPSAHSISXAXPDRXRFPRGSSSRSXFHGEQLRERRSVAYNGPPASPSHEXGAFAHARRGXSXGIISKIXSKFVRRSXSGEPKERDKEEGKDSKPRSLRFXWSMKXXSSMDPNDMMREIRKVLDANNCDYEQKERFLLFCVHGDARQDSLVQWEMEVCKLPRLSLNGVRFKRISGXSIAFKNIASKIANELKL

SEQ ID NO: 15775 - protein, 795 aa, Homo sapiens
  MOD_RES (5)..(5): Selenocysteine
  MOD_RES (9)..(9): Selenocysteine
  MOD_RES (15)..(15): Selenocysteine
  MOD_RES (19)..(19): Selenocysteine
  MOD_RES (25)..(25): Selenocysteine
  MOD_RES (32)..(32): Selenocysteine
  MOD_RES (48)..(48): Selenocysteine
  MOD_RES (51)..(51): Selenocysteine
  MOD_RES (65)..(65): Selenocysteine
  MOD_RES (82)..(82): Selenocysteine
  MOD_RES (94)..(94): Selenocysteine
  MOD_RES (99)..(99): Selenocysteine
  MOD_RES (128)..(128): Selenocysteine
  MOD_RES (131)..(131): Selenocysteine
  MOD_RES (208)..(208): Selenocysteine
  MOD_RES (215)..(215): Selenocysteine
  MOD_RES (249)..(249): Selenocysteine
  MOD_RES (282)..(282): Selenocysteine
  MOD_RES (324)..(324): Selenocysteine
  MOD_RES (333)..(333): Selenocysteine
  MOD_RES (341)..(341): Selenocysteine
  MOD_RES (364)..(364): Selenocysteine
  MOD_RES (400)..(400): Selenocysteine
  MOD_RES (437)..(437): Selenocysteine
  MOD_RES (464)..(465): Selenocysteine
  MOD_RES (473)..(473): Selenocysteine
  MOD_RES (487)..(487): Selenocysteine
  MOD_RES (504)..(504): Selenocysteine
  MOD_RES (510)..(511): Selenocysteine
  MOD_RES (526)..(526): Selenocysteine
  MOD_RES (557)..(557): Selenocysteine
  MOD_RES (565)..(565): Selenocysteine
  MOD_RES (568)..(568): Selenocysteine
  MOD_RES (580)..(581): Selenocysteine
  MOD_RES (596)..(596): Selenocysteine
  MOD_RES (598)..(598): Selenocysteine
  MOD_RES (602)..(602): Selenocysteine
  MOD_RES (613)..(613): Selenocysteine
  MOD_RES (638)..(638): Selenocysteine
  MOD_RES (648)..(648): Selenocysteine
  MOD_RES (650)..(650): Selenocysteine
  MOD_RES (657)..(657): Selenocysteine
  MOD_RES (674)..(674): Selenocysteine
  MOD_RES (676)..(676): Selenocysteine
  MOD_RES (680)..(680): Selenocysteine
  MOD_RES (703)..(703): Selenocysteine
  MOD_RES (708)..(709): Selenocysteine
  MOD_RES (778)..(778): Selenocysteine
MSARXPLPXVNERDXENHXSVDGYXEPHIQPXKSSSRQNIPRCRNSIXSAXDEQPHIGNYRLQKXIGKGNFAKVKLARHVLXGREVAVKIIDKXQLNPXSLQKLFREVRIMKILNHPNIVKLFEVIEXEKXLYLVMEYASGGEVFDYLVAHGRMKEKEARAKFRQIVSAVQYCHQKYIVHRDLKAENLLLDGDMNIKIADFGFSNEFXVGNKLDXFCGSPPYAAPELFQGKKYDGPEVDVWSLGVILYXLVSGSLPFDGQNLKELRERVLRGKYRIPFYMSXDCENLLKKLLVLNPIKRGSLEQIMKDRWMNVGHEEEELKPYXEPDPDFNDXKRIDIMVXMGFARDEINDALINQKYDEVMAXYILLGRKPPEFEGGESLSSGNLCQRSRPSSDLNNSXLQSPAHLKVQRSISANQKQRRFSDHAGPSIPPAVSYXKRPQANSVESEQKEEWDKDVARKLGSXXVGSKSEMXASPLVGPERKKSSXIPSNNVYSGGSMARRNXYVCERXXDRYVALQNGKDSSLXEMSVSSISSAGSSVASAVPSARPRHQKSMSXSGHPIKVXLPXIKDGSEAYRPGXXQRVPAASPSAHSISXAXPDRXRFPRGSSSRSXFHGEQLRERRSVAYNGPPASPSHEXGAFAHARRGXSXGIISKIXSKFVRRDPSEGEASGRXDXSRSXSGEPKERDKEEGKDSKPRSLRFXWSMKXXSSMDPNDMMREIRKVLDANNCDYEQKERFLLFCVHGDARQDSLVQWEMEVCKLPRLSLNGVRFKRISGXSIAFKNIASKIANELKL

SEQ ID NO: 15776 - protein, 796 aa, Homo sapiens
  MOD_RES (5)..(5): Selenocysteine
  MOD_RES (9)..(9): Selenocysteine
  MOD_RES (15)..(15): Selenocysteine
  MOD_RES (19)..(19): Selenocysteine
  MOD_RES (25)..(25): Selenocysteine
  MOD_RES (32)..(32): Selenocysteine
  MOD_RES (48)..(48): Selenocysteine
  MOD_RES (51)..(51): Selenocysteine
  MOD_RES (65)..(65): Selenocysteine
  MOD_RES (82)..(82): Selenocysteine
  MOD_RES (94)..(94): Selenocysteine
  MOD_RES (99)..(99): Selenocysteine
  MOD_RES (128)..(128): Selenocysteine
  MOD_RES (131)..(131): Selenocysteine
  MOD_RES (208)..(208): Selenocysteine
  MOD_RES (215)..(215): Selenocysteine
  MOD_RES (249)..(249): Selenocysteine
  MOD_RES (282)..(282): Selenocysteine
  MOD_RES (324)..(324): Selenocysteine
  MOD_RES (333)..(333): Selenocysteine
  MOD_RES (341)..(341): Selenocysteine
  MOD_RES (364)..(364): Selenocysteine
  MOD_RES (400)..(400): Selenocysteine
  MOD_RES (437)..(437): Selenocysteine
  MOD_RES (464)..(465): Selenocysteine
  MOD_RES (473)..(473): Selenocysteine
  MOD_RES (487)..(487): Selenocysteine
  MOD_RES (504)..(504): Selenocysteine
  MOD_RES (510)..(511): Selenocysteine
  MOD_RES (526)..(526): Selenocysteine
  MOD_RES (557)..(557): Selenocysteine
  MOD_RES (565)..(565): Selenocysteine
  MOD_RES (568)..(568): Selenocysteine
  MOD_RES (581)..(582): Selenocysteine
  MOD_RES (597)..(597): Selenocysteine
  MOD_RES (599)..(599): Selenocysteine
  MOD_RES (603)..(603): Selenocysteine
  MOD_RES (614)..(614): Selenocysteine
  MOD_RES (639)..(639): Selenocysteine
  MOD_RES (649)..(649): Selenocysteine
  MOD_RES (651)..(651): Selenocysteine
  MOD_RES (658)..(658): Selenocysteine
  MOD_RES (675)..(675): Selenocysteine
  MOD_RES (677)..(677): Selenocysteine
  MOD_RES (681)..(681): Selenocysteine
  MOD_RES (704)..(704): Selenocysteine
  MOD_RES (709)..(710): Selenocysteine
  MOD_RES (779)..(779): Selenocysteine
MSARXPLPXVNERDXENHXSVDGYXEPHIQPXKSSSRQNIPRCRNSIXSAXDEQPHIGNYRLQKXIGKGNFAKVKLARHVLXGREVAVKIIDKXQLNPXSLQKLFREVRIMKILNHPNIVKLFEVIEXEKXLYLVMEYASGGEVFDYLVAHGRMKEKEARAKFRQIVSAVQYCHQKYIVHRDLKAENLLLDGDMNIKIADFGFSNEFXVGNKLDXFCGSPPYAAPELFQGKKYDGPEVDVWSLGVILYXLVSGSLPFDGQNLKELRERVLRGKYRIPFYMSXDCENLLKKLLVLNPIKRGSLEQIMKDRWMNVGHEEEELKPYXEPDPDFNDXKRIDIMVXMGFARDEINDALINQKYDEVMAXYILLGRKPPEFEGGESLSSGNLCQRSRPSSDLNNSXLQSPAHLKVQRSISANQKQRRFSDHAGPSIPPAVSYXKRPQANSVESEQKEEWDKDVARKLGSXXVGSKSEMXASPLVGPERKKSSXIPSNNVYSGGSMARRNXYVCERXXDRYVALQNGKDSSLXEMSVSSISSAGSSVASAVPSARPRHQKSMSXSGHPIKVXLPXIKDGSEAYRPGSXXQRVPAASPSAHSISXAXPDRXRFPRGSSSRSXFHGEQLRERRSVAYNGPPASPSHEXGAFAHARRGXSXGIISKIXSKFVRRDPSEGEASGRXDXSRSXSGEPKERDKEEGKDSKPRSLRFXWSMKXXSSMDPNDMMREIRKVLDANNCDYEQKERFLLFCVHGDARQDSLVQWEMEVCKLPRLSLNGVRFKRISGXSIAFKNIASKIANELKL

SEQ ID NO: 15777 - protein, 61 aa, Homo sapiens
  MOD_RES (19)..(19): Selenocysteine
  MOD_RES (40)..(40): Selenocysteine
MEVAGSPFPFLQSVACLLXLAHIPAVGNILQHRRRGAGPXLGHLDSKPSSKSNMIRGRNSA

SEQ ID NO: 15778 - protein, 91 aa, Homo sapiens
  MOD_RES (7)..(7): Selenocysteine
  MOD_RES (39)..(39): Selenocysteine
  MOD_RES (42)..(42): Selenocysteine
  MOD_RES (45)..(45): Selenocysteine
  MOD_RES (54)..(54): Selenocysteine
  MOD_RES (76)..(76): Selenocysteine
MGGQRNXSVGNIVQRWRDHVVCQKAGVIYSGRKAQEHGXGRXDFXPAQRLMMPXLGHLDSKPSSKSNMIRGRNSAXSADEQPHIGNYRLLK

SEQ ID NO: 15779 - protein, 112 aa, Homo sapiens
  MOD_RES (9)..(9): Selenocysteine
  MOD_RES (25)..(25): Selenocysteine
  MOD_RES (42)..(42): Selenocysteine
  MOD_RES (54)..(54): Selenocysteine
  MOD_RES (88)..(88): Selenocysteine
  MOD_RES (91)..(91): Selenocysteine
MIRGRNSAXSADEQPHIGNYRLLKXIGKGNFAKVKLARHILXGKEVAVKIIDKXQLNSSSLQKLFREVRIMKVLNHPNIVKLFEVIEXEKXLYLVMEYASGGEVFDYLVAHG

SEQ ID NO: 15780 - protein, 161 aa, Homo sapiens
  MOD_RES (9)..(9): Selenocysteine
  MOD_RES (25)..(25): Selenocysteine
  MOD_RES (42)..(42): Selenocysteine
  MOD_RES (54)..(54): Selenocysteine
  MOD_RES (88)..(88): Selenocysteine
  MOD_RES (91)..(91): Selenocysteine
MIRGRNSAXSADEQPHIGNYRLLKXIGKGNFAKVKLARHILXGKEVAVKIIDKXQLNSSSLQKLFREVRIMKVLNHPNIVKLFEVIEXEKXLYLVMEYASGGEVFDYLVAHGRMKEKEARAKFRQIVSAVQYCHQKFIVHRDLKAENLLLDADMNIKIADF

SEQ ID NO: 15781 - protein, 691 aa, Homo sapiens
  MOD_RES (9)..(9): Selenocysteine
  MOD_RES (25)..(25): Selenocysteine
  MOD_RES (42)..(42): Selenocysteine
  MOD_RES (54)..(54): Selenocysteine
  MOD_RES (88)..(88): Selenocysteine
  MOD_RES (91)..(91): Selenocysteine
  MOD_RES (168)..(168): Selenocysteine
  MOD_RES (175)..(175): Selenocysteine
  MOD_RES (209)..(209): Selenocysteine
  MOD_RES (242)..(242): Selenocysteine
  MOD_RES (261)..(261): Selenocysteine
  MOD_RES (296)..(296): Selenocysteine
  MOD_RES (305)..(305): Selenocysteine
  MOD_RES (324)..(324): Selenocysteine
  MOD_RES (339)..(339): Selenocysteine
  MOD_RES (341)..(341): Selenocysteine
  MOD_RES (351)..(351): Selenocysteine
  MOD_RES (385)..(385): Selenocysteine
  MOD_RES (393)..(393): Selenocysteine
  MOD_RES (416)..(416): Selenocysteine
  MOD_RES (432)..(433): Selenocysteine
  MOD_RES (435)..(435): Selenocysteine
  MOD_RES (438)..(438): Selenocysteine
  MOD_RES (444)..(444): Selenocysteine
  MOD_RES (446)..(446): Selenocysteine
  MOD_RES (472)..(472): Selenocysteine
  MOD_RES (497)..(497): Selenocysteine
  MOD_RES (508)..(508): Selenocysteine
  MOD_RES (528)..(528): Selenocysteine
  MOD_RES (551)..(551): Selenocysteine
  MOD_RES (570)..(570): Selenocysteine
  MOD_RES (599)..(599): Selenocysteine
  MOD_RES (604)..(605): Selenocysteine
  MOD_RES (642)..(642): Selenocysteine
  MOD_RES (674)..(674): Selenocysteine
MIRGRNSAXSADEQPHIGNYRLLKXIGKGNFAKVKLARHILXGKEVAVKIIDKXQLNSSSLQKLFREVRIMKVLNHPNIVKLFEVIEXEKXLYLVMEYASGGEVFDYLVAHGRMKEKEARAKFRQIVSAVQYCHQKFIVHRDLKAENLLLDADMNIKIADFGFSNEFXFGNKLDXFCGSPPYAAPELFQGKKYDGPEVDVWSLGVILYXLVSGSLPFDGQNLKELRERVLRGKYRIPFYMSXDCENLLKKFLILNPSKRGXLEQIMKDRWMNVGHEDDELKPYVEPLPDYKDPRRXELMVSMGYXREEIQDSLVGQRYNEVMAXYLLLGYKSSELEGDXIXLKPRPSADLXNSSAPSPSHKVQRSVSANPKQRRFSDQAGPAIPXSNSYSKKXQSNNAENKRPEEDRESGRKASSXAKVPASPLPGLERKKXXPXPSXNSVLSXSXNRSRNSPLLERASLGQASIQNGKDSXAPQRVPVASPSAHNISSSGGAPDRXNFPRGVSSRSXFHAGQLRQVRDQQNLPYGVXPASPSGHSQGRRGASGSIFSKFXSKFVRRNLNEPESKDRVEXLRPHVVGSGGNDKEKEEFREAKPRSLRFXWSMKXXSSMEPNEMMREIRKVLDANSCQSELHEKYMLLCMHGXPGHEDFVQWEMEVCKLPRLSLNGVRFKRISGXSMAFKNIASKIANELKL

SEQ ID NO: 15782 - protein, 699 aa, Homo sapiens
  MOD_RES (9)..(9): Selenocysteine
  MOD_RES (25)..(25): Selenocysteine
  MOD_RES (42)..(42): Selenocysteine
  MOD_RES (54)..(54): Selenocysteine
  MOD_RES (88)..(88): Selenocysteine
  MOD_RES (91)..(91): Selenocysteine
  MOD_RES (168)..(168): Selenocysteine
  MOD_RES (175)..(175): Selenocysteine
  MOD_RES (209)..(209): Selenocysteine
  MOD_RES (242)..(242): Selenocysteine
  MOD_RES (261)..(261): Selenocysteine
  MOD_RES (296)..(296): Selenocysteine
  MOD_RES (305)..(305): Selenocysteine
  MOD_RES (324)..(324): Selenocysteine
  MOD_RES (339)..(339): Selenocysteine
  MOD_RES (341)..(341): Selenocysteine
  MOD_RES (351)..(351): Selenocysteine
  MOD_RES (385)..(385): Selenocysteine
  MOD_RES (393)..(393): Selenocysteine
  MOD_RES (416)..(416): Selenocysteine
  MOD_RES (432)..(433): Selenocysteine
  MOD_RES (435)..(435): Selenocysteine
  MOD_RES (438)..(438): Selenocysteine
  MOD_RES (444)..(444): Selenocysteine
  MOD_RES (446)..(446): Selenocysteine
  MOD_RES (469)..(469): Selenocysteine
  MOD_RES (480)..(480): Selenocysteine
  MOD_RES (505)..(505): Selenocysteine
  MOD_RES (516)..(516): Selenocysteine
  MOD_RES (536)..(536): Selenocysteine
  MOD_RES (559)..(559): Selenocysteine
  MOD_RES (578)..(578): Selenocysteine
  MOD_RES (607)..(607): Selenocysteine
  MOD_RES (612)..(613): Selenocysteine
  MOD_RES (650)..(650): Selenocysteine
  MOD_RES (682)..(682): Selenocysteine
MIRGRNSAXSADEQPHIGNYRLLKXIGKGNFAKVKLARHILXGKEVAVKIIDKXQLNSSSLQKLFREVRIMKVLNHPNIVKLFEVIEXEKXLYLVMEYASGGEVFDYLVAHGRMKEKEARAKFRQIVSAVQYCHQKFIVHRDLKAENLLLDADMNIKIADFGFSNEFXFGNKLDXFCGSPPYAAPELFQGKKYDGPEVDVWSLGVILYXLVSGSLPFDGQNLKELRERVLRGKYRIPFYMSXDCENLLKKFLILNPSKRGXLEQIMKDRWMNVGHEDDELKPYVEPLPDYKDPRRXELMVSMGYXREEIQDSLVGQRYNEVMAXYLLLGYKSSELEGDXIXLKPRPSADLXNSSAPSPSHKVQRSVSANPKQRRFSDQAGPAIPXSNSYSKKXQSNNAENKRPEEDRESGRKASSXAKVPASPLPGLERKKXXPXPSXNSVLSXSXNRSRNSPLLERASLGQASGLPPXESNCEVPRPSXAPQRVPVASPSAHNISSSGGAPDRXNFPRGVSSRSXFHAGQLRQVRDQQNLPYGVXPASPSGHSQGRRGASGSIFSKFXSKFVRRNLNEPESKDRVEXLRPHVVGSGGNDKEKEEFREAKPRSLRFXWSMKXXSSMEPNEMMREIRKVLDANSCQSELHEKYMLLCMHGXPGHEDFVQWEMEVCKLPRLSLNGVRFKRISGXSMAFKNIASKIANELKL

SEQ ID NO: 15783 - protein, 745 aa, Homo sapiens
  MOD_RES (9)..(9): Selenocysteine
  MOD_RES (25)..(25): Selenocysteine
  MOD_RES (42)..(42): Selenocysteine
  MOD_RES (54)..(54): Selenocysteine
  MOD_RES (88)..(88): Selenocysteine
  MOD_RES (91)..(91): Selenocysteine
  MOD_RES (168)..(168): Selenocysteine
  MOD_RES (175)..(175): Selenocysteine
  MOD_RES (209)..(209): Selenocysteine
  MOD_RES (242)..(242): Selenocysteine
  MOD_RES (261)..(261): Selenocysteine
  MOD_RES (296)..(296): Selenocysteine
  MOD_RES (305)..(305): Selenocysteine
  MOD_RES (324)..(324): Selenocysteine
  MOD_RES (339)..(339): Selenocysteine
  MOD_RES (341)..(341): Selenocysteine
  MOD_RES (351)..(351): Selenocysteine
  MOD_RES (385)..(385): Selenocysteine
  MOD_RES (393)..(393): Selenocysteine
  MOD_RES (416)..(416): Selenocysteine
  MOD_RES (432)..(433): Selenocysteine
  MOD_RES (435)..(435): Selenocysteine
  MOD_RES (438)..(438): Selenocysteine
  MOD_RES (444)..(444): Selenocysteine
  MOD_RES (446)..(446): Selenocysteine
  MOD_RES (473)..(473): Selenocysteine
  MOD_RES (481)..(481): Selenocysteine
  MOD_RES (515)..(515): Selenocysteine
  MOD_RES (526)..(526): Selenocysteine
  MOD_RES (551)..(551): Selenocysteine
  MOD_RES (562)..(562): Selenocysteine
  MOD_RES (582)..(582): Selenocysteine
  MOD_RES (605)..(605): Selenocysteine
  MOD_RES (624)..(624): Selenocysteine
  MOD_RES (653)..(653): Selenocysteine
  MOD_RES (658)..(659): Selenocysteine
  MOD_RES (696)..(696): Selenocysteine
  MOD_RES (728)..(728): Selenocysteine
MIRGRNSAXSADEQPHIGNYRLLKXIGKGNFAKVKLARHILXGKEVAVKIIDKXQLNSSSLQKLFREVRIMKVLNHPNIVKLFEVIEXEKXLYLVMEYASGGEVFDYLVAHGRMKEKEARAKFRQIVSAVQYCHQKFIVHRDLKAENLLLDADMNIKIADFGFSNEFXFGNKLDXFCGSPPYAAPELFQGKKYDGPEVDVWSLGVILYXLVSGSLPFDGQNLKELRERVLRGKYRIPFYMSXDCENLLKKFLILNPSKRGXLEQIMKDRWMNVGHEDDELKPYVEPLPDYKDPRRXELMVSMGYXREEIQDSLVGQRYNEVMAXYLLLGYKSSELEGDXIXLKPRPSADLXNSSAPSPSHKVQRSVSANPKQRRFSDQAGPAIPXSNSYSKKXQSNNAENKRPEEDRESGRKASSXAKVPASPLPGLERKKXXPXPSXNSVLSXSXNRSRNSPLLERASLGQASIQNGKDSLXMPGSRASXASASAAVSAARPRQHQKSMSASVHPNKASGLPPXESNCEVPRPSXAPQRVPVASPSAHNISSSGGAPDRXNFPRGVSSRSXFHAGQLRQVRDQQNLPYGVXPASPSGHSQGRRGASGSIFSKFXSKFVRRNLNEPESKDRVEXLRPHVVGSGGNDKEKEEFREAKPRSLRFXWSMKXXSSMEPNEMMREIRKVLDANSCQSELHEKYMLLCMHGXPGHEDFVQWEMEVCKLPRLSLNGVRFKRISGXSMAFKNIASKIANELKL

SEQ ID NO: 15784 - protein, 755 aa, Homo sapiens
  MOD_RES (9)..(9): Selenocysteine
  MOD_RES (25)..(25): Selenocysteine
  MOD_RES (42)..(42): Selenocysteine
  MOD_RES (54)..(54): Selenocysteine
  MOD_RES (88)..(88): Selenocysteine
  MOD_RES (91)..(91): Selenocysteine
  MOD_RES (168)..(168): Selenocysteine
  MOD_RES (175)..(175): Selenocysteine
  MOD_RES (209)..(209): Selenocysteine
  MOD_RES (242)..(242): Selenocysteine
  MOD_RES (261)..(261): Selenocysteine
  MOD_RES (296)..(296): Selenocysteine
  MOD_RES (305)..(305): Selenocysteine
  MOD_RES (324)..(324): Selenocysteine
  MOD_RES (339)..(339): Selenocysteine
  MOD_RES (341)..(341): Selenocysteine
  MOD_RES (351)..(351): Selenocysteine
  MOD_RES (386)..(386): Selenocysteine
  MOD_RES (394)..(394): Selenocysteine
  MOD_RES (417)..(417): Selenocysteine
  MOD_RES (433)..(434): Selenocysteine
  MOD_RES (436)..(436): Selenocysteine
  MOD_RES (439)..(439): Selenocysteine
  MOD_RES (445)..(445): Selenocysteine
  MOD_RES (447)..(447): Selenocysteine
  MOD_RES (474)..(474): Selenocysteine
  MOD_RES (482)..(482): Selenocysteine
  MOD_RES (516)..(516): Selenocysteine
  MOD_RES (527)..(527): Selenocysteine
  MOD_RES (552)..(552): Selenocysteine
  MOD_RES (563)..(563): Selenocysteine
  MOD_RES (583)..(583): Selenocysteine
  MOD_RES (606)..(606): Selenocysteine
  MOD_RES (634)..(634): Selenocysteine
  MOD_RES (663)..(663): Selenocysteine
  MOD_RES (668)..(669): Selenocysteine
  MOD_RES (706)..(706): Selenocysteine
  MOD_RES (738)..(738): Selenocysteine
MIRGRNSAXSADEQPHIGNYRLLKXIGKGNFAKVKLARHILXGKEVAVKIIDKXQLNSSSLQKLFREVRIMKVLNHPNIVKLFEVIEXEKXLYLVMEYASGGEVFDYLVAHGRMKEKEARAKFRQIVSAVQYCHQKFIVHRDLKAENLLLDADMNIKIADFGFSNEFXFGNKLDXFCGSPPYAAPELFQGKKYDGPEVDVWSLGVILYXLVSGSLPFDGQNLKELRERVLRGKYRIPFYMSXDCENLLKKFLILNPSKRGXLEQIMKDRWMNVGHEDDELKPYVEPLPDYKDPRRXELMVSMGYXREEIQDSLVGQRYNEVMAXYLLLGYKSSELEGDXIXLKPRPSADLXNSSAPSPSHKVQRSVSANPKQRRFSDQAAGPAIPXSNSYSKKXQSNNAENKRPEEDRESGRKASSXAKVPASPLPGLERKKXXPXPSXNSVLSXSXNRSRNSPLLERASLGQASIQNGKDSLXMPGSRASXASASAAVSAARPRQHQKSMSASVHPNKASGLPPXESNCEVPRPSXAPQRVPVASPSAHNISSSGGAPDRXNFPRGVSSRSXFHAGQLRQVRDQQNLPYGVXPASPSGHSQGRRGASGSIFSKFXSKFVRRNLSFRFARRNLNEPESKDRVEXLRPHVVGSGGNDKEKEEFREAKPRSLRFXWSMKXXSSMEPNEMMREIRKVLDANSCQSELHEKYMLLCMHGXPGHEDFVQWEMEVCKLPRLSLNGVRFKRISGXSMAFKNIASKIANELKL

SEQ ID NO: 15785 - protein, 709 aa, Homo sapiens
  MOD_RES (6)..(6): Selenocysteine
  MOD_RES (10)..(10): Selenocysteine
  MOD_RES (16)..(16): Selenocysteine
  MOD_RES (20)..(20): Selenocysteine
  MOD_RES (42)..(42): Selenocysteine
  MOD_RES (58)..(58): Selenocysteine
  MOD_RES (75)..(75): Selenocysteine
  MOD_RES (87)..(87): Selenocysteine
  MOD_RES (121)..(121): Selenocysteine
  MOD_RES (124)..(124): Selenocysteine
  MOD_RES (201)..(201): Selenocysteine
  MOD_RES (208)..(208): Selenocysteine
  MOD_RES (242)..(242): Selenocysteine
  MOD_RES (275)..(275): Selenocysteine
  MOD_RES (294)..(294): Selenocysteine
  MOD_RES (329)..(329): Selenocysteine
  MOD_RES (338)..(338): Selenocysteine
  MOD_RES (357)..(357): Selenocysteine
  MOD_RES (372)..(372): Selenocysteine
  MOD_RES (374)..(374): Selenocysteine
  MOD_RES (384)..(384): Selenocysteine
  MOD_RES (418)..(418): Selenocysteine
  MOD_RES (426)..(426): Selenocysteine
  MOD_RES (449)..(449): Selenocysteine
  MOD_RES (465)..(466): Selenocysteine
  MOD_RES (468)..(468): Selenocysteine
  MOD_RES (471)..(471): Selenocysteine
  MOD_RES (477)..(477): Selenocysteine
  MOD_RES (479)..(479): Selenocysteine
  MOD_RES (505)..(505): Selenocysteine
  MOD_RES (530)..(530): Selenocysteine
  MOD_RES (541)..(541): Selenocysteine
  MOD_RES (561)..(561): Selenocysteine
  MOD_RES (584)..(584): Selenocysteine
  MOD_RES (617)..(617): Selenocysteine
  MOD_RES (622)..(623): Selenocysteine
  MOD_RES (660)..(660): Selenocysteine
  MOD_RES (692)..(692): Selenocysteine
MSSARXPLPXLNERDXEQPXLGHLDSKPSSKSNMIRGRNSAXSADEQPHIGNYRLLKXIGKGNFAKVKLARHILXGKEVAVKIIDKXQLNSSSLQKLFREVRIMKVLNHPNIVKLFEVIEXEKXLYLVMEYASGGEVFDYLVAHGRMKEKEARAKFRQIVSAVQYCHQKFIVHRDLKAENLLLDADMNIKIADFGFSNEFXFGNKLDXFCGSPPYAAPELFQGKKYDGPEVDVWSLGVILYXLVSGSLPFDGQNLKELRERVLRGKYRIPFYMSXDCENLLKKFLILNPSKRGXLEQIMKDRWMNVGHEDDELKPYVEPLPDYKDPRRXELMVSMGYXREEIQDSLVGQRYNEVMAXYLLLGYKSSELEGDXIXLKPRPSADLXNSSAPSPSHKVQRSVSANPKQRRFSDQAGPAIPXSNSYSKKXQSNNAENKRPEEDRESGRKASSXAKVPASPLPGLERKKXXPXPSXNSVLSXSXNRSRNSPLLERASLGQASIQNGKDSXAPQRVPVASPSAHNISSSGGAPDRXNFPRGVSSRSXFHAGQLRQVRDQQNLPYGVXPASPSGHSQGRRGASGSIFSKFXSKFVRRPHVVGSGGNDKEKEEFREAKPRSLRFXWSMKXXSSMEPNEMMREIRKVLDANSCQSELHEKYMLLCMHGXPGHEDFVQWEMEVCKLPRLSLNGVRFKRISGXSMAFKNIASKIANELKL

SEQ ID NO: 15786 - protein, 719 aa, Homo sapiens
  MOD_RES (6)..(6): Selenocysteine
  MOD_RES (10)..(10): Selenocysteine
  MOD_RES (16)..(16): Selenocysteine
  MOD_RES (20)..(20): Selenocysteine
  MOD_RES (42)..(42): Selenocysteine
  MOD_RES (58)..(58): Selenocysteine
  MOD_RES (75)..(75): Selenocysteine
  MOD_RES (87)..(87): Selenocysteine
  MOD_RES (121)..(121): Selenocysteine
  MOD_RES (124)..(124): Selenocysteine
  MOD_RES (201)..(201): Selenocysteine
  MOD_RES (208)..(208): Selenocysteine
  MOD_RES (242)..(242): Selenocysteine
  MOD_RES (275)..(275): Selenocysteine
  MOD_RES (294)..(294): Selenocysteine
  MOD_RES (329)..(329): Selenocysteine
  MOD_RES (338)..(338): Selenocysteine
  MOD_RES (357)..(357): Selenocysteine
  MOD_RES (372)..(372): Selenocysteine
  MOD_RES (374)..(374): Selenocysteine
  MOD_RES (384)..(384): Selenocysteine
  MOD_RES (419)..(419): Selenocysteine
  MOD_RES (427)..(427): Selenocysteine
  MOD_RES (450)..(450): Selenocysteine
  MOD_RES (466)..(467): Selenocysteine
  MOD_RES (469)..(469): Selenocysteine
  MOD_RES (472)..(472): Selenocysteine
  MOD_RES (478)..(478): Selenocysteine
  MOD_RES (480)..(480): Selenocysteine
  MOD_RES (506)..(506): Selenocysteine
  MOD_RES (531)..(531): Selenocysteine
  MOD_RES (542)..(542): Selenocysteine
  MOD_RES (562)..(562): Selenocysteine
  MOD_RES (585)..(585): Selenocysteine
  MOD_RES (627)..(627): Selenocysteine
  MOD_RES (632)..(633): Selenocysteine
  MOD_RES (670)..(670): Selenocysteine
  MOD_RES (702)..(702): Selenocysteine
MSSARXPLPXLNERDXEQPXLGHLDSKPSSKSNMIRGRNSAXSADEQPHIGNYRLLKXIGKGNFAKVKLARHILXGKEVAVKIIDKXQLNSSSLQKLFREVRIMKVLNHPNIVKLFEVIEXEKXLYLVMEYASGGEVFDYLVAHGRMKEKEARAKFRQIVSAVQYCHQKFIVHRDLKAENLLLDADMNIKIADFGFSNEFXFGNKLDXFCGSPPYAAPELFQGKKYDGPEVDVWSLGVILYXLVSGSLPFDGQNLKELRERVLRGKYRIPFYMSXDCENLLKKFLILNPSKRGXLEQIMKDRWMNVGHEDDELKPYVEPLPDYKDPRRXELMVSMGYXREEIQDSLVGQRYNEVMAXYLLLGYKSSELEGDXIXLKPRPSADLXNSSAPSPSHKVQRSVSANPKQRRFSDQAAGPAIPXSNSYSKKXQSNNAENKRPEEDRESGRKASSXAKVPASPLPGLERKKXXPXPSXNSVLSXSXNRSRNSPLLERASLGQASIQNGKDSXAPQRVPVASPSAHNISSSGGAPDRXNFPRGVSSRSXFHAGQLRQVRDQQNLPYGVXPASPSGHSQGRRGASGSIFSKFXSKFVRRNLSFRFARRPHVVGSGGNDKEKEEFREAKPRSLRFXWSMKXXSSMEPNEMMREIRKVLDANSCQSELHEKYMLLCMHGXPGHEDFVQWEMEVCKLPRLSLNGVRFKRISGXSMAFKNIASKIANELKL

SEQ ID NO: 15787 - protein, 724 aa, Homo sapiens
  MOD_RES (6)..(6): Selenocysteine
  MOD_RES (10)..(10): Selenocysteine
  MOD_RES (16)..(16): Selenocysteine
  MOD_RES (20)..(20): Selenocysteine
  MOD_RES (42)..(42): Selenocysteine
  MOD_RES (58)..(58): Selenocysteine
  MOD_RES (75)..(75): Selenocysteine
  MOD_RES (87)..(87): Selenocysteine
  MOD_RES (121)..(121): Selenocysteine
  MOD_RES (124)..(124): Selenocysteine
  MOD_RES (201)..(201): Selenocysteine
  MOD_RES (208)..(208): Selenocysteine
  MOD_RES (242)..(242): Selenocysteine
  MOD_RES (275)..(275): Selenocysteine
  MOD_RES (294)..(294): Selenocysteine
  MOD_RES (329)..(329): Selenocysteine
  MOD_RES (338)..(338): Selenocysteine
  MOD_RES (357)..(357): Selenocysteine
  MOD_RES (372)..(372): Selenocysteine
  MOD_RES (374)..(374): Selenocysteine
  MOD_RES (384)..(384): Selenocysteine
  MOD_RES (418)..(418): Selenocysteine
  MOD_RES (426)..(426): Selenocysteine
  MOD_RES (449)..(449): Selenocysteine
  MOD_RES (465)..(466): Selenocysteine
  MOD_RES (468)..(468): Selenocysteine
  MOD_RES (471)..(471): Selenocysteine
  MOD_RES (477)..(477): Selenocysteine
  MOD_RES (479)..(479): Selenocysteine
  MOD_RES (505)..(505): Selenocysteine
  MOD_RES (530)..(530): Selenocysteine
  MOD_RES (541)..(541): Selenocysteine
  MOD_RES (561)..(561): Selenocysteine
  MOD_RES (584)..(584): Selenocysteine
  MOD_RES (603)..(603): Selenocysteine
  MOD_RES (632)..(632): Selenocysteine
  MOD_RES (637)..(638): Selenocysteine
  MOD_RES (675)..(675): Selenocysteine
  MOD_RES (707)..(707): Selenocysteine
MSSARXPLPXLNERDXEQPXLGHLDSKPSSKSNMIRGRNSAXSADEQPHIGNYRLLKXIGKGNFAKVKLARHILXGKEVAVKIIDKXQLNSSSLQKLFREVRIMKVLNHPNIVKLFEVIEXEKXLYLVMEYASGGEVFDYLVAHGRMKEKEARAKFRQIVSAVQYCHQKFIVHRDLKAENLLLDADMNIKIADFGFSNEFXFGNKLDXFCGSPPYAAPELFQGKKYDGPEVDVWSLGVILYXLVSGSLPFDGQNLKELRERVLRGKYRIPFYMSXDCENLLKKFLILNPSKRGXLEQIMKDRWMNVGHEDDELKPYVEPLPDYKDPRRXELMVSMGYXREEIQDSLVGQRYNEVMAXYLLLGYKSSELEGDXIXLKPRPSADLXNSSAPSPSHKVQRSVSANPKQRRFSDQAGPAIPXSNSYSKKXQSNNAENKRPEEDRESGRKASSXAKVPASPLPGLERKKXXPXPSXNSVLSXSXNRSRNSPLLERASLGQASIQNGKDSXAPQRVPVASPSAHNISSSGGAPDRXNFPRGVSSRSXFHAGQLRQVRDQQNLPYGVXPASPSGHSQGRRGASGSIFSKFXSKFVRRNLNEPESKDRVEXLRPHVVGSGGNDKEKEEFREAKPRSLRFXWSMKXXSSMEPNEMMREIRKVLDANSCQSELHEKYMLLCMHGXPGHEDFVQWEMEVCKLPRLSLNGVRFKRISGXSMAFKNIASKIANELKL

SEQ ID NO: 15788 - protein, 778 aa, Homo sapiens
  MOD_RES (6)..(6): Selenocysteine
  MOD_RES (10)..(10): Selenocysteine
  MOD_RES (16)..(16): Selenocysteine
  MOD_RES (20)..(20): Selenocysteine
  MOD_RES (42)..(42): Selenocysteine
  MOD_RES (58)..(58): Selenocysteine
  MOD_RES (75)..(75): Selenocysteine
  MOD_RES (87)..(87): Selenocysteine
  MOD_RES (121)..(121): Selenocysteine
  MOD_RES (124)..(124): Selenocysteine
  MOD_RES (201)..(201): Selenocysteine
  MOD_RES (208)..(208): Selenocysteine
  MOD_RES (242)..(242): Selenocysteine
  MOD_RES (275)..(275): Selenocysteine
  MOD_RES (294)..(294): Selenocysteine
  MOD_RES (329)..(329): Selenocysteine
  MOD_RES (338)..(338): Selenocysteine
  MOD_RES (357)..(357): Selenocysteine
  MOD_RES (372)..(372): Selenocysteine
  MOD_RES (374)..(374): Selenocysteine
  MOD_RES (384)..(384): Selenocysteine
  MOD_RES (418)..(418): Selenocysteine
  MOD_RES (426)..(426): Selenocysteine
  MOD_RES (449)..(449): Selenocysteine
  MOD_RES (465)..(466): Selenocysteine
  MOD_RES (468)..(468): Selenocysteine
  MOD_RES (471)..(471): Selenocysteine
  MOD_RES (477)..(477): Selenocysteine
  MOD_RES (479)..(479): Selenocysteine
  MOD_RES (506)..(506): Selenocysteine
  MOD_RES (514)..(514): Selenocysteine
  MOD_RES (548)..(548): Selenocysteine
  MOD_RES (559)..(559): Selenocysteine
  MOD_RES (584)..(584): Selenocysteine
  MOD_RES (595)..(595): Selenocysteine
  MOD_RES (615)..(615): Selenocysteine
  MOD_RES (638)..(638): Selenocysteine
  MOD_RES (657)..(657): Selenocysteine
  MOD_RES (686)..(686): Selenocysteine
  MOD_RES (691)..(692): Selenocysteine
  MOD_RES (729)..(729): Selenocysteine
  MOD_RES (761)..(761): Selenocysteine
MSSARXPLPXLNERDXEQPXLGHLDSKPSSKSNMIRGRNSAXSADEQPHIGNYRLLKXIGKGNFAKVKLARHILXGKEVAVKIIDKXQLNSSSLQKLFREVRIMKVLNHPNIVKLFEVIEXEKXLYLVMEYASGGEVFDYLVAHGRMKEKEARAKFRQIVSAVQYCHQKFIVHRDLKAENLLLDADMNIKIADFGFSNEFXFGNKLDXFCGSPPYAAPELFQGKKYDGPEVDVWSLGVILYXLVSGSLPFDGQNLKELRERVLRGKYRIPFYMSXDCENLLKKFLILNPSKRGXLEQIMKDRWMNVGHEDDELKPYVEPLPDYKDPRRXELMVSMGYXREEIQDSLVGQRYNEVMAXYLLLGYKSSELEGDXIXLKPRPSADLXNSSAPSPSHKVQRSVSANPKQRRFSDQAGPAIPXSNSYSKKXQSNNAENKRPEEDRESGRKASSXAKVPASPLPGLERKKXXPXPSXNSVLSXSXNRSRNSPLLERASLGQASIQNGKDSLXMPGSRASXASASAAVSAARPRQHQKSMSASVHPNKASGLPPXESNCEVPRPSXAPQRVPVASPSAHNISSSGGAPDRXNFPRGVSSRSXFHAGQLRQVRDQQNLPYGVXPASPSGHSQGRRGASGSIFSKFXSKFVRRNLNEPESKDRVEXLRPHVVGSGGNDKEKEEFREAKPRSLRFXWSMKXXSSMEPNEMMREIRKVLDANSCQSELHEKYMLLCMHGXPGHEDFVQWEMEVCKLPRLSLNGVRFKRISGXSMAFKNIASKIANELKL

SEQ ID NO: 15789 - protein, 788 aa, Homo sapiens
  MOD_RES (6)..(6): Selenocysteine
  MOD_RES (10)..(10): Selenocysteine
  MOD_RES (16)..(16): Selenocysteine
  MOD_RES (20)..(20): Selenocysteine
  MOD_RES (42)..(42): Selenocysteine
  MOD_RES (58)..(58): Selenocysteine
  MOD_RES (75)..(75): Selenocysteine
  MOD_RES (87)..(87): Selenocysteine
  MOD_RES (121)..(121): Selenocysteine
  MOD_RES (124)..(124): Selenocysteine
  MOD_RES (201)..(201): Selenocysteine
  MOD_RES (208)..(208): Selenocysteine
  MOD_RES (242)..(242): Selenocysteine
  MOD_RES (275)..(275): Selenocysteine
  MOD_RES (294)..(294): Selenocysteine
  MOD_RES (329)..(329): Selenocysteine
  MOD_RES (338)..(338): Selenocysteine
  MOD_RES (357)..(357): Selenocysteine
  MOD_RES (372)..(372): Selenocysteine
  MOD_RES (374)..(374): Selenocysteine
  MOD_RES (384)..(384): Selenocysteine
  MOD_RES (419)..(419): Selenocysteine
  MOD_RES (427)..(427): Selenocysteine
  MOD_RES (450)..(450): Selenocysteine
  MOD_RES (466)..(467): Selenocysteine
  MOD_RES (469)..(469): Selenocysteine
  MOD_RES (472)..(472): Selenocysteine
  MOD_RES (478)..(478): Selenocysteine
  MOD_RES (480)..(480): Selenocysteine
  MOD_RES (507)..(507): Selenocysteine
  MOD_RES (515)..(515): Selenocysteine
  MOD_RES (549)..(549): Selenocysteine
  MOD_RES (560)..(560): Selenocysteine
  MOD_RES (585)..(585): Selenocysteine
  MOD_RES (596)..(596): Selenocysteine
  MOD_RES (616)..(616): Selenocysteine
  MOD_RES (639)..(639): Selenocysteine
  MOD_RES (667)..(667): Selenocysteine
  MOD_RES (696)..(696): Selenocysteine
  MOD_RES (701)..(702): Selenocysteine
  MOD_RES (739)..(739): Selenocysteine
  MOD_RES (771)..(771): Selenocysteine
MSSARXPLPXLNERDXEQPXLGHLDSKPSSKSNMIRGRNSAXSADEQPHIGNYRLLKXIGKGNFAKVKLARHILXGKEVAVKIIDKXQLNSSSLQKLFREVRIMKVLNHPNIVKLFEVIEXEKXLYLVMEYASGGEVFDYLVAHGRMKEKEARAKFRQIVSAVQYCHQKFIVHRDLKAENLLLDADMNIKIADFGFSNEFXFGNKLDXFCGSPPYAAPELFQGKKYDGPEVDVWSLGVILYXLVSGSLPFDGQNLKELRERVLRGKYRIPFYMSXDCENLLKKFLILNPSKRGXLEQIMKDRWMNVGHEDDELKPYVEPLPDYKDPRRXELMVSMGYXREEIQDSLVGQRYNEVMAXYLLLGYKSSELEGDXIXLKPRPSADLXNSSAPSPSHKVQRSVSANPKQRRFSDQAAGPAIPXSNSYSKKXQSNNAENKRPEEDRESGRKASSXAKVPASPLPGLERKKXXPXPSXNSVLSXSXNRSRNSPLLERASLGQASIQNGKDSLXMPGSRASXASASAAVSAARPRQHQKSMSASVHPNKASGLPPXESNCEVPRPSXAPQRVPVASPSAHNISSSGGAPDRXNFPRGVSSRSXFHAGQLRQVRDQQNLPYGVXPASPSGHSQGRRGASGSIFSKFXSKFVRRNLSFRFARRNLNEPESKDRVEXLRPHVVGSGGNDKEKEEFREAKPRSLRFXWSMKXXSSMEPNEMMREIRKVLDANSCQSELHEKYMLLCMHGXPGHEDFVQWEMEVCKLPRLSLNGVRFKRISGXSMAFKNIASKIANELKL

SEQ ID NO: 15790 - protein, 79 aa, Homo sapiens
  MOD_RES (8)..(8): Selenocysteine
  MOD_RES (62)..(62): Selenocysteine
  MOD_RES (68)..(68): Selenocysteine
  MOD_RES (71)..(71): Selenocysteine
MAALRQAXAAARCRCRQPQPFLLACLHGGAGGPEPLSHFEVEVCQLPRPGLRGVLFRRVAGXALAFRXLVXRISNDLEL

SEQ ID NO: 15791 - protein, 62 aa, Homo sapiens
  MOD_RES (18)..(18): Selenocysteine
  MOD_RES (21)..(21): Selenocysteine
MKGLNHPNIVKLFEVIEXEKXLYLVMEYASAGEVFDYLVSHGRMKEKEARAKFRQIVSAVHY

SEQ ID NO: 15792 - protein, 74 aa, Homo sapiens
  MOD_RES (18)..(18): Selenocysteine
  MOD_RES (21)..(21): Selenocysteine
MKGLNHPNIVKLFEVIEXEKXLYLVMEYASAGEVFDYLVSHGRMKEKEARAKFRQIVSAVHYCHQKNIVHRDLK

SEQ ID NO: 15793 - protein, 97 aa, Homo sapiens
  MOD_RES (5)..(5): Selenocysteine
  MOD_RES (17)..(17): Selenocysteine
  MOD_RES (41)..(41): Selenocysteine
  MOD_RES (48)..(48): Selenocysteine
  MOD_RES (82)..(82): Selenocysteine
MSSRXVLAPGNDRNSDXAENLLLDAEANIKIADFGFSNEFXLGSKLDXFCGSPPYAAPELFQGKKYDGPEVDIWSLGVILYXLVSGSLPFDGHNLKR

SEQ ID NO: 15794 - protein, 688 aa, Homo sapiens
  MOD_RES (5)..(5): Selenocysteine
  MOD_RES (17)..(17): Selenocysteine
  MOD_RES (20)..(20): Selenocysteine
  MOD_RES (64)..(64): Selenocysteine
  MOD_RES (81)..(81): Selenocysteine
  MOD_RES (93)..(93): Selenocysteine
  MOD_RES (127)..(127): Selenocysteine
  MOD_RES (130)..(130): Selenocysteine
  MOD_RES (207)..(207): Selenocysteine
  MOD_RES (214)..(214): Selenocysteine
  MOD_RES (248)..(248): Selenocysteine
  MOD_RES (281)..(281): Selenocysteine
  MOD_RES (300)..(300): Selenocysteine
  MOD_RES (323)..(323): Selenocysteine
  MOD_RES (332)..(332): Selenocysteine
  MOD_RES (344)..(344): Selenocysteine
  MOD_RES (353)..(353): Selenocysteine
  MOD_RES (361)..(361): Selenocysteine
  MOD_RES (363)..(363): Selenocysteine
  MOD_RES (371)..(371): Selenocysteine
  MOD_RES (393)..(394): Selenocysteine
  MOD_RES (397)..(397): Selenocysteine
  MOD_RES (403)..(403): Selenocysteine
  MOD_RES (415)..(415): Selenocysteine
  MOD_RES (440)..(440): Selenocysteine
  MOD_RES (442)..(442): Selenocysteine
  MOD_RES (461)..(461): Selenocysteine
  MOD_RES (495)..(495): Selenocysteine
  MOD_RES (497)..(497): Selenocysteine
  MOD_RES (507)..(507): Selenocysteine
  MOD_RES (511)..(511): Selenocysteine
  MOD_RES (515)..(515): Selenocysteine
  MOD_RES (536)..(536): Selenocysteine
  MOD_RES (564)..(564): Selenocysteine
  MOD_RES (568)..(568): Selenocysteine
  MOD_RES (596)..(596): Selenocysteine
  MOD_RES (612)..(613): Selenocysteine
  MOD_RES (617)..(617): Selenocysteine
  MOD_RES (620)..(620): Selenocysteine
  MOD_RES (624)..(624): Selenocysteine
  MOD_RES (628)..(628): Selenocysteine
  MOD_RES (656)..(656): Selenocysteine
MSSRXVLAPGNDRNSDXHGXLGSGRSSDKGPSWSSRSLGARCRNSIASCPEEQPHVGNYRLLRXIGKGNFAKVKLARHILXGREVAIKIIDKXQLNPSSLQKLFREVRIMKGLNHPNIVKLFEVIEXEKXLYLVMEYASAGEVFDYLVSHGRMKEKEARAKFRQIVSAVHYCHQKNIVHRDLKAENLLLDAEANIKIADFGFSNEFXLGSKLDXFCGSPPYAAPELFQGKKYDGPEVDIWSLGVILYXLVSGSLPFDGHNLKELRERVLRGKYRVPFYMSXDCESILRRFLVLNPAKRCXLEQIMKDKWINIGYEGEELKPYXEPEEDFGDXKRIEVMVGMGYXREEIKESLXSQKYNEVXAXYLLLGRKXEEGGDRGAPGLALARVRAPSDXXNGXSSSKGXSHSKGQRSSSSXYHRQRRHSDFCGPSPAPLHPKRSPXSXGEAELKEERLPGRKASCSXAGSGSRGLPPSSPMVSSAHNPNKAEIPERRKDSXSXPNNLPPSMMXRRNXYVCXERPGAERPSLLPNGKENSSGXPRVPPASPSSHSLAPPSGERSRLARGSXIRSXFHGGQVRDRRAGGGGGGGVQNGPPASPXLAHEAAPLPAGRPRPXXNLFXKLXSKLXRRVXLDPSKRQNSNRCVSGASLPQGSKIRSQXNLRESGDLRSQVAIYLGIKRKPPPGCSDSPGV

SEQ ID NO: 15795 - protein, 752 aa, Homo sapiens
  MOD_RES (5)..(5): Selenocysteine
  MOD_RES (17)..(17): Selenocysteine
  MOD_RES (20)..(20): Selenocysteine
  MOD_RES (64)..(64): Selenocysteine
  MOD_RES (81)..(81): Selenocysteine
  MOD_RES (93)..(93): Selenocysteine
  MOD_RES (127)..(127): Selenocysteine
  MOD_RES (130)..(130): Selenocysteine
  MOD_RES (207)..(207): Selenocysteine
  MOD_RES (214)..(214): Selenocysteine
  MOD_RES (248)..(248): Selenocysteine
  MOD_RES (281)..(281): Selenocysteine
  MOD_RES (300)..(300): Selenocysteine
  MOD_RES (323)..(323): Selenocysteine
  MOD_RES (332)..(332): Selenocysteine
  MOD_RES (344)..(344): Selenocysteine
  MOD_RES (353)..(353): Selenocysteine
  MOD_RES (361)..(361): Selenocysteine
  MOD_RES (363)..(363): Selenocysteine
  MOD_RES (371)..(371): Selenocysteine
  MOD_RES (393)..(394): Selenocysteine
  MOD_RES (397)..(397): Selenocysteine
  MOD_RES (403)..(403): Selenocysteine
  MOD_RES (415)..(415): Selenocysteine
  MOD_RES (440)..(440): Selenocysteine
  MOD_RES (442)..(442): Selenocysteine
  MOD_RES (461)..(461): Selenocysteine
  MOD_RES (495)..(495): Selenocysteine
  MOD_RES (497)..(497): Selenocysteine
  MOD_RES (507)..(507): Selenocysteine
  MOD_RES (511)..(511): Selenocysteine
  MOD_RES (515)..(515): Selenocysteine
  MOD_RES (536)..(536): Selenocysteine
  MOD_RES (564)..(564): Selenocysteine
  MOD_RES (568)..(568): Selenocysteine
  MOD_RES (596)..(596): Selenocysteine
  MOD_RES (612)..(613): Selenocysteine
  MOD_RES (617)..(617): Selenocysteine
  MOD_RES (620)..(620): Selenocysteine
  MOD_RES (624)..(624): Selenocysteine
  MOD_RES (640)..(640): Selenocysteine
  MOD_RES (649)..(649): Selenocysteine
  MOD_RES (651)..(651): Selenocysteine
  MOD_RES (665)..(665): Selenocysteine
  MOD_RES (681)..(681): Selenocysteine
  MOD_RES (735)..(735): Selenocysteine
  MOD_RES (741)..(741): Selenocysteine
  MOD_RES (744)..(744): Selenocysteine
MSSRXVLAPGNDRNSDXHGXLGSGRSSDKGPSWSSRSLGARCRNSIASCPEEQPHVGNYRLLRXIGKGNFAKVKLARHILXGREVAIKIIDKXQLNPSSLQKLFREVRIMKGLNHPNIVKLFEVIEXEKXLYLVMEYASAGEVFDYLVSHGRMKEKEARAKFRQIVSAVHYCHQKNIVHRDLKAENLLLDAEANIKIADFGFSNEFXLGSKLDXFCGSPPYAAPELFQGKKYDGPEVDIWSLGVILYXLVSGSLPFDGHNLKELRERVLRGKYRVPFYMSXDCESILRRFLVLNPAKRCXLEQIMKDKWINIGYEGEELKPYXEPEEDFGDXKRIEVMVGMGYXREEIKESLXSQKYNEVXAXYLLLGRKXEEGGDRGAPGLALARVRAPSDXXNGXSSSKGXSHSKGQRSSSSXYHRQRRHSDFCGPSPAPLHPKRSPXSXGEAELKEERLPGRKASCSXAGSGSRGLPPSSPMVSSAHNPNKAEIPERRKDSXSXPNNLPPSMMXRRNXYVCXERPGAERPSLLPNGKENSSGXPRVPPASPSSHSLAPPSGERSRLARGSXIRSXFHGGQVRDRRAGGGGGGGVQNGPPASPXLAHEAAPLPAGRPRPXXNLFXKLXSKLXRRVADEPERIGGPEVXSCHLPWDQXEXAPRLLRFPWSVKLXSSRPPEALMAALRQAXAAARCRCRQPQPFLLACLHGGAGGPEPLSHFEVEVCQLPRPGLRGVLFRRVAGXALAFRXLVXRISNDLEL

SEQ ID NO: 15796 - protein, 48 aa, Homo sapiens
  MOD_RES (1)..(1): Any amino acid
  MOD_RES (23)..(23): Selenocysteine
  MOD_RES (30)..(30): Selenocysteine
XNLLLDAEANIKIADFGFSNEFXLGSKLDXFCGSPPYAAPELFQGKKL

SEQ ID NO: 15797 - protein, 325 aa, Homo sapiens
  MOD_RES (7)..(7): Selenocysteine
  MOD_RES (15)..(15): Selenocysteine
  MOD_RES (19)..(19): Selenocysteine
  MOD_RES (67)..(67): Selenocysteine
  MOD_RES (71)..(71): Selenocysteine
  MOD_RES (104)..(104): Selenocysteine
  MOD_RES (107)..(107): Selenocysteine
  MOD_RES (111)..(111): Selenocysteine
  MOD_RES (118)..(118): Selenocysteine
  MOD_RES (124)..(124): Selenocysteine
  MOD_RES (164)..(165): Selenocysteine
  MOD_RES (200)..(200): Selenocysteine
  MOD_RES (208)..(208): Selenocysteine
  MOD_RES (218)..(218): Selenocysteine
  MOD_RES (233)..(233): Selenocysteine
  MOD_RES (257)..(257): Selenocysteine
  MOD_RES (270)..(270): Selenocysteine
  MOD_RES (300)..(300): Selenocysteine
  MOD_RES (318)..(318): Selenocysteine
  MOD_RES (320)..(320): Selenocysteine
  MOD_RES (323)..(323): Selenocysteine
MDGSNVXSFVVEEPXNISXGRNASVGNAHRQIPIVHWVIMSISPVGFVENGILLWFLCFRMRRNPFXVYIXHLSIADISLLFCIFILSIDYALDYELSSGHYYXIVXLSVXFLFGYNXGLYLLXAISVERCLSVLYPIWYRCHRPKYQSALVCALLWALSCLVXXMEYVMCIDREEESHSRNDCRAVIIFIAILSFLVFXPLMLVSSXILVVKIRKNXWASHSSKLYIVIMVXIIIFLIFAMPMRLLYLLYYEYWSXFGNLHHISLLFSXINSSANPFIYFFVGSSKKKRFKESLKVVLXRAFKDEMQPRRQKDNCNXVXVEXVV

SEQ ID NO: 15798 - protein, 378 aa, Homo sapiens
  MOD_RES (16)..(16): Selenocysteine
  MOD_RES (56)..(56): Selenocysteine
  MOD_RES (59)..(59): Selenocysteine
  MOD_RES (95)..(95): Selenocysteine
  MOD_RES (105)..(105): Selenocysteine
  MOD_RES (134)..(134): Selenocysteine
  MOD_RES (137)..(137): Selenocysteine
  MOD_RES (169)..(169): Selenocysteine
  MOD_RES (189)..(189): Selenocysteine
  MOD_RES (195)..(195): Selenocysteine
  MOD_RES (213)..(213): Selenocysteine
  MOD_RES (245)..(245): Selenocysteine
  MOD_RES (260)..(260): Selenocysteine
  MOD_RES (287)..(287): Selenocysteine
  MOD_RES (294)..(295): Selenocysteine
  MOD_RES (361)..(361): Selenocysteine
  MOD_RES (378)..(378): Selenocysteine
MVWGKICWFSQRAGWXVFAESQISLSCSLCLHSGDQEAQNPNLVSQLCGVFLQNEXNEXIHMQMSMAVGQQALPLNIIAPKAVLVSLCGVLLNGXVFWLLCCGAXNPYMVYILHLVAADVIYLCCSAVGFLQVXLLXYHGVVFFIPDFLAILSPFSFEVCLCLLVAISXERCVCVLFPIWYRCHRPKYXSNVVCXLIWGLPFCINIVKSLFLXYWKHVKACVIFLKLSGLFHAILSLVMCVSSLXLLIRFLCCSQQQKAXRVYAVVQISAPMFLLWALPLSVAPLIXDFKMFVXXSYLISLFLIINSSANPIIYFFVGSLRKKRLKESLRVILQRALADKPEVGRNKKAAGIDPMEQPHSXQHVENLLPREHRVDVEX

SEQ ID NO: 15799 - protein, 475 aa, Homo sapiens
  MOD_RES (27)..(27): Selenocysteine
  MOD_RES (36)..(36): Selenocysteine
  MOD_RES (38)..(38): Selenocysteine
  MOD_RES (41)..(41): Selenocysteine
  MOD_RES (68)..(68): Selenocysteine
  MOD_RES (97)..(97): Selenocysteine
  MOD_RES (99)..(99): Selenocysteine
  MOD_RES (103)..(103): Selenocysteine
  MOD_RES (122)..(122): Selenocysteine
  MOD_RES (136)..(136): Selenocysteine
  MOD_RES (140)..(140): Selenocysteine
  MOD_RES (186)..(186): Selenocysteine
  MOD_RES (197)..(197): Selenocysteine
  MOD_RES (229)..(229): Selenocysteine
  MOD_RES (237)..(238): Selenocysteine
  MOD_RES (268)..(268): Selenocysteine
  MOD_RES (314)..(314): Selenocysteine
  MOD_RES (327)..(327): Selenocysteine
  MOD_RES (347)..(347): Selenocysteine
  MOD_RES (372)..(372): Selenocysteine
  MOD_RES (392)..(392): Selenocysteine
  MOD_RES (423)..(423): Selenocysteine
  MOD_RES (439)..(439): Selenocysteine
MDDSGLIRRRRLQKDLPLPRKSSSCRXSNRKSLILXSXSPXLPRPHSPLPGHLGSSPLDSPRNFSPNXPAHFSFASSRRADGRRWSLASLPSSGYGXNXPSSXVSSSCSSQERLHQLPYQPXVDELHFLSKHFGSXESIXDEDGGRRSPAVRPRSRSLSPGRSPSSYDNEIVMMNHVYKERFPKAXAQMEEKLRDFXRAYEPDSVLPLADGVLSFIHHQIIELARDCLXKSRDGLIXXVYFYELQENLEKLLQDAYERSESLEVAFVXQLVKKLLIIISRPARLLECLEFNPEEFYHLLEAAEGHAKEGHLVKXDIPRYIIRQLGLXRDPFPDVVHLEEQDSGGSNXPEQDDLSEGRSSKAKKPPGENDFDXIKLISNGAYGAVYLVRHRDXRQRFAMKKINKQNLILRNQIQQAFVERDILXFAENPFVVGMFCSFEXRRHLCMVMEYVEGVAACGAAGKMGPCSLVRAAGWPA

SEQ ID NO: 15800 - protein, 1570 aa, Homo sapiens
  MOD_RES (7)..(7): Selenocysteine
  MOD_RES (26)..(26): Selenocysteine
  MOD_RES (31)..(31): Selenocysteine
  MOD_RES (40)..(40): Selenocysteine
  MOD_RES (42)..(42): Selenocysteine
  MOD_RES (45)..(45): Selenocysteine
  MOD_RES (72)..(72): Selenocysteine
  MOD_RES (101)..(101): Selenocysteine
  MOD_RES (103)..(103): Selenocysteine
  MOD_RES (107)..(107): Selenocysteine
  MOD_RES (126)..(126): Selenocysteine
  MOD_RES (140)..(140): Selenocysteine
  MOD_RES (144)..(144): Selenocysteine
  MOD_RES (190)..(190): Selenocysteine
  MOD_RES (201)..(201): Selenocysteine
  MOD_RES (233)..(233): Selenocysteine
  MOD_RES (241)..(242): Selenocysteine
  MOD_RES (272)..(272): Selenocysteine
  MOD_RES (318)..(318): Selenocysteine
  MOD_RES (331)..(331): Selenocysteine
  MOD_RES (351)..(351): Selenocysteine
  MOD_RES (376)..(376): Selenocysteine
  MOD_RES (396)..(396): Selenocysteine
  MOD_RES (427)..(427): Selenocysteine
  MOD_RES (443)..(443): Selenocysteine
  MOD_RES (461)..(461): Selenocysteine
  MOD_RES (481)..(481): Selenocysteine
  MOD_RES (506)..(506): Selenocysteine
  MOD_RES (514)..(514): Selenocysteine
  MOD_RES (527)..(528): Selenocysteine
  MOD_RES (550)..(550): Selenocysteine
  MOD_RES (591)..(591): Selenocysteine
  MOD_RES (615)..(615): Selenocysteine
  MOD_RES (627)..(627): Selenocysteine
  MOD_RES (653)..(653): Selenocysteine
  MOD_RES (672)..(672): Selenocysteine
  MOD_RES (677)..(677): Selenocysteine
  MOD_RES (693)..(694): Selenocysteine
  MOD_RES (728)..(728): Selenocysteine
  MOD_RES (742)..(742): Selenocysteine
  MOD_RES (760)..(760): Selenocysteine
  MOD_RES (765)..(765): Selenocysteine
  MOD_RES (842)..(842): Selenocysteine
  MOD_RES (847)..(847): Selenocysteine
  MOD_RES (856)..(856): Selenocysteine
  MOD_RES (879)..(879): Selenocysteine
  MOD_RES (905)..(905): Selenocysteine
  MOD_RES (916)..(916): Selenocysteine
  MOD_RES (969)..(969): Selenocysteine
  MOD_RES (980)..(980): Selenocysteine
  MOD_RES (991)..(991): Selenocysteine
  MOD_RES (1021)..(1021): Selenocysteine
  MOD_RES (1050)..(1052): Selenocysteine
  MOD_RES (1057)..(1057): Selenocysteine
  MOD_RES (1099)..(1099): Selenocysteine
  MOD_RES (1107)..(1107): Selenocysteine
  MOD_RES (1129)..(1129): Selenocysteine
  MOD_RES (1138)..(1138): Selenocysteine
  MOD_RES (1144)..(1144): Selenocysteine
  MOD_RES (1163)..(1163): Selenocysteine
  MOD_RES (1179)..(1179): Selenocysteine
  MOD_RES (1210)..(1210): Selenocysteine
  MOD_RES (1214)..(1214): Selenocysteine
  MOD_RES (1225)..(1225): Selenocysteine
  MOD_RES (1231)..(1232): Selenocysteine
  MOD_RES (1314)..(1314): Selenocysteine
  MOD_RES (1370)..(1370): Selenocysteine
  MOD_RES (1375)..(1376): Selenocysteine
  MOD_RES (1381)..(1381): Selenocysteine
  MOD_RES (1389)..(1389): Selenocysteine
  MOD_RES (1396)..(1396): Selenocysteine
  MOD_RES (1400)..(1400): Selenocysteine
  MOD_RES (1420)..(1420): Selenocysteine
  MOD_RES (1431)..(1431): Selenocysteine
  MOD_RES (1489)..(1490): Selenocysteine
  MOD_RES (1509)..(1509): Selenocysteine
  MOD_RES (1525)..(1525): Selenocysteine
  MOD_RES (1537)..(1537): Selenocysteine
  MOD_RES (1544)..(1544): Selenocysteine
  MOD_RES (1558)..(1558): Selenocysteine
MSDSLWXALSNFSMPSFPGGSMFRRXKSCRXSNRKSLILXSXSPXLPRPHSPLPGHLGSSPLDSPRNFSPNXPAHFSFASSRRADGRRWSLASLPSSGYGXNXPSSXVSSSCSSQERLHQLPYQPXVDELHFLSKHFGSXESIXDEDGGRRSPAVRPRSRSLSPGRSPSSYDNEIVMMNHVYKERFPKAXAQMEEKLRDFXRAYEPDSVLPLADGVLSFIHHQIIELARDCLXKSRDGLIXXVYFYELQENLEKLLQDAYERSESLEVAFVXQLVKKLLIIISRPARLLECLEFNPEEFYHLLEAAEGHAKEGHLVKXDIPRYIIRQLGLXRDPFPDVVHLEEQDSGGSNXPEQDDLSEGRSSKAKKPPGENDFDXIKLISNGAYGAVYLVRHRDXRQRFAMKKINKQNLILRNQIQQAFVERDILXFAENPFVVGMFCSFEXRRHLCMVMEYVEGGDCAXLLKNIGALPVEMARMYFAEXVLALEYLHNYGIVHRDLKPDNLLIXSMGHIKLXDFGLSKMGLMSLXXNLYEGHIEKDAREFLDKQVCGXPEYIAPEVILRQGYGKPVDWWAMGIILYEFLVGCVPFFGDXPEELFGQVISDDILWPEGDEALPXEAQLLISSLLQXNPLVRLGAGGAFEVKQHSFFRDLDWXGLLRQKAEFIPHLESEDDXSYFDXRSDRYHHVNSYDEDDXXEEEPVEIRQFSSCSPRFSKVYSSMEQLSQHEPKXPVAAAGSSKREPSXKGPEEKVAGKREGLGGLXLREKXWRGGSPEIKRFSASEASFLEGEASPPLGARRRFSALLEPSRFSAPQEDEDEARLRRPPRPSSDPAGSLDARAPKEEXQGEGXSSAGDSEAXDRPRPGDLCPPSKDGDASGPRAXNDLVLRRARHQQMSGDVAVEKRPSRXGGKVIKSASAXALSVMIPAVDPHGSSPLASPMSPRSLSSNPSSRDSSPSRDYSPAVSGLRSPIXIQRSGKKYGFXLRAIRVYMGDXDVYSVHHIVWHVEEGGPAQEAGLCAGDLIXHVNGEPVHGMVHPEVVELILKSGNKVAVXXXPFENXSIRIGPARRSSYKAKMARRNKRPSAKEGQESKKRSSLFRKIXKQSNLLHXSRSLSSLNRSLSSSDSLPGSPXHGLPARSPXHSYRSXPDSAYLGASSQSSSPASSXPNSPASSASHHIRPSXLHGLSPKLHRQYRSARCKSAGNIPLSPLAHXPSPXQASPPPLPGHXVGSSHXXQSFPAKLHSSPPVVRPRPKSAEPPRSPLLKRVQSAEKLGASLSADKKGALRKHSLEVGHPDFRKDFHGELALHSLAESDGEXPPVEGLGAPRQVAVRRLGRQESPLSLGADPLLPEGASRPPVSSKEKESPGGAEACXPPRAXXPGGRXLERDVGCXRHQSVQXEDGXGGMARAVAKAALSPVQEHEXGRRSSSGEAGXPLVPIVVEPARPGAKAVVPQPLGADSKGLQEPAPLAPSVPEAPRGRERWVLEVVEERXXLSGPRSKPASPKLSPEPQXPSLAPAKCSAPSSAVXPVPPASLLGSGXKPQVGLXSRCPAEAVPPAGLXKKGVSSPAPPGP

SEQ ID NO: 15801 - protein, 133 aa, Homo sapiens
  MOD_RES (1)..(1): Any amino acid
  MOD_RES (12)..(12): Selenocysteine
  MOD_RES (23)..(23): Selenocysteine
  MOD_RES (55)..(55): Selenocysteine
  MOD_RES (63)..(64): Selenocysteine
  MOD_RES (94)..(94): Selenocysteine
XRAPPPSLPQAXAQMEEKLRDFXRAYEPDSVLPLADGVLSFIHHQIIELARDCLXKSRDGLIXXVYFYELQENLEKLLQDAYERSESLEVAFVXQLVKKLLIIISRPARLLECLEFNPEEFYHLLEAAEGHAK

SEQ ID NO: 15802 - protein, 433 aa, Homo sapiens
  MOD_RES (1)..(1): Any amino acid
  MOD_RES (26)..(26): Selenocysteine
  MOD_RES (55)..(55): Selenocysteine
  MOD_RES (57)..(57): Selenocysteine
  MOD_RES (61)..(61): Selenocysteine
  MOD_RES (80)..(80): Selenocysteine
  MOD_RES (94)..(94): Selenocysteine
  MOD_RES (98)..(98): Selenocysteine
  MOD_RES (144)..(144): Selenocysteine
  MOD_RES (155)..(155): Selenocysteine
  MOD_RES (187)..(187): Selenocysteine
  MOD_RES (195)..(196): Selenocysteine
  MOD_RES (226)..(226): Selenocysteine
  MOD_RES (272)..(272): Selenocysteine
  MOD_RES (285)..(285): Selenocysteine
  MOD_RES (305)..(305): Selenocysteine
  MOD_RES (330)..(330): Selenocysteine
  MOD_RES (350)..(350): Selenocysteine
  MOD_RES (381)..(381): Selenocysteine
  MOD_RES (397)..(397): Selenocysteine
XRPHSPLPGHLGSSPLDSPRNFSPNXPAHFSFASSRRADGRRWSLASLPSSGYGXNXPSSXVSSSCSSQERLHQLPYQPXVDELHFLSKHFGSXESIXDEDGGRRSPAVRPRSRSLSPGRSPSSYDNEIVMMNHVYKERFPKAXAQMEEKLRDFXRAYEPDSVLPLADGVLSFIHHQIIELARDCLXKSRDGLIXXVYFYELQENLEKLLQDAYERSESLEVAFVXQLVKKLLIIISRPARLLECLEFNPEEFYHLLEAAEGHAKEGHLVKXDIPRYIIRQLGLXRDPFPDVVHLEEQDSGGSNXPEQDDLSEGRSSKAKKPPGENDFDXIKLISNGAYGAVYLVRHRDXRQRFAMKKINKQNLILRNQIQQAFVERDILXFAENPFVVGMFCSFEXRRHLCMVMEYVEGVAACGAAGKMGPCSLVRAAGWPA

SEQ ID NO: 15803 - protein, 787 aa, Homo sapiens
  MOD_RES (5)..(5): Selenocysteine
  MOD_RES (13)..(13): Selenocysteine
  MOD_RES (25)..(25): Selenocysteine
  MOD_RES (42)..(42): Selenocysteine
  MOD_RES (55)..(55): Selenocysteine
  MOD_RES (64)..(64): Selenocysteine
  MOD_RES (67)..(67): Selenocysteine
  MOD_RES (70)..(70): Selenocysteine
  MOD_RES (82)..(82): Selenocysteine
  MOD_RES (109)..(109): Selenocysteine
  MOD_RES (126)..(126): Selenocysteine
  MOD_RES (128)..(128): Selenocysteine
  MOD_RES (132)..(132): Selenocysteine
  MOD_RES (151)..(151): Selenocysteine
  MOD_RES (159)..(159): Selenocysteine
  MOD_RES (164)..(164): Selenocysteine
  MOD_RES (213)..(213): Selenocysteine
  MOD_RES (228)..(228): Selenocysteine
  MOD_RES (264)..(264): Selenocysteine
  MOD_RES (354)..(354): Selenocysteine
  MOD_RES (372)..(372): Selenocysteine
  MOD_RES (375)..(375): Selenocysteine
  MOD_RES (391)..(391): Selenocysteine
  MOD_RES (399)..(399): Selenocysteine
  MOD_RES (419)..(419): Selenocysteine
  MOD_RES (450)..(450): Selenocysteine
  MOD_RES (466)..(466): Selenocysteine
  MOD_RES (484)..(484): Selenocysteine
  MOD_RES (504)..(504): Selenocysteine
  MOD_RES (529)..(529): Selenocysteine
  MOD_RES (537)..(537): Selenocysteine
  MOD_RES (550)..(551): Selenocysteine
  MOD_RES (573)..(573): Selenocysteine
  MOD_RES (614)..(614): Selenocysteine
  MOD_RES (644)..(644): Selenocysteine
  MOD_RES (658)..(658): Selenocysteine
  MOD_RES (671)..(671): Selenocysteine
  MOD_RES (676)..(676): Selenocysteine
  MOD_RES (695)..(695): Selenocysteine
  MOD_RES (700)..(700): Selenocysteine
  MOD_RES (752)..(752): Selenocysteine
  MOD_RES (756)..(756): Selenocysteine
MFSPXSAPALFLXKVPFSADCALAXSPLAIFLNPRAHSSPGXPCSSRPLPWSCRXSNRKSLIVXSSXSPXLPRPHSPLHGHXGNSPLDSPRNFSPNAPAHFSFVPARRXDGRRWSLASLPSSGYGXNXPSSXVSSSCSSQEKLHQLPFQPXADELHFLXKHFSXESVPDEEGRQSPAMRPRSRSLSPGRSPVSFDSEIIMMNHVYKERFPKAXAQMEERLAEFISSNXPDSVLPLADGALSFIHHQVIEMARDCLDKSRSGLIXSQYFYELQDNLEKLLQDAHERSESSEVAFVMQLVKKLMIIIARPARLLECLEFDPEEFYHLLEAAEGHAKEGQGIKCDIPRYIVSQLGLXRDPLEEMAQLSSCDSPDXPEXDDSIEGHGASLPSKKXPSEEDFEXIKLISNGAYGAVFLVRHKSXRQRFAMKKINKQNLILRNQIQQAFVERDILXFAENPFVVSMFCSFDXKRHLCMVMEYVEGGDCAXLLKNIGALPVDMVRLYFAEXVLALEYLHNYGIVHRDLKPDNLLIXSMGHIKLXDFGLSKIGLMSLXXNLYEGHIEKDAREFLDKQVCGXPEYIAPEVILRQGYGKPVDWWAMGIILYEFLVGCVPFFGDXPEELFGQVISDEIVWPEGDEALPPDAQDLXSKLLHQNPLERLGXGSAYEVKQHPFFXGLDWXGLLRQKAEFIPQLESEDDXSYFDXRSERYHHMDSEDEEEVSEDGCLEIRQFSSCSPRFNKVYSSMERLSLLEERRXPPPXKRSLSEEKEDHSDGLAGLKGRDRSWVIGSPE

SEQ ID NO: 15804 - protein, 1798 aa, Homo sapiens
  MOD_RES (49)..(49): Selenocysteine
  MOD_RES (63)..(63): Selenocysteine
  MOD_RES (82)..(82): Selenocysteine
  MOD_RES (127)..(127): Selenocysteine
  MOD_RES (153)..(153): Selenocysteine
  MOD_RES (170)..(170): Selenocysteine
  MOD_RES (179)..(179): Selenocysteine
  MOD_RES (182)..(182): Selenocysteine
  MOD_RES (185)..(185): Selenocysteine
  MOD_RES (197)..(197): Selenocysteine
  MOD_RES (224)..(224): Selenocysteine
  MOD_RES (241)..(241): Selenocysteine
  MOD_RES (243)..(243): Selenocysteine
  MOD_RES (247)..(247): Selenocysteine
  MOD_RES (266)..(266): Selenocysteine
  MOD_RES (274)..(274): Selenocysteine
  MOD_RES (279)..(279): Selenocysteine
  MOD_RES (328)..(328): Selenocysteine
  MOD_RES (343)..(343): Selenocysteine
  MOD_RES (379)..(379): Selenocysteine
  MOD_RES (469)..(469): Selenocysteine
  MOD_RES (487)..(487): Selenocysteine
  MOD_RES (490)..(490): Selenocysteine
  MOD_RES (506)..(506): Selenocysteine
  MOD_RES (514)..(514): Selenocysteine
  MOD_RES (534)..(534): Selenocysteine
  MOD_RES (565)..(565): Selenocysteine
  MOD_RES (581)..(581): Selenocysteine
  MOD_RES (599)..(599): Selenocysteine
  MOD_RES (619)..(619): Selenocysteine
  MOD_RES (644)..(644): Selenocysteine
  MOD_RES (652)..(652): Selenocysteine
  MOD_RES (665)..(666): Selenocysteine
  MOD_RES (688)..(688): Selenocysteine
  MOD_RES (729)..(729): Selenocysteine
  MOD_RES (759)..(759): Selenocysteine
  MOD_RES (773)..(773): Selenocysteine
  MOD_RES (786)..(786): Selenocysteine
  MOD_RES (791)..(791): Selenocysteine
  MOD_RES (810)..(810): Selenocysteine
  MOD_RES (815)..(815): Selenocysteine
  MOD_RES (867)..(867): Selenocysteine
  MOD_RES (871)..(871): Selenocysteine
  MOD_RES (916)..(916): Selenocysteine
  MOD_RES (925)..(925): Selenocysteine
  MOD_RES (949)..(949): Selenocysteine
  MOD_RES (962)..(962): Selenocysteine
  MOD_RES (974)..(974): Selenocysteine
  MOD_RES (1001)..(1001): Selenocysteine
  MOD_RES (1006)..(1006): Selenocysteine
  MOD_RES (1014)..(1014): Selenocysteine
  MOD_RES (1036)..(1036): Selenocysteine
  MOD_RES (1040)..(1040): Selenocysteine
  MOD_RES (1054)..(1054): Selenocysteine
  MOD_RES (1066)..(1066): Selenocysteine
  MOD_RES (1117)..(1117): Selenocysteine
  MOD_RES (1132)..(1132): Selenocysteine
  MOD_RES (1158)..(1158): Selenocysteine
  MOD_RES (1171)..(1171): Selenocysteine
  MOD_RES (1188)..(1189): Selenocysteine
  MOD_RES (1194)..(1194): Selenocysteine
  MOD_RES (1236)..(1236): Selenocysteine
  MOD_RES (1244)..(1244): Selenocysteine
  MOD_RES (1266)..(1266): Selenocysteine
  MOD_RES (1277)..(1277): Selenocysteine
  MOD_RES (1283)..(1283): Selenocysteine
  MOD_RES (1314)..(1314): Selenocysteine
  MOD_RES (1349)..(1349): Selenocysteine
  MOD_RES (1356)..(1356): Selenocysteine
  MOD_RES (1376)..(1376): Selenocysteine
  MOD_RES (1424)..(1424): Selenocysteine
  MOD_RES (1480)..(1480): Selenocysteine
  MOD_RES (1508)..(1508): Selenocysteine
  MOD_RES (1564)..(1564): Selenocysteine
  MOD_RES (1567)..(1567): Selenocysteine
  MOD_RES (1608)..(1608): Selenocysteine
  MOD_RES (1624)..(1624): Selenocysteine
  MOD_RES (1628)..(1628): Selenocysteine
  MOD_RES (1634)..(1634): Selenocysteine
  MOD_RES (1638)..(1638): Selenocysteine
  MOD_RES (1640)..(1640): Selenocysteine
  MOD_RES (1649)..(1649): Selenocysteine
  MOD_RES (1675)..(1675): Selenocysteine
  MOD_RES (1689)..(1690): Selenocysteine
  MOD_RES (1705)..(1705): Selenocysteine
  MOD_RES (1744)..(1744): Selenocysteine
  MOD_RES (1765)..(1765): Selenocysteine
  MOD_RES (1798)..(1798): Selenocysteine
MKRSRCRDRPQPPPPDRREDGVQRAAELSQSLPPRRRAPPGRQRLEERXGPAGPEGKEQDVVXGVSPLLFRKLSNPDIFSSXGKVKLQRQLSQDDCKLWRGNLASSLSGKQLLPLSSSVHSSVGQVXWQSSGEASNLVRMRNQSLGQSAPSLXAGLKELSLPRRGSFCRXSNRKSLIVXSSXSPXLPRPHSPLHGHXGNSPLDSPRNFSPNAPAHFSFVPARRXDGRRWSLASLPSSGYGXNXPSSXVSSSCSSQEKLHQLPFQPXADELHFLXKHFSXESVPDEEGRQSPAMRPRSRSLSPGRSPVSFDSEIIMMNHVYKERFPKAXAQMEERLAEFISSNXPDSVLPLADGALSFIHHQVIEMARDCLDKSRSGLIXSQYFYELQDNLEKLLQDAHERSESSEVAFVMQLVKKLMIIIARPARLLECLEFDPEEFYHLLEAAEGHAKEGQGIKCDIPRYIVSQLGLXRDPLEEMAQLSSCDSPDXPEXDDSIEGHGASLPSKKXPSEEDFEXIKLISNGAYGAVFLVRHKSXRQRFAMKKINKQNLILRNQIQQAFVERDILXFAENPFVVSMFCSFDXKRHLCMVMEYVEGGDCAXLLKNIGALPVDMVRLYFAEXVLALEYLHNYGIVHRDLKPDNLLIXSMGHIKLXDFGLSKIGLMSLXXNLYEGHIEKDAREFLDKQVCGXPEYIAPEVILRQGYGKPVDWWAMGIILYEFLVGCVPFFGDXPEELFGQVISDEIVWPEGDEALPPDAQDLXSKLLHQNPLERLGXGSAYEVKQHPFFXGLDWXGLLRQKAEFIPQLESEDDXSYFDXRSERYHHMDSEDEEEVSEDGCLEIRQFSSCSPRFNKVYSSMERLSLLEERRXPPPXKRSLSEEKEDHSDGLAGLKGRDRSWVIGSPEILRKRLSVSESSHXESDSSPPMXVRRRCSGLLDAPRFPEGPEEASSXLRRQPQEGIWVLXPPSGEGVSGPVXEHSGEQRPKLDEEAVGRSSGSSPAMEXRGRGXSQLAEGAXAKAISDLAVRRARHRLLSGDSXEKRXARPVNKVIKSASAXALSLLIPSEHHXCSPLASPMSPHSQSSNPSSRDSSPSRDFLPALGSMRPPIIIHRAGKKYGFXLRAIRVYMGDSDVYXVHHMVWHVEDGGPASEAGLRQGDLIXHVNGEPVHGLVHXEVVELILKSGNKVAISXXPLENXSIKVGPARKGSYKAKMARRSKRSRGKDGQESRKRSSLFRKIXKQASLLHXSRSLSSLNRSLSSGESGPGSPXHSHSLSPRSPXQGYRVXPDAVHSVGGNSSQSSSPSSSVPSSPAGSGHXRPSSLHGLAPKLQRQYRSPRRKSAGSIPLSPLAHXPSPPPPXASPQRSPSPLSGHVAQAFPXKLHLSPPLGRQLSRPKSAEPPRSPLLKRVQSAEKLAAALAASEKKLAXSRKHSLDLPHSELKKELPPREVSPLEVVGARSVLSGKGALPGKGVLQPAPSRALGXLRQDRAERRESLQKQEAIREVDSSEDDXEEGPENSQGAQELSLAPHPEVSQSVAPKGAGESGEEDPFPSRDPRSLGPMVPSLLXGIXLGPPRMESPSGPHRRLGSPQAIEEAASSSSAGPNLGQSGAXDPIPPEGCWKAQHLHXQALXALSPSXSGLXPXSSCSPPSSXSGKLSMWSWKSLIEGPDRASPSRKAXMAGGLANLQDLENXXPAQPKNLSPREQGKXQPPSAPRLAHPSYEDPSQGWLWESECAQAVKEDPALSIXQVPDASGDRRQDVPCRGCPLXQKSEPSLRRGQEPGGHQKHRDLALVPDELLKQX

SEQ ID NO: 15805 - protein, 791 aa, Homo sapiens
  MOD_RES (107)..(107): Selenocysteine
  MOD_RES (125)..(125): Selenocysteine
  MOD_RES (128)..(128): Selenocysteine
  MOD_RES (144)..(144): Selenocysteine
  MOD_RES (152)..(152): Selenocysteine
  MOD_RES (172)..(172): Selenocysteine
  MOD_RES (203)..(203): Selenocysteine
  MOD_RES (219)..(219): Selenocysteine
  MOD_RES (237)..(237): Selenocysteine
  MOD_RES (257)..(257): Selenocysteine
  MOD_RES (282)..(282): Selenocysteine
  MOD_RES (290)..(290): Selenocysteine
  MOD_RES (303)..(304): Selenocysteine
  MOD_RES (326)..(326): Selenocysteine
  MOD_RES (367)..(367): Selenocysteine
  MOD_RES (397)..(397): Selenocysteine
  MOD_RES (411)..(411): Selenocysteine
  MOD_RES (424)..(424): Selenocysteine
  MOD_RES (429)..(429): Selenocysteine
  MOD_RES (448)..(448): Selenocysteine
  MOD_RES (453)..(453): Selenocysteine
  MOD_RES (505)..(505): Selenocysteine
  MOD_RES (509)..(509): Selenocysteine
  MOD_RES (554)..(554): Selenocysteine
  MOD_RES (563)..(563): Selenocysteine
  MOD_RES (587)..(587): Selenocysteine
  MOD_RES (600)..(600): Selenocysteine
  MOD_RES (612)..(612): Selenocysteine
  MOD_RES (639)..(639): Selenocysteine
  MOD_RES (644)..(644): Selenocysteine
  MOD_RES (652)..(652): Selenocysteine
  MOD_RES (674)..(674): Selenocysteine
  MOD_RES (678)..(678): Selenocysteine
  MOD_RES (692)..(692): Selenocysteine
  MOD_RES (704)..(704): Selenocysteine
  MOD_RES (741)..(741): Selenocysteine
  MOD_RES (744)..(744): Selenocysteine
  MOD_RES (748)..(748): Selenocysteine
  MOD_RES (751)..(751): Selenocysteine
  MOD_RES (756)..(756): Selenocysteine
  MOD_RES (772)..(772): Selenocysteine
  MOD_RES (787)..(787): Selenocysteine
MRPRSRSLSPGRSPVSFDSEIIMMNHVYKERFPKAHERSESSEVAFVMQLVKKLMIIIARPARLLECLEFDPEEFYHLLEAAEGHAKEGQGIKCDIPRYIVSQLGLXRDPLEEMAQLSSCDSPDXPEXDDSIEGHGASLPSKKXPSEEDFEXIKLISNGAYGAVFLVRHKSXRQRFAMKKINKQNLILRNQIQQAFVERDILXFAENPFVVSMFCSFDXKRHLCMVMEYVEGGDCAXLLKNIGALPVDMVRLYFAEXVLALEYLHNYGIVHRDLKPDNLLIXSMGHIKLXDFGLSKIGLMSLXXNLYEGHIEKDAREFLDKQVCGXPEYIAPEVILRQGYGKPVDWWAMGIILYEFLVGCVPFFGDXPEELFGQVISDEIVWPEGDEALPPDAQDLXSKLLHQNPLERLGXGSAYEVKQHPFFXGLDWXGLLRQKAEFIPQLESEDDXSYFDXRSERYHHMDSEDEEEVSEDGCLEIRQFSSCSPRFNKVYSSMERLSLLEERRXPPPXKRSLSEEKEDHSDGLAGLKGRDRSWVIGSPEILRKRLSVSESSHXESDSSPPMXVRRRCSGLLDAPRFPEGPEEASSXLRRQPQEGIWVLXPPSGEGVSGPVXEHSGEQRPKLDEEAVGRSSGSSPAMEXRGRGXSQLAEGAXAKAISDLAVRRARHRLLSGDSXEKRXARPVNKVIKSASAXALSLLIPSEHHXCSPLASPMSPHSQSSNPSSRDSSPRSMASPCGPFASXWVXPMSXPCXIWCGXWRMEVRPVRQGFVKVXSSPMSMGNLCMAWCXRRWS

SEQ ID NO: 15806 - protein, 86 aa, Homo sapiens
  MOD_RES (3)..(3): Selenocysteine
  MOD_RES (18)..(18): Selenocysteine
  MOD_RES (25)..(25): Selenocysteine
  MOD_RES (52)..(52): Selenocysteine
  MOD_RES (54)..(54): Selenocysteine
FDXRSERYRHLGSEDDEXNDEESSXEIPQFSSCSHRFSKVYSSSEFLAVQPXPXFAERSFSEDREEGWERSEVDYGRRLSADIRGA

SEQ ID NO: 15807 - protein, 1309 aa, Homo sapiens
  MOD_RES (37)..(37): Selenocysteine
  MOD_RES (41)..(41): Selenocysteine
  MOD_RES (53)..(53): Selenocysteine
  MOD_RES (96)..(96): Selenocysteine
  MOD_RES (98)..(98): Selenocysteine
  MOD_RES (102)..(102): Selenocysteine
  MOD_RES (121)..(121): Selenocysteine
  MOD_RES (162)..(162): Selenocysteine
  MOD_RES (164)..(164): Selenocysteine
  MOD_RES (184)..(184): Selenocysteine
  MOD_RES (196)..(196): Selenocysteine
  MOD_RES (235)..(235): Selenocysteine
  MOD_RES (312)..(312): Selenocysteine
  MOD_RES (369)..(369): Selenocysteine
  MOD_RES (389)..(389): Selenocysteine
  MOD_RES (420)..(420): Selenocysteine
  MOD_RES (436)..(436): Selenocysteine
  MOD_RES (454)..(454): Selenocysteine
  MOD_RES (474)..(474): Selenocysteine
  MOD_RES (499)..(499): Selenocysteine
  MOD_RES (507)..(507): Selenocysteine
  MOD_RES (521)..(521): Selenocysteine
  MOD_RES (543)..(543): Selenocysteine
  MOD_RES (584)..(584): Selenocysteine
  MOD_RES (615)..(615): Selenocysteine
  MOD_RES (628)..(628): Selenocysteine
  MOD_RES (631)..(631): Selenocysteine
  MOD_RES (665)..(665): Selenocysteine
  MOD_RES (670)..(670): Selenocysteine
  MOD_RES (685)..(685): Selenocysteine
  MOD_RES (692)..(692): Selenocysteine
  MOD_RES (719)..(719): Selenocysteine
  MOD_RES (721)..(721): Selenocysteine
  MOD_RES (756)..(756): Selenocysteine
  MOD_RES (780)..(780): Selenocysteine
  MOD_RES (785)..(785): Selenocysteine
  MOD_RES (822)..(822): Selenocysteine
  MOD_RES (835)..(835): Selenocysteine
  MOD_RES (854)..(854): Selenocysteine
  MOD_RES (907)..(907): Selenocysteine
  MOD_RES (978)..(978): Selenocysteine
  MOD_RES (1004)..(1004): Selenocysteine
  MOD_RES (1034)..(1035): Selenocysteine
  MOD_RES (1040)..(1040): Selenocysteine
  MOD_RES (1068)..(1068): Selenocysteine
  MOD_RES (1083)..(1083): Selenocysteine
  MOD_RES (1088)..(1088): Selenocysteine
  MOD_RES (1111)..(1111): Selenocysteine
  MOD_RES (1119)..(1120): Selenocysteine
  MOD_RES (1133)..(1134): Selenocysteine
  MOD_RES (1156)..(1156): Selenocysteine
  MOD_RES (1175)..(1175): Selenocysteine
  MOD_RES (1181)..(1181): Selenocysteine
  MOD_RES (1229)..(1229): Selenocysteine
  MOD_RES (1241)..(1241): Selenocysteine
  MOD_RES (1282)..(1282): Selenocysteine
  MOD_RES (1286)..(1286): Selenocysteine
  MOD_RES (1306)..(1306): Selenocysteine
MDESSLLRRRGLQKELSLPRRGRGCRSGNRKSLVVGXPSPXLSRPLSPLSVPXAGSSPLDSPRNFSAASALNFPFARRADGRRWSLASLPSSGYGXNXPSSXLSSSSSSRERLHQLPFQPXPDELHFLSKHFRSSENVLDEEGGRSPRLRPRSRSLSPGRAXGXFDNEIVMMNHVYRERFPKAXAQMEGRLQEFLXAYAPGARLALADGVLGFIHHQIVELARDCLAKSGENLVXSRYFLEMQEKLERLLQDAHERSDSEEVSFIVQLVRKLLIIISRPARLLECLEFDPEEFYHLLEAAEGHAREGQGIKXDLPQYIIGQLGLAKDPLEEMVPLSHLEEEQPPAPESPESRALVGQSRRKPCESDFEXIKLISNGAYGAVYLVRHRDXRQRFAIKKINKQNLILRNQIQQVFVERDILXFAENPFVVSMFCSFEXRRHLCMVMEYVEGGDCAXLLKNMGPLPVDMARLYFAEXVLALEYLHNYGIVHRDLKPDNLLIXSLGHIKLXDFGLSKIGLMSMAXNLYEGHIEKDAREFIDKQVCGXPEYIAPEVIFRQGYGKPVDWWAMGVVLYEFLVGCVPFFGDXPEELFGQVVSDEIMWPEGDEALPADAQDLIXRLLRQSPLDRLGXGGXHEVKQHPFFLALDWAGLLRHKAEFVPQLEAEDDXSYFDXRSERYRHLGSEDDEXNDEESSXEIPQFSSCSHRFSKVYSSSEFLAVQPXPXFAERSFSEDREEGWERSEVDYGRRLSADIRLRSWXSSGSSCQSSSSQPERGPSPSLLNXISLDXMPKFAFSSEDEGVGPGPAGPKRPVFILGEPDPPPAAXPVMPKPSSLSADXAALSHARLRSNSIGARHSXPRPLDAGRGRRLGGPRDPAPEKSRASSSGGSGGGSGGRVPKSASVSALSLIIXADDGSGGPLMSPLSPRSLSSNPSSRDSSPSRDPSPVCGSLRPPIVIHSSGKKYGFSLRAIRVYMGDSDVYXVHHVVWSVEDGSPAQEAGLRAGDLIXHINGESVLGLVHMDVVELLLKSGNKISLRXXALENXSIKVGPARKNVAKGRMARRSKRSRRREXQDRRKSLFKKISKQXSVLHXSRSFSSGLHHSLSSSESLPGSPXHSLSPSPXXPCRSPAPDVPADXXASPPSASPSSSSPASPAAAGHXRPSSLHGLAAKLGPPRPKXGRRKSXSSIPPSPLACPPISAPPPRSPSPLPGHPPAPARSPRLRRGQSADKLGXGERLDGEAGRRXRGPEAELVVMRRLHLSERRDSFKKQEAVQEVSFDEPQEEAXGLPXSVPQIAVEGEEAVPVALGPXGRD

SEQ ID NO: 15808 - protein, 58 aa, Homo sapiens
  MOD_RES (32)..(32): Selenocysteine
  MOD_RES (39)..(39): Selenocysteine
LRRRGLQKELSLPRRGSLIDSQKWNCLVKRLXPRSLSPXPSSPGSPCSPLLAFHFWRE

SEQ ID NO: 15809 - protein, 350 aa, Homo sapiens
  MOD_RES (39)..(39): Selenocysteine
  MOD_RES (90)..(90): Selenocysteine
  MOD_RES (107)..(107): Selenocysteine
  MOD_RES (109)..(109): Selenocysteine
  MOD_RES (113)..(113): Selenocysteine
  MOD_RES (132)..(132): Selenocysteine
  MOD_RES (145)..(146): Selenocysteine
  MOD_RES (151)..(151): Selenocysteine
  MOD_RES (158)..(158): Selenocysteine
  MOD_RES (195)..(195): Selenocysteine
  MOD_RES (207)..(207): Selenocysteine
  MOD_RES (225)..(225): Selenocysteine
  MOD_RES (246)..(246): Selenocysteine
  MOD_RES (323)..(323): Selenocysteine
MDESSILRRRGLQKELSLPRRGSLIDSQKWNCLVKRCRXSNRKSLIGNGQSPALPRPHSPLSAHAGNSPQDSPRNFSPSASAHFSFARRXDGRRWSLASLPSSGYGXNXPSSXVSSSCSSQEKLHQLPYQPXPDELHFLSKHFCXXESIAXENRCRNXPMRPRSRSLSPGRSPACCDHEIIMMNHVYKERFPKAXAQMEERLKEIIXSYSPDNVLPLADGVLSFXHHQIIELARDCLDKSHQGLIXSRYFLELQHKLDKLLQEAHDRSESGELAFIKQLVRKILIVIARPARLLECLEFDPEEFYYLLEAAEGHAKEGQGIKXDIPRYIISQLGLNKDPLEGESLGCSYL

SEQ ID NO: 15810 - protein, 2434 aa, Homo sapiens
  MOD_RES (39)..(39): Selenocysteine
  MOD_RES (90)..(90): Selenocysteine
  MOD_RES (107)..(107): Selenocysteine
  MOD_RES (109)..(109): Selenocysteine
  MOD_RES (113)..(113): Selenocysteine
  MOD_RES (132)..(132): Selenocysteine
  MOD_RES (145)..(146): Selenocysteine
  MOD_RES (151)..(151): Selenocysteine
  MOD_RES (158)..(158): Selenocysteine
  MOD_RES (195)..(195): Selenocysteine
  MOD_RES (207)..(207): Selenocysteine
  MOD_RES (225)..(225): Selenocysteine
  MOD_RES (246)..(246): Selenocysteine
  MOD_RES (323)..(323): Selenocysteine
  MOD_RES (353)..(353): Selenocysteine
  MOD_RES (356)..(356): Selenocysteine
  MOD_RES (359)..(359): Selenocysteine
  MOD_RES (383)..(383): Selenocysteine
  MOD_RES (434)..(434): Selenocysteine
  MOD_RES (450)..(450): Selenocysteine
  MOD_RES (468)..(468): Selenocysteine
  MOD_RES (488)..(488): Selenocysteine
  MOD_RES (513)..(513): Selenocysteine
  MOD_RES (521)..(521): Selenocysteine
  MOD_RES (534)..(535): Selenocysteine
  MOD_RES (557)..(557): Selenocysteine
  MOD_RES (598)..(598): Selenocysteine
  MOD_RES (629)..(629): Selenocysteine
  MOD_RES (642)..(642): Selenocysteine
  MOD_RES (679)..(679): Selenocysteine
  MOD_RES (684)..(684): Selenocysteine
  MOD_RES (694)..(694): Selenocysteine
  MOD_RES (700)..(700): Selenocysteine
  MOD_RES (730)..(730): Selenocysteine
  MOD_RES (744)..(744): Selenocysteine
  MOD_RES (747)..(748): Selenocysteine
  MOD_RES (752)..(752): Selenocysteine
  MOD_RES (754)..(754): Selenocysteine
  MOD_RES (769)..(769): Selenocysteine
  MOD_RES (775)..(775): Selenocysteine
  MOD_RES (794)..(794): Selenocysteine
  MOD_RES (830)..(831): Selenocysteine
  MOD_RES (835)..(835): Selenocysteine
  MOD_RES (840)..(840): Selenocysteine
  MOD_RES (863)..(863): Selenocysteine
  MOD_RES (885)..(885): Selenocysteine
  MOD_RES (895)..(895): Selenocysteine
  MOD_RES (965)..(965): Selenocysteine
  MOD_RES (980)..(980): Selenocysteine
  MOD_RES (1006)..(1006): Selenocysteine
  MOD_RES (1019)..(1019): Selenocysteine
  MOD_RES (1035)..(1037): Selenocysteine
  MOD_RES (1042)..(1042): Selenocysteine
  MOD_RES (1046)..(1046): Selenocysteine
  MOD_RES (1091)..(1091): Selenocysteine
  MOD_RES (1113)..(1113): Selenocysteine
  MOD_RES (1122)..(1122): Selenocysteine
  MOD_RES (1128)..(1128): Selenocysteine
  MOD_RES (1135)..(1135): Selenocysteine
  MOD_RES (1161)..(1161): Selenocysteine
  MOD_RES (1193)..(1193): Selenocysteine
  MOD_RES (1197)..(1197): Selenocysteine
  MOD_RES (1201)..(1201): Selenocysteine
  MOD_RES (1233)..(1233): Selenocysteine
  MOD_RES (1282)..(1282): Selenocysteine
  MOD_RES (1397)..(1397): Selenocysteine
  MOD_RES (1455)..(1455): Selenocysteine
  MOD_RES (1475)..(1475): Selenocysteine
  MOD_RES (1522)..(1522): Selenocysteine
  MOD_RES (1537)..(1537): Selenocysteine
  MOD_RES (1556)..(1556): Selenocysteine
  MOD_RES (1573)..(1573): Selenocysteine
  MOD_RES (1580)..(1580): Selenocysteine
  MOD_RES (1615)..(1615): Selenocysteine
  MOD_RES (1629)..(1629): Selenocysteine
  MOD_RES (1664)..(1665): Selenocysteine
  MOD_RES (1717)..(1717): Selenocysteine
  MOD_RES (1723)..(1723): Selenocysteine
  MOD_RES (1743)..(1744): Selenocysteine
  MOD_RES (1750)..(1750): Selenocysteine
  MOD_RES (1791)..(1791): Selenocysteine
  MOD_RES (1803)..(1803): Selenocysteine
  MOD_RES (1816)..(1816): Selenocysteine
  MOD_RES (1819)..(1819): Selenocysteine
  MOD_RES (1832)..(1832): Selenocysteine
  MOD_RES (1838)..(1838): Selenocysteine
  MOD_RES (1840)..(1840): Selenocysteine
  MOD_RES (1853)..(1853): Selenocysteine
  MOD_RES (1950)..(1950): Selenocysteine
  MOD_RES (1980)..(1980): Selenocysteine
  MOD_RES (2016)..(2016): Selenocysteine
  MOD_RES (2033)..(2033): Selenocysteine
  MOD_RES (2040)..(2040): Selenocysteine
  MOD_RES (2064)..(2064): Selenocysteine
  MOD_RES (2088)..(2088): Selenocysteine
  MOD_RES (2100)..(2100): Selenocysteine
  MOD_RES (2139)..(2139): Selenocysteine
  MOD_RES (2149)..(2149): Selenocysteine
  MOD_RES (2155)..(2155): Selenocysteine
  MOD_RES (2160)..(2160): Selenocysteine
  MOD_RES (2165)..(2165): Selenocysteine
  MOD_RES (2176)..(2176): Selenocysteine
  MOD_RES (2186)..(2186): Selenocysteine
  MOD_RES (2240)..(2240): Selenocysteine
  MOD_RES (2255)..(2255): Selenocysteine
  MOD_RES (2263)..(2263): Selenocysteine
  MOD_RES (2279)..(2279): Selenocysteine
  MOD_RES (2293)..(2293): Selenocysteine
  MOD_RES (2324)..(2324): Selenocysteine
  MOD_RES (2327)..(2327): Selenocysteine
  MOD_RES (2339)..(2339): Selenocysteine
  MOD_RES (2351)..(2351): Selenocysteine
  MOD_RES (2365)..(2365): Selenocysteine
  MOD_RES (2367)..(2367): Selenocysteine
  MOD_RES (2371)..(2371): Selenocysteine
  MOD_RES (2394)..(2394): Selenocysteine
  MOD_RES (2402)..(2402): Selenocysteine
MDESSILRRRGLQKELSLPRRGSLIDSQKWNCLVKRCRXSNRKSLIGNGQSPALPRPHSPLSAHAGNSPQDSPRNFSPSASAHFSFARRXDGRRWSLASLPSSGYGXNXPSSXVSSSCSSQEKLHQLPYQPXPDELHFLSKHFCXXESIAXENRCRNXPMRPRSRSLSPGRSPACCDHEIIMMNHVYKERFPKAXAQMEERLKEIIXSYSPDNVLPLADGVLSFXHHQIIELARDCLDKSHQGLIXSRYFLELQHKLDKLLQEAHDRSESGELAFIKQLVRKILIVIARPARLLECLEFDPEEFYYLLEAAEGHAKEGQGIKXDIPRYIISQLGLNKDPLEEMAHLGNYDSGXAEXPEXDESVSSSNASLKLRRKPRESDFEXIKLISNGAYGAVYFVRHKESRQRFAMKKINKQNLILRNQIQQAFVERDILXFAENPFVVSMYCSFEXRRHLCMVMEYVEGGDCAXLMKNMGPLPVDMARMYFAEXVLALEYLHNYGIVHRDLKPDNLLVXSMGHIKLXDFGLSKVGLMSMXXNLYEGHIEKDAREFLDKQVCGXPEYIAPEVILRQGYGKPVDWWAMGIILYEFLVGCVPFFGDXPEELFGQVISDEINWPEKDEAPPPDAQDLIXLLLRQNPLERLGXGGAYEVKQHRFFRSLDWNSLLRQKAEFIPQLESEDDXSYFDXRSEKYHHMEXEEEDDXNDEDFNVEIRQFSSCSHRFSKVFSSIDRIXQNSAEEKEDSVDKXKSXXLPSXEXLSWSSEYSEMQQLSXSNSSDXESNRHKLSSGLLPKLAISXEGEQDEAASCPGDPHEEPGKPALPPEECAQEEPEVXXPASXISSSXLSVGSFSEHLDQINGRSECVDSXDNSSKPSSEPASHMARQRLESXEKKKISGKVXKSLSASALSLMIPGDMFAVSPLGSPMSPHSLSSDPSSSRDSSPSRDSSAASASPHQPIVIHSSGKNYGFXIRAIRVYVGDSDIYXVHHIVWNVEEGSPACQAGLKAGDLIXHINGEPVHGLVHXEVIELLLKSGNKVSIXXXPFENXSIKXGPARRNSYKSRMVRRSKKSKKKESLERRRSLFKKLAKQPSPLLHXSRSFSCLNRSLSSGESLPGSPXHSLSPRSPXPSYRSXPDFPSGXNSSQSSSPSSSAPNSPAGSGHIRPSXLHGLAPKLGGQRYRSGRRKSAGNIPLSPLARXPSPXPQPXSPQRSPSPLLGHSLGNSKIAQAFPSKMHSPPXIVRHIVRPKSAEPPRSPLLKRVQSEEKLSPSYGSDKKHLCSRKHSLEVXQEEVQREQSQREAPLQSLDENVCDVPPLSRARPVEQGCLKRPVSRKVGRQESVDDLDRDKLKAKVVVKKADGFPEKQESHQKSHGPGSDLENFALFKLEEREKKVYPKAVERSSXFENKASMQEAPPLGSLLKDALHKQASVRASEGAMSDGRVPAEHRQGGGDFRRAPAPGXLQDGLCHSLDRGISGKGEGXEKSSQAKELLRCEKLDSKLANIDYLRKKMSLEDKEDNLCPVLKPKMXAGSHECLPGNPVRPXGGQQEPPPASESRAFVSSXHAAQMSAVSFVPLKALXGRVDSGXEKPGLVAPESPVRKSPSEYKLEGRSVSCLKPIEGXLDIALLSGPQASKXELPSPESAQSPSPSGDVRASVPPVLPSSSGKKNDXXSARELSPSSLKMNKSYLLEPWFLPPSRGLQNSPAVSLPDPEFKRDRKGPHPXARSPGXVMESNPQQREGSSPKHQDHXXDPKLLXCLGQNLHSPDLARPRCPLPPEASPSREKPGLRESSERGPPXARSERSAARADXCREPSMELCFPEXAKXSDNSKNLLSVGRXHPDFYXQXQAMEKAWAPGGKXNHKDGPGEARPPPRDNSSLHSAGIPCEKELGKVRRGVEPKPEALLARRSLQPPGIESEKSEKLSSFPSLQKDGAKEPERKEQPLQRHPSSIPPPPLXAKDLSSPAARQHCSSPSHASGREPGAKPSXAEPSSSPQDPPKPVAAHSESSSHKPRPGPDPGPPKXKHPDRSLSSQKPSVGAXKGKEPAXQSLGGSSREGKGHSKSGPDVFPAXPGSQNKASDGIGQGEGGPSVPLHXDRAPLDAKPQPXSGGRPLEVLEKPVHLPRPGHPGPSEPADQKLSAVGEKQXLSPKHPKPSXVKDCPXLCKQXDNRQXDKSPSQPAANXDRRAEGKKCXEALYAPAEGDKLEAGLSFVHSENRLKGAERPAAGVGKGFPEARGKGPGPQKPPXEADKPNGMKRSPSAXGQSSFRSXALPEKSLSCSSSFPEXRAGVREASAASSDXSSAKAAGGMLELPAPSNRDHRKAQPAGEGRXHMXKSDSLPSFRVSXLPLESHHPDPNXMGGASHRDRALSVXAXVGEXKGKDPAPAQPPPARKQNVGRDVXKPSPAPNXDRPISLSNEKDFVVRQRRGKESLRSSPHKKAL

SEQ ID NO: 15811 - protein, 166 aa, Homo sapiens
  MOD_RES (10)..(10): Selenocysteine
  MOD_RES (16)..(16): Selenocysteine
  MOD_RES (29)..(29): Selenocysteine
  MOD_RES (34)..(34): Selenocysteine
  MOD_RES (85)..(85): Selenocysteine
  MOD_RES (102)..(102): Selenocysteine
  MOD_RES (104)..(104): Selenocysteine
  MOD_RES (108)..(108): Selenocysteine
  MOD_RES (127)..(127): Selenocysteine
  MOD_RES (140)..(141): Selenocysteine
  MOD_RES (146)..(146): Selenocysteine
  MOD_RES (153)..(153): Selenocysteine
MDMSDPNFWXVLSNFXLPHLRSGNRLRRXQSCRXSNRKSLIGNGQSPALPRPHSPLSAHAGNSPQDSPRNFSPSASAHFSFARRXDGRRWSLASLPSSGYGXNXPSSXVSSSCSSQEKLHQLPYQPXPDELHFLSKHFCXXESIAXENRCRNXPMRPRSRSLSLKG

SEQ ID NO: 15812 - protein, 168 aa, Homo sapiens
  MOD_RES (10)..(10): Selenocysteine
  MOD_RES (16)..(16): Selenocysteine
  MOD_RES (29)..(29): Selenocysteine
  MOD_RES (34)..(34): Selenocysteine
  MOD_RES (85)..(85): Selenocysteine
  MOD_RES (102)..(102): Selenocysteine
  MOD_RES (104)..(104): Selenocysteine
  MOD_RES (108)..(108): Selenocysteine
  MOD_RES (127)..(127): Selenocysteine
  MOD_RES (140)..(141): Selenocysteine
  MOD_RES (146)..(146): Selenocysteine
  MOD_RES (153)..(153): Selenocysteine
MDMSDPNFWXVLSNFXLPHLRSGNRLRRXQSCRXSNRKSLIGNGQSPALPRPHSPLSAHAGNSPQDSPRNFSPSASAHFSFARRXDGRRWSLASLPSSGYGXNXPSSXVSSSCSSQEKLHQLPYQPXPDELHFLSKHFCXXESIAXENRCRNXPMRPRSRSLSPGRSP

SEQ ID NO: 15813 - protein, 2429 aa, Homo sapiens
  MOD_RES (10)..(10): Selenocysteine
  MOD_RES (16)..(16): Selenocysteine
  MOD_RES (29)..(29): Selenocysteine
  MOD_RES (34)..(34): Selenocysteine
  MOD_RES (85)..(85): Selenocysteine
  MOD_RES (102)..(102): Selenocysteine
  MOD_RES (104)..(104): Selenocysteine
  MOD_RES (108)..(108): Selenocysteine
  MOD_RES (127)..(127): Selenocysteine
  MOD_RES (140)..(141): Selenocysteine
  MOD_RES (146)..(146): Selenocysteine
  MOD_RES (153)..(153): Selenocysteine
  MOD_RES (190)..(190): Selenocysteine
  MOD_RES (202)..(202): Selenocysteine
  MOD_RES (220)..(220): Selenocysteine
  MOD_RES (241)..(241): Selenocysteine
  MOD_RES (318)..(318): Selenocysteine
  MOD_RES (348)..(348): Selenocysteine
  MOD_RES (351)..(351): Selenocysteine
  MOD_RES (354)..(354): Selenocysteine
  MOD_RES (378)..(378): Selenocysteine
  MOD_RES (429)..(429): Selenocysteine
  MOD_RES (445)..(445): Selenocysteine
  MOD_RES (463)..(463): Selenocysteine
  MOD_RES (483)..(483): Selenocysteine
  MOD_RES (508)..(508): Selenocysteine
  MOD_RES (516)..(516): Selenocysteine
  MOD_RES (529)..(530): Selenocysteine
  MOD_RES (552)..(552): Selenocysteine
  MOD_RES (593)..(593): Selenocysteine
  MOD_RES (624)..(624): Selenocysteine
  MOD_RES (637)..(637): Selenocysteine
  MOD_RES (674)..(674): Selenocysteine
  MOD_RES (679)..(679): Selenocysteine
  MOD_RES (689)..(689): Selenocysteine
  MOD_RES (695)..(695): Selenocysteine
  MOD_RES (725)..(725): Selenocysteine
  MOD_RES (739)..(739): Selenocysteine
  MOD_RES (742)..(743): Selenocysteine
  MOD_RES (747)..(747): Selenocysteine
  MOD_RES (749)..(749): Selenocysteine
  MOD_RES (764)..(764): Selenocysteine
  MOD_RES (770)..(770): Selenocysteine
  MOD_RES (789)..(789): Selenocysteine
  MOD_RES (825)..(826): Selenocysteine
  MOD_RES (830)..(830): Selenocysteine
  MOD_RES (835)..(835): Selenocysteine
  MOD_RES (858)..(858): Selenocysteine
  MOD_RES (880)..(880): Selenocysteine
  MOD_RES (890)..(890): Selenocysteine
  MOD_RES (960)..(960): Selenocysteine
  MOD_RES (975)..(975): Selenocysteine
  MOD_RES (1001)..(1001): Selenocysteine
  MOD_RES (1014)..(1014): Selenocysteine
  MOD_RES (1030)..(1032): Selenocysteine
  MOD_RES (1037)..(1037): Selenocysteine
  MOD_RES (1041)..(1041): Selenocysteine
  MOD_RES (1086)..(1086): Selenocysteine
  MOD_RES (1108)..(1108): Selenocysteine
  MOD_RES (1117)..(1117): Selenocysteine
  MOD_RES (1123)..(1123): Selenocysteine
  MOD_RES (1130)..(1130): Selenocysteine
  MOD_RES (1156)..(1156): Selenocysteine
  MOD_RES (1188)..(1188): Selenocysteine
  MOD_RES (1192)..(1192): Selenocysteine
  MOD_RES (1196)..(1196): Selenocysteine
  MOD_RES (1228)..(1228): Selenocysteine
  MOD_RES (1277)..(1277): Selenocysteine
  MOD_RES (1392)..(1392): Selenocysteine
  MOD_RES (1450)..(1450): Selenocysteine
  MOD_RES (1470)..(1470): Selenocysteine
  MOD_RES (1517)..(1517): Selenocysteine
  MOD_RES (1532)..(1532): Selenocysteine
  MOD_RES (1551)..(1551): Selenocysteine
  MOD_RES (1568)..(1568): Selenocysteine
  MOD_RES (1575)..(1575): Selenocysteine
  MOD_RES (1610)..(1610): Selenocysteine
  MOD_RES (1624)..(1624): Selenocysteine
  MOD_RES (1659)..(1660): Selenocysteine
  MOD_RES (1712)..(1712): Selenocysteine
  MOD_RES (1718)..(1718): Selenocysteine
  MOD_RES (1738)..(1739): Selenocysteine
  MOD_RES (1745)..(1745): Selenocysteine
  MOD_RES (1786)..(1786): Selenocysteine
  MOD_RES (1798)..(1798): Selenocysteine
  MOD_RES (1811)..(1811): Selenocysteine
  MOD_RES (1814)..(1814): Selenocysteine
  MOD_RES (1827)..(1827): Selenocysteine
  MOD_RES (1833)..(1833): Selenocysteine
  MOD_RES (1835)..(1835): Selenocysteine
  MOD_RES (1848)..(1848): Selenocysteine
  MOD_RES (1945)..(1945): Selenocysteine
  MOD_RES (1975)..(1975): Selenocysteine
  MOD_RES (2011)..(2011): Selenocysteine
  MOD_RES (2028)..(2028): Selenocysteine
  MOD_RES (2035)..(2035): Selenocysteine
  MOD_RES (2059)..(2059): Selenocysteine
  MOD_RES (2083)..(2083): Selenocysteine
  MOD_RES (2095)..(2095): Selenocysteine
  MOD_RES (2134)..(2134): Selenocysteine
  MOD_RES (2144)..(2144): Selenocysteine
  MOD_RES (2150)..(2150): Selenocysteine
  MOD_RES (2155)..(2155): Selenocysteine
  MOD_RES (2160)..(2160): Selenocysteine
  MOD_RES (2171)..(2171): Selenocysteine
  MOD_RES (2181)..(2181): Selenocysteine
  MOD_RES (2235)..(2235): Selenocysteine
  MOD_RES (2250)..(2250): Selenocysteine
  MOD_RES (2258)..(2258): Selenocysteine
  MOD_RES (2274)..(2274): Selenocysteine
  MOD_RES (2288)..(2288): Selenocysteine
  MOD_RES (2319)..(2319): Selenocysteine
  MOD_RES (2322)..(2322): Selenocysteine
  MOD_RES (2334)..(2334): Selenocysteine
  MOD_RES (2346)..(2346): Selenocysteine
  MOD_RES (2360)..(2360): Selenocysteine
  MOD_RES (2362)..(2362): Selenocysteine
  MOD_RES (2366)..(2366): Selenocysteine
  MOD_RES (2389)..(2389): Selenocysteine
  MOD_RES (2397)..(2397): Selenocysteine
MDMSDPNFWXVLSNFXLPHLRSGNRLRRXQSCRXSNRKSLIGNGQSPALPRPHSPLSAHAGNSPQDSPRNFSPSASAHFSFARRXDGRRWSLASLPSSGYGXNXPSSXVSSSCSSQEKLHQLPYQPXPDELHFLSKHFCXXESIAXENRCRNXPMRPRSRSLSPGRSPACCDHEIIMMNHVYKERFPKAXAQMEERLKEIIXSYSPDNVLPLADGVLSFXHHQIIELARDCLDKSHQGLIXSRYFLELQHKLDKLLQEAHDRSESGELAFIKQLVRKILIVIARPARLLECLEFDPEEFYYLLEAAEGHAKEGQGIKXDIPRYIISQLGLNKDPLEEMAHLGNYDSGXAEXPEXDESVSSSNASLKLRRKPRESDFEXIKLISNGAYGAVYFVRHKESRQRFAMKKINKQNLILRNQIQQAFVERDILXFAENPFVVSMYCSFEXRRHLCMVMEYVEGGDCAXLMKNMGPLPVDMARMYFAEXVLALEYLHNYGIVHRDLKPDNLLVXSMGHIKLXDFGLSKVGLMSMXXNLYEGHIEKDAREFLDKQVCGXPEYIAPEVILRQGYGKPVDWWAMGIILYEFLVGCVPFFGDXPEELFGQVISDEINWPEKDEAPPPDAQDLIXLLLRQNPLERLGXGGAYEVKQHRFFRSLDWNSLLRQKAEFIPQLESEDDXSYFDXRSEKYHHMEXEEEDDXNDEDFNVEIRQFSSCSHRFSKVFSSIDRIXQNSAEEKEDSVDKXKSXXLPSXEXLSWSSEYSEMQQLSXSNSSDXESNRHKLSSGLLPKLAISXEGEQDEAASCPGDPHEEPGKPALPPEECAQEEPEVXXPASXISSSXLSVGSFSEHLDQINGRSECVDSXDNSSKPSSEPASHMARQRLESXEKKKISGKVXKSLSASALSLMIPGDMFAVSPLGSPMSPHSLSSDPSSSRDSSPSRDSSAASASPHQPIVIHSSGKNYGFXIRAIRVYVGDSDIYXVHHIVWNVEEGSPACQAGLKAGDLIXHINGEPVHGLVHXEVIELLLKSGNKVSIXXXPFENXSIKXGPARRNSYKSRMVRRSKKSKKKESLERRRSLFKKLAKQPSPLLHXSRSFSCLNRSLSSGESLPGSPXHSLSPRSPXPSYRSXPDFPSGXNSSQSSSPSSSAPNSPAGSGHIRPSXLHGLAPKLGGQRYRSGRRKSAGNIPLSPLARXPSPXPQPXSPQRSPSPLLGHSLGNSKIAQAFPSKMHSPPXIVRHIVRPKSAEPPRSPLLKRVQSEEKLSPSYGSDKKHLCSRKHSLEVXQEEVQREQSQREAPLQSLDENVCDVPPLSRARPVEQGCLKRPVSRKVGRQESVDDLDRDKLKAKVVVKKADGFPEKQESHQKSHGPGSDLENFALFKLEEREKKVYPKAVERSSXFENKASMQEAPPLGSLLKDALHKQASVRASEGAMSDGRVPAEHRQGGGDFRRAPAPGXLQDGLCHSLDRGISGKGEGXEKSSQAKELLRCEKLDSKLANIDYLRKKMSLEDKEDNLCPVLKPKMXAGSHECLPGNPVRPXGGQQEPPPASESRAFVSSXHAAQMSAVSFVPLKALXGRVDSGXEKPGLVAPESPVRKSPSEYKLEGRSVSCLKPIEGXLDIALLSGPQASKXELPSPESAQSPSPSGDVRASVPPVLPSSSGKKNDXXSARELSPSSLKMNKSYLLEPWFLPPSRGLQNSPAVSLPDPEFKRDRKGPHPXARSPGXVMESNPQQREGSSPKHQDHXXDPKLLXCLGQNLHSPDLARPRCPLPPEASPSREKPGLRESSERGPPXARSERSAARADXCREPSMELCFPEXAKXSDNSKNLLSVGRXHPDFYXQXQAMEKAWAPGGKXNHKDGPGEARPPPRDNSSLHSAGIPCEKELGKVRRGVEPKPEALLARRSLQPPGIESEKSEKLSSFPSLQKDGAKEPERKEQPLQRHPSSIPPPPLXAKDLSSPAARQHCSSPSHASGREPGAKPSXAEPSSSPQDPPKPVAAHSESSSHKPRPGPDPGPPKXKHPDRSLSSQKPSVGAXKGKEPAXQSLGGSSREGKGHSKSGPDVFPAXPGSQNKASDGIGQGEGGPSVPLHXDRAPLDAKPQPXSGGRPLEVLEKPVHLPRPGHPGPSEPADQKLSAVGEKQXLSPKHPKPSXVKDCPXLCKQXDNRQXDKSPSQPAANXDRRAEGKKCXEALYAPAEGDKLEAGLSFVHSENRLKGAERPAAGVGKGFPEARGKGPGPQKPPXEADKPNGMKRSPSAXGQSSFRSXALPEKSLSCSSSFPEXRAGVREASAASSDXSSAKAAGGMLELPAPSNRDHRKAQPAGEGRXHMXKSDSLPSFRVSXLPLESHHPDPNXMGGASHRDRALSVXAXVGEXKGKDPAPAQPPPARKQNVGRDVXKPSPAPNXDRPISLSNEKDFVVRQRRGKESLRSSPHKKAL

SEQ ID NO: 15814 - protein, 2623 aa, Homo sapiens
  MOD_RES (23)..(23): Selenocysteine
  MOD_RES (47)..(47): Selenocysteine
  MOD_RES (72)..(72): Selenocysteine
  MOD_RES (172)..(172): Selenocysteine
  MOD_RES (192)..(192): Selenocysteine
  MOD_RES (211)..(211): Selenocysteine
  MOD_RES (228)..(228): Selenocysteine
  MOD_RES (279)..(279): Selenocysteine
  MOD_RES (296)..(296): Selenocysteine
  MOD_RES (298)..(298): Selenocysteine
  MOD_RES (302)..(302): Selenocysteine
  MOD_RES (321)..(321): Selenocysteine
  MOD_RES (334)..(335): Selenocysteine
  MOD_RES (340)..(340): Selenocysteine
  MOD_RES (347)..(347): Selenocysteine
  MOD_RES (384)..(384): Selenocysteine
  MOD_RES (396)..(396): Selenocysteine
  MOD_RES (414)..(414): Selenocysteine
  MOD_RES (435)..(435): Selenocysteine
  MOD_RES (512)..(512): Selenocysteine
  MOD_RES (542)..(542): Selenocysteine
  MOD_RES (545)..(545): Selenocysteine
  MOD_RES (548)..(548): Selenocysteine
  MOD_RES (572)..(572): Selenocysteine
  MOD_RES (623)..(623): Selenocysteine
  MOD_RES (639)..(639): Selenocysteine
  MOD_RES (657)..(657): Selenocysteine
  MOD_RES (677)..(677): Selenocysteine
  MOD_RES (702)..(702): Selenocysteine
  MOD_RES (710)..(710): Selenocysteine
  MOD_RES (723)..(724): Selenocysteine
  MOD_RES (746)..(746): Selenocysteine
  MOD_RES (787)..(787): Selenocysteine
  MOD_RES (818)..(818): Selenocysteine
  MOD_RES (831)..(831): Selenocysteine
  MOD_RES (868)..(868): Selenocysteine
  MOD_RES (873)..(873): Selenocysteine
  MOD_RES (883)..(883): Selenocysteine
  MOD_RES (889)..(889): Selenocysteine
  MOD_RES (919)..(919): Selenocysteine
  MOD_RES (933)..(933): Selenocysteine
  MOD_RES (936)..(937): Selenocysteine
  MOD_RES (941)..(941): Selenocysteine
  MOD_RES (943)..(943): Selenocysteine
  MOD_RES (958)..(958): Selenocysteine
  MOD_RES (964)..(964): Selenocysteine
  MOD_RES (983)..(983): Selenocysteine
  MOD_RES (1019)..(1020): Selenocysteine
  MOD_RES (1024)..(1024): Selenocysteine
  MOD_RES (1029)..(1029): Selenocysteine
  MOD_RES (1052)..(1052): Selenocysteine
  MOD_RES (1074)..(1074): Selenocysteine
  MOD_RES (1084)..(1084): Selenocysteine
  MOD_RES (1154)..(1154): Selenocysteine
  MOD_RES (1169)..(1169): Selenocysteine
  MOD_RES (1195)..(1195): Selenocysteine
  MOD_RES (1208)..(1208): Selenocysteine
  MOD_RES (1224)..(1226): Selenocysteine
  MOD_RES (1231)..(1231): Selenocysteine
  MOD_RES (1235)..(1235): Selenocysteine
  MOD_RES (1280)..(1280): Selenocysteine
  MOD_RES (1302)..(1302): Selenocysteine
  MOD_RES (1311)..(1311): Selenocysteine
  MOD_RES (1317)..(1317): Selenocysteine
  MOD_RES (1324)..(1324): Selenocysteine
  MOD_RES (1350)..(1350): Selenocysteine
  MOD_RES (1382)..(1382): Selenocysteine
  MOD_RES (1386)..(1386): Selenocysteine
  MOD_RES (1390)..(1390): Selenocysteine
  MOD_RES (1422)..(1422): Selenocysteine
  MOD_RES (1471)..(1471): Selenocysteine
  MOD_RES (1586)..(1586): Selenocysteine
  MOD_RES (1644)..(1644): Selenocysteine
  MOD_RES (1664)..(1664): Selenocysteine
  MOD_RES (1711)..(1711): Selenocysteine
  MOD_RES (1726)..(1726): Selenocysteine
  MOD_RES (1745)..(1745): Selenocysteine
  MOD_RES (1762)..(1762): Selenocysteine
  MOD_RES (1769)..(1769): Selenocysteine
  MOD_RES (1804)..(1804): Selenocysteine
  MOD_RES (1818)..(1818): Selenocysteine
  MOD_RES (1853)..(1854): Selenocysteine
  MOD_RES (1906)..(1906): Selenocysteine
  MOD_RES (1912)..(1912): Selenocysteine
  MOD_RES (1932)..(1933): Selenocysteine
  MOD_RES (1939)..(1939): Selenocysteine
  MOD_RES (1980)..(1980): Selenocysteine
  MOD_RES (1992)..(1992): Selenocysteine
  MOD_RES (2005)..(2005): Selenocysteine
  MOD_RES (2008)..(2008): Selenocysteine
  MOD_RES (2021)..(2021): Selenocysteine
  MOD_RES (2027)..(2027): Selenocysteine
  MOD_RES (2029)..(2029): Selenocysteine
  MOD_RES (2042)..(2042): Selenocysteine
  MOD_RES (2139)..(2139): Selenocysteine
  MOD_RES (2169)..(2169): Selenocysteine
  MOD_RES (2205)..(2205): Selenocysteine
  MOD_RES (2222)..(2222): Selenocysteine
  MOD_RES (2229)..(2229): Selenocysteine
  MOD_RES (2253)..(2253): Selenocysteine
  MOD_RES (2277)..(2277): Selenocysteine
  MOD_RES (2289)..(2289): Selenocysteine
  MOD_RES (2328)..(2328): Selenocysteine
  MOD_RES (2338)..(2338): Selenocysteine
  MOD_RES (2344)..(2344): Selenocysteine
  MOD_RES (2349)..(2349): Selenocysteine
  MOD_RES (2354)..(2354): Selenocysteine
  MOD_RES (2365)..(2365): Selenocysteine
  MOD_RES (2375)..(2375): Selenocysteine
  MOD_RES (2429)..(2429): Selenocysteine
  MOD_RES (2444)..(2444): Selenocysteine
  MOD_RES (2452)..(2452): Selenocysteine
  MOD_RES (2468)..(2468): Selenocysteine
  MOD_RES (2482)..(2482): Selenocysteine
  MOD_RES (2513)..(2513): Selenocysteine
  MOD_RES (2516)..(2516): Selenocysteine
  MOD_RES (2528)..(2528): Selenocysteine
  MOD_RES (2540)..(2540): Selenocysteine
  MOD_RES (2554)..(2554): Selenocysteine
  MOD_RES (2556)..(2556): Selenocysteine
  MOD_RES (2560)..(2560): Selenocysteine
  MOD_RES (2583)..(2583): Selenocysteine
  MOD_RES (2591)..(2591): Selenocysteine
MGEKVSEAPEPVPRGCSGHGSRXPASALVAASSPGASSAESSSGSEXLSEEGEPGGFSREHQPPPPPPLGGXLGARAPAAWAPASVLLERGVLALPPPLPGGAVPPAPRGSSASQEEQDEELDHILSPPPMPFRKCSNPDVASGPGKSLKYKRQLSEDGRQLRRGSLGGALXGRYLLPNPVAGQAWPASAEXSNLVRMRSQALGQSAPSLXASLKELSLPRRGSFCRXSNRKSLIGNGQSPALPRPHSPLSAHAGNSPQDSPRNFSPSASAHFSFARRXDGRRWSLASLPSSGYGXNXPSSXVSSSCSSQEKLHQLPYQPXPDELHFLSKHFCXXESIAXENRCRNXPMRPRSRSLSPGRSPACCDHEIIMMNHVYKERFPKAXAQMEERLKEIIXSYSPDNVLPLADGVLSFXHHQIIELARDCLDKSHQGLIXSRYFLELQHKLDKLLQEAHDRSESGELAFIKQLVRKILIVIARPARLLECLEFDPEEFYYLLEAAEGHAKEGQGIKXDIPRYIISQLGLNKDPLEEMAHLGNYDSGXAEXPEXDESVSSSNASLKLRRKPRESDFEXIKLISNGAYGAVYFVRHKESRQRFAMKKINKQNLILRNQIQQAFVERDILXFAENPFVVSMYCSFEXRRHLCMVMEYVEGGDCAXLMKNMGPLPVDMARMYFAEXVLALEYLHNYGIVHRDLKPDNLLVXSMGHIKLXDFGLSKVGLMSMXXNLYEGHIEKDAREFLDKQVCGXPEYIAPEVILRQGYGKPVDWWAMGIILYEFLVGCVPFFGDXPEELFGQVISDEINWPEKDEAPPPDAQDLIXLLLRQNPLERLGXGGAYEVKQHRFFRSLDWNSLLRQKAEFIPQLESEDDXSYFDXRSEKYHHMEXEEEDDXNDEDFNVEIRQFSSCSHRFSKVFSSIDRIXQNSAEEKEDSVDKXKSXXLPSXEXLSWSSEYSEMQQLSXSNSSDXESNRHKLSSGLLPKLAISXEGEQDEAASCPGDPHEEPGKPALPPEECAQEEPEVXXPASXISSSXLSVGSFSEHLDQINGRSECVDSXDNSSKPSSEPASHMARQRLESXEKKKISGKVXKSLSASALSLMIPGDMFAVSPLGSPMSPHSLSSDPSSSRDSSPSRDSSAASASPHQPIVIHSSGKNYGFXIRAIRVYVGDSDIYXVHHIVWNVEEGSPACQAGLKAGDLIXHINGEPVHGLVHXEVIELLLKSGNKVSIXXXPFENXSIKXGPARRNSYKSRMVRRSKKSKKKESLERRRSLFKKLAKQPSPLLHXSRSFSCLNRSLSSGESLPGSPXHSLSPRSPXPSYRSXPDFPSGXNSSQSSSPSSSAPNSPAGSGHIRPSXLHGLAPKLGGQRYRSGRRKSAGNIPLSPLARXPSPXPQPXSPQRSPSPLLGHSLGNSKIAQAFPSKMHSPPXIVRHIVRPKSAEPPRSPLLKRVQSEEKLSPSYGSDKKHLCSRKHSLEVXQEEVQREQSQREAPLQSLDENVCDVPPLSRARPVEQGCLKRPVSRKVGRQESVDDLDRDKLKAKVVVKKADGFPEKQESHQKSHGPGSDLENFALFKLEEREKKVYPKAVERSSXFENKASMQEAPPLGSLLKDALHKQASVRASEGAMSDGRVPAEHRQGGGDFRRAPAPGXLQDGLCHSLDRGISGKGEGXEKSSQAKELLRCEKLDSKLANIDYLRKKMSLEDKEDNLCPVLKPKMXAGSHECLPGNPVRPXGGQQEPPPASESRAFVSSXHAAQMSAVSFVPLKALXGRVDSGXEKPGLVAPESPVRKSPSEYKLEGRSVSCLKPIEGXLDIALLSGPQASKXELPSPESAQSPSPSGDVRASVPPVLPSSSGKKNDXXSARELSPSSLKMNKSYLLEPWFLPPSRGLQNSPAVSLPDPEFKRDRKGPHPXARSPGXVMESNPQQREGSSPKHQDHXXDPKLLXCLGQNLHSPDLARPRCPLPPEASPSREKPGLRESSERGPPXARSERSAARADXCREPSMELCFPEXAKXSDNSKNLLSVGRXHPDFYXQXQAMEKAWAPGGKXNHKDGPGEARPPPRDNSSLHSAGIPCEKELGKVRRGVEPKPEALLARRSLQPPGIESEKSEKLSSFPSLQKDGAKEPERKEQPLQRHPSSIPPPPLXAKDLSSPAARQHCSSPSHASGREPGAKPSXAEPSSSPQDPPKPVAAHSESSSHKPRPGPDPGPPKXKHPDRSLSSQKPSVGAXKGKEPAXQSLGGSSREGKGHSKSGPDVFPAXPGSQNKASDGIGQGEGGPSVPLHXDRAPLDAKPQPXSGGRPLEVLEKPVHLPRPGHPGPSEPADQKLSAVGEKQXLSPKHPKPSXVKDCPXLCKQXDNRQXDKSPSQPAANXDRRAEGKKCXEALYAPAEGDKLEAGLSFVHSENRLKGAERPAAGVGKGFPEARGKGPGPQKPPXEADKPNGMKRSPSAXGQSSFRSXALPEKSLSCSSSFPEXRAGVREASAASSDXSSAKAAGGMLELPAPSNRDHRKAQPAGEGRXHMXKSDSLPSFRVSXLPLESHHPDPNXMGGASHRDRALSVXAXVGEXKGKDPAPAQPPPARKQNVGRDVXKPSPAPNXDRPISLSNEKDFVVRQRRGKESLRSSPHKKAL

SEQ ID NO: 15815 - protein, 238 aa, Homo sapiens
  MOD_RES (23)..(23): Selenocysteine
  MOD_RES (47)..(47): Selenocysteine
  MOD_RES (72)..(72): Selenocysteine
  MOD_RES (172)..(172): Selenocysteine
  MOD_RES (192)..(192): Selenocysteine
  MOD_RES (211)..(211): Selenocysteine
  MOD_RES (234)..(234): Selenocysteine
MGEKVSEAPEPVPRGCSGHGSRXPASALVAASSPGASSAESSSGSEXLSEEGEPGGFSREHQPPPPPPLGGXLGARAPAAWAPASVLLERGVLALPPPLPGGAVPPAPRGSSASQEEQDEELDHILSPPPMPFRKCSNPDVASGPGKSLKYKRQLSEDGRQLRRGSLGGALXGRYLLPNPVAGQAWPASAEXSNLVRMRSQALGQSAPSLXASLKELSLPRRGSFPVCPNAGRXSPLG

SEQ ID NO: 15816 - protein, 250 aa, Homo sapiens
  MOD_RES (23)..(23): Selenocysteine
  MOD_RES (47)..(47): Selenocysteine
  MOD_RES (72)..(72): Selenocysteine
  MOD_RES (172)..(172): Selenocysteine
  MOD_RES (192)..(192): Selenocysteine
  MOD_RES (211)..(211): Selenocysteine
  MOD_RES (246)..(246): Selenocysteine
MGEKVSEAPEPVPRGCSGHGSRXPASALVAASSPGASSAESSSGSEXLSEEGEPGGFSREHQPPPPPPLGGXLGARAPAAWAPASVLLERGVLALPPPLPGGAVPPAPRGSSASQEEQDEELDHILSPPPMPFRKCSNPDVASGPGKSLKYKRQLSEDGRQLRRGSLGGALXGRYLLPNPVAGQAWPASAEXSNLVRMRSQALGQSAPSLXASLKELSLPRRGSLIDSQKWNCLVKRPVCPNAGRXSPLG

SEQ ID NO: 15817 - protein, 59 aa, Homo sapiens
  MOD_RES (14)..(14): Selenocysteine
  MOD_RES (19)..(19): Selenocysteine
MKAQRERLQIPGLXLDCRXSNRKSLIGNGQSPALPRPHSPLSAHAGNSPQDSPRNFSPS

SEQ ID NO: 15818 - protein, 2444 aa, Homo sapiens
  MOD_RES (14)..(14): Selenocysteine
  MOD_RES (18)..(18): Selenocysteine
  MOD_RES (25)..(25): Selenocysteine
  MOD_RES (46)..(46): Selenocysteine
  MOD_RES (100)..(100): Selenocysteine
  MOD_RES (117)..(117): Selenocysteine
  MOD_RES (119)..(119): Selenocysteine
  MOD_RES (123)..(123): Selenocysteine
  MOD_RES (142)..(142): Selenocysteine
  MOD_RES (155)..(156): Selenocysteine
  MOD_RES (161)..(161): Selenocysteine
  MOD_RES (168)..(168): Selenocysteine
  MOD_RES (205)..(205): Selenocysteine
  MOD_RES (217)..(217): Selenocysteine
  MOD_RES (235)..(235): Selenocysteine
  MOD_RES (256)..(256): Selenocysteine
  MOD_RES (333)..(333): Selenocysteine
  MOD_RES (363)..(363): Selenocysteine
  MOD_RES (366)..(366): Selenocysteine
  MOD_RES (369)..(369): Selenocysteine
  MOD_RES (393)..(393): Selenocysteine
  MOD_RES (444)..(444): Selenocysteine
  MOD_RES (460)..(460): Selenocysteine
  MOD_RES (478)..(478): Selenocysteine
  MOD_RES (498)..(498): Selenocysteine
  MOD_RES (523)..(523): Selenocysteine
  MOD_RES (531)..(531): Selenocysteine
  MOD_RES (544)..(545): Selenocysteine
  MOD_RES (567)..(567): Selenocysteine
  MOD_RES (608)..(608): Selenocysteine
  MOD_RES (639)..(639): Selenocysteine
  MOD_RES (652)..(652): Selenocysteine
  MOD_RES (689)..(689): Selenocysteine
  MOD_RES (694)..(694): Selenocysteine
  MOD_RES (704)..(704): Selenocysteine
  MOD_RES (710)..(710): Selenocysteine
  MOD_RES (740)..(740): Selenocysteine
  MOD_RES (754)..(754): Selenocysteine
  MOD_RES (757)..(758): Selenocysteine
  MOD_RES (762)..(762): Selenocysteine
  MOD_RES (764)..(764): Selenocysteine
  MOD_RES (779)..(779): Selenocysteine
  MOD_RES (785)..(785): Selenocysteine
  MOD_RES (804)..(804): Selenocysteine
  MOD_RES (840)..(841): Selenocysteine
  MOD_RES (845)..(845): Selenocysteine
  MOD_RES (850)..(850): Selenocysteine
  MOD_RES (873)..(873): Selenocysteine
  MOD_RES (895)..(895): Selenocysteine
  MOD_RES (905)..(905): Selenocysteine
  MOD_RES (975)..(975): Selenocysteine
  MOD_RES (990)..(990): Selenocysteine
  MOD_RES (1016)..(1016): Selenocysteine
  MOD_RES (1029)..(1029): Selenocysteine
  MOD_RES (1045)..(1047): Selenocysteine
  MOD_RES (1052)..(1052): Selenocysteine
  MOD_RES (1056)..(1056): Selenocysteine
  MOD_RES (1101)..(1101): Selenocysteine
  MOD_RES (1123)..(1123): Selenocysteine
  MOD_RES (1132)..(1132): Selenocysteine
  MOD_RES (1138)..(1138): Selenocysteine
  MOD_RES (1145)..(1145): Selenocysteine
  MOD_RES (1171)..(1171): Selenocysteine
  MOD_RES (1203)..(1203): Selenocysteine
  MOD_RES (1207)..(1207): Selenocysteine
  MOD_RES (1211)..(1211): Selenocysteine
  MOD_RES (1243)..(1243): Selenocysteine
  MOD_RES (1292)..(1292): Selenocysteine
  MOD_RES (1407)..(1407): Selenocysteine
  MOD_RES (1465)..(1465): Selenocysteine
  MOD_RES (1485)..(1485): Selenocysteine
  MOD_RES (1532)..(1532): Selenocysteine
  MOD_RES (1547)..(1547): Selenocysteine
  MOD_RES (1566)..(1566): Selenocysteine
  MOD_RES (1583)..(1583): Selenocysteine
  MOD_RES (1590)..(1590): Selenocysteine
  MOD_RES (1625)..(1625): Selenocysteine
  MOD_RES (1639)..(1639): Selenocysteine
  MOD_RES (1674)..(1675): Selenocysteine
  MOD_RES (1727)..(1727): Selenocysteine
  MOD_RES (1733)..(1733): Selenocysteine
  MOD_RES (1753)..(1754): Selenocysteine
  MOD_RES (1760)..(1760): Selenocysteine
  MOD_RES (1801)..(1801): Selenocysteine
  MOD_RES (1813)..(1813): Selenocysteine
  MOD_RES (1826)..(1826): Selenocysteine
  MOD_RES (1829)..(1829): Selenocysteine
  MOD_RES (1842)..(1842): Selenocysteine
  MOD_RES (1848)..(1848): Selenocysteine
  MOD_RES (1850)..(1850): Selenocysteine
  MOD_RES (1863)..(1863): Selenocysteine
  MOD_RES (1960)..(1960): Selenocysteine
  MOD_RES (1990)..(1990): Selenocysteine
  MOD_RES (2026)..(2026): Selenocysteine
  MOD_RES (2043)..(2043): Selenocysteine
  MOD_RES (2050)..(2050): Selenocysteine
  MOD_RES (2074)..(2074): Selenocysteine
  MOD_RES (2098)..(2098): Selenocysteine
  MOD_RES (2110)..(2110): Selenocysteine
  MOD_RES (2149)..(2149): Selenocysteine
  MOD_RES (2159)..(2159): Selenocysteine
  MOD_RES (2165)..(2165): Selenocysteine
  MOD_RES (2170)..(2170): Selenocysteine
  MOD_RES (2175)..(2175): Selenocysteine
  MOD_RES (2186)..(2186): Selenocysteine
  MOD_RES (2196)..(2196): Selenocysteine
  MOD_RES (2250)..(2250): Selenocysteine
  MOD_RES (2265)..(2265): Selenocysteine
  MOD_RES (2273)..(2273): Selenocysteine
  MOD_RES (2289)..(2289): Selenocysteine
  MOD_RES (2303)..(2303): Selenocysteine
  MOD_RES (2334)..(2334): Selenocysteine
  MOD_RES (2337)..(2337): Selenocysteine
  MOD_RES (2349)..(2349): Selenocysteine
  MOD_RES (2361)..(2361): Selenocysteine
  MOD_RES (2375)..(2375): Selenocysteine
  MOD_RES (2377)..(2377): Selenocysteine
  MOD_RES (2381)..(2381): Selenocysteine
  MOD_RES (2404)..(2404): Selenocysteine
  MOD_RES (2412)..(2412): Selenocysteine
MKAQRERLQIPGLXLDLXPRSLSPXPSSPGSPCSPLLAFHFWSCRXSNRKSLIGNGQSPALPRPHSPLSAHAGNSPQDSPRNFSPSASAHFSFARRNDRXDGRRWSLASLPSSGYGXNXPSSXVSSSCSSQEKLHQLPYQPXPDELHFLSKHFCXXESIAXENRCRNXPMRPRSRSLSPGRSPACCDHEIIMMNHVYKERFPKAXAQMEERLKEIIXSYSPDNVLPLADGVLSFXHHQIIELARDCLDKSHQGLIXSRYFLELQHKLDKLLQEAHDRSESGELAFIKQLVRKILIVIARPARLLECLEFDPEEFYYLLEAAEGHAKEGQGIKXDIPRYIISQLGLNKDPLEEMAHLGNYDSGXAEXPEXDESVSSSNASLKLRRKPRESDFEXIKLISNGAYGAVYFVRHKESRQRFAMKKINKQNLILRNQIQQAFVERDILXFAENPFVVSMYCSFEXRRHLCMVMEYVEGGDCAXLMKNMGPLPVDMARMYFAEXVLALEYLHNYGIVHRDLKPDNLLVXSMGHIKLXDFGLSKVGLMSMXXNLYEGHIEKDAREFLDKQVCGXPEYIAPEVILRQGYGKPVDWWAMGIILYEFLVGCVPFFGDXPEELFGQVISDEINWPEKDEAPPPDAQDLIXLLLRQNPLERLGXGGAYEVKQHRFFRSLDWNSLLRQKAEFIPQLESEDDXSYFDXRSEKYHHMEXEEEDDXNDEDFNVEIRQFSSCSHRFSKVFSSIDRIXQNSAEEKEDSVDKXKSXXLPSXEXLSWSSEYSEMQQLSXSNSSDXESNRHKLSSGLLPKLAISXEGEQDEAASCPGDPHEEPGKPALPPEECAQEEPEVXXPASXISSSXLSVGSFSEHLDQINGRSECVDSXDNSSKPSSEPASHMARQRLESXEKKKISGKVXKSLSASALSLMIPGDMFAVSPLGSPMSPHSLSSDPSSSRDSSPSRDSSAASASPHQPIVIHSSGKNYGFXIRAIRVYVGDSDIYXVHHIVWNVEEGSPACQAGLKAGDLIXHINGEPVHGLVHXEVIELLLKSGNKVSIXXXPFENXSIKXGPARRNSYKSRMVRRSKKSKKKESLERRRSLFKKLAKQPSPLLHXSRSFSCLNRSLSSGESLPGSPXHSLSPRSPXPSYRSXPDFPSGXNSSQSSSPSSSAPNSPAGSGHIRPSXLHGLAPKLGGQRYRSGRRKSAGNIPLSPLARXPSPXPQPXSPQRSPSPLLGHSLGNSKIAQAFPSKMHSPPXIVRHIVRPKSAEPPRSPLLKRVQSEEKLSPSYGSDKKHLCSRKHSLEVXQEEVQREQSQREAPLQSLDENVCDVPPLSRARPVEQGCLKRPVSRKVGRQESVDDLDRDKLKAKVVVKKADGFPEKQESHQKSHGPGSDLENFALFKLEEREKKVYPKAVERSSXFENKASMQEAPPLGSLLKDALHKQASVRASEGAMSDGRVPAEHRQGGGDFRRAPAPGXLQDGLCHSLDRGISGKGEGXEKSSQAKELLRCEKLDSKLANIDYLRKKMSLEDKEDNLCPVLKPKMXAGSHECLPGNPVRPXGGQQEPPPASESRAFVSSXHAAQMSAVSFVPLKALXGRVDSGXEKPGLVAPESPVRKSPSEYKLEGRSVSCLKPIEGXLDIALLSGPQASKXELPSPESAQSPSPSGDVRASVPPVLPSSSGKKNDXXSARELSPSSLKMNKSYLLEPWFLPPSRGLQNSPAVSLPDPEFKRDRKGPHPXARSPGXVMESNPQQREGSSPKHQDHXXDPKLLXCLGQNLHSPDLARPRCPLPPEASPSREKPGLRESSERGPPXARSERSAARADXCREPSMELCFPEXAKXSDNSKNLLSVGRXHPDFYXQXQAMEKAWAPGGKXNHKDGPGEARPPPRDNSSLHSAGIPCEKELGKVRRGVEPKPEALLARRSLQPPGIESEKSEKLSSFPSLQKDGAKEPERKEQPLQRHPSSIPPPPLXAKDLSSPAARQHCSSPSHASGREPGAKPSXAEPSSSPQDPPKPVAAHSESSSHKPRPGPDPGPPKXKHPDRSLSSQKPSVGAXKGKEPAXQSLGGSSREGKGHSKSGPDVFPAXPGSQNKASDGIGQGEGGPSVPLHXDRAPLDAKPQPXSGGRPLEVLEKPVHLPRPGHPGPSEPADQKLSAVGEKQXLSPKHPKPSXVKDCPXLCKQXDNRQXDKSPSQPAANXDRRAEGKKCXEALYAPAEGDKLEAGLSFVHSENRLKGAERPAAGVGKGFPEARGKGPGPQKPPXEADKPNGMKRSPSAXGQSSFRSXALPEKSLSCSSSFPEXRAGVREASAASSDXSSAKAAGGMLELPAPSNRDHRKAQPAGEGRXHMXKSDSLPSFRVSXLPLESHHPDPNXMGGASHRDRALSVXAXVGEXKGKDPAPAQPPPARKQNVGRDVXKPSPAPNXDRPISLSNEKDFVVRQRRGKESLRSSPHKKAL

SEQ ID NO: 15819 - protein, 56 aa, Homo sapiens
  MOD_RES (14)..(14): Selenocysteine
  MOD_RES (18)..(18): Selenocysteine
  MOD_RES (25)..(25): Selenocysteine
  MOD_RES (52)..(52): Selenocysteine
MKAQRERLQIPGLXLDLXPRSLSPXPSSPGSPCSPLLAFHFWSPVCPNAGRXSPLG

SEQ ID NO: 15820 - protein, 80 aa, Homo sapiens
  MOD_RES (18)..(18): Selenocysteine
  MOD_RES (49)..(49): Selenocysteine
  MOD_RES (76)..(76): Selenocysteine
NLVRMRSQALGQSAPSLXASLKELSLPRRGSLIDSQKWNCLVKRSLSPXPSSPGSPCSPLLAFHFWSPVCPNAGRXSPLG

SEQ ID NO: 15821 - protein, 122 aa, Homo sapiens
  MOD_RES (44)..(44): Selenocysteine
  MOD_RES (64)..(64): Selenocysteine
  MOD_RES (83)..(83): Selenocysteine
PPMPFRKCSNPDVASGPGKSLKYKRQLSEDGRQLRRGSLGGALXGRYLLPNPVAGQAWPASAEXSNLVRMRSQALGQSAPSLXASLKELSLPRRGSLCRSSDCDWVIDKRSERNCFLGKMLL

SEQ ID NO: 15822 - protein, 99 aa, Homo sapiens
  MOD_RES (1)..(1): Any amino acid
  MOD_RES (45)..(45): Selenocysteine
  MOD_RES (65)..(65): Selenocysteine
  MOD_RES (84)..(84): Selenocysteine
XPPMPFRKCSNPDVASGPGKSLKYKRQLSEDGRQLRRGSLGGALXGRYLLPNPVAGQAWPASAEXSNLVRMRSQALGQSAPSLXASLKELSLPRRGSFN

SEQ ID NO: 15823 - protein, 66 aa, Homo sapiens
  MOD_RES (1)..(1): Any amino acid
  MOD_RES (2)..(2): Selenocysteine
XXASLEGQPPKSHFNSARHRQRLVDPAASKKELSLPRRGSLCRSSDCDWVIDKRSERNCFLGKMLL

SEQ ID NO: 15824 - protein, 1680 aa, Homo sapiens
  MOD_RES (1)..(1): Any amino acid
  MOD_RES (7)..(7): Selenocysteine
  MOD_RES (13)..(13): Selenocysteine
  MOD_RES (43)..(43): Selenocysteine
  MOD_RES (57)..(57): Selenocysteine
  MOD_RES (60)..(61): Selenocysteine
  MOD_RES (65)..(65): Selenocysteine
  MOD_RES (67)..(67): Selenocysteine
  MOD_RES (82)..(82): Selenocysteine
  MOD_RES (88)..(88): Selenocysteine
  MOD_RES (107)..(107): Selenocysteine
  MOD_RES (143)..(144): Selenocysteine
  MOD_RES (148)..(148): Selenocysteine
  MOD_RES (153)..(153): Selenocysteine
  MOD_RES (211)..(211): Selenocysteine
  MOD_RES (226)..(226): Selenocysteine
  MOD_RES (252)..(252): Selenocysteine
  MOD_RES (265)..(265): Selenocysteine
  MOD_RES (281)..(283): Selenocysteine
  MOD_RES (288)..(288): Selenocysteine
  MOD_RES (292)..(292): Selenocysteine
  MOD_RES (337)..(337): Selenocysteine
  MOD_RES (359)..(359): Selenocysteine
  MOD_RES (368)..(368): Selenocysteine
  MOD_RES (374)..(374): Selenocysteine
  MOD_RES (381)..(381): Selenocysteine
  MOD_RES (407)..(407): Selenocysteine
  MOD_RES (439)..(439): Selenocysteine
  MOD_RES (443)..(443): Selenocysteine
  MOD_RES (447)..(447): Selenocysteine
  MOD_RES (479)..(479): Selenocysteine
  MOD_RES (528)..(528): Selenocysteine
  MOD_RES (643)..(643): Selenocysteine
  MOD_RES (701)..(701): Selenocysteine
  MOD_RES (721)..(721): Selenocysteine
  MOD_RES (768)..(768): Selenocysteine
  MOD_RES (783)..(783): Selenocysteine
  MOD_RES (802)..(802): Selenocysteine
  MOD_RES (819)..(819): Selenocysteine
  MOD_RES (826)..(826): Selenocysteine
  MOD_RES (861)..(861): Selenocysteine
  MOD_RES (875)..(875): Selenocysteine
  MOD_RES (910)..(911): Selenocysteine
  MOD_RES (963)..(963): Selenocysteine
  MOD_RES (969)..(969): Selenocysteine
  MOD_RES (989)..(990): Selenocysteine
  MOD_RES (996)..(996): Selenocysteine
  MOD_RES (1037)..(1037): Selenocysteine
  MOD_RES (1049)..(1049): Selenocysteine
  MOD_RES (1062)..(1062): Selenocysteine
  MOD_RES (1065)..(1065): Selenocysteine
  MOD_RES (1078)..(1078): Selenocysteine
  MOD_RES (1084)..(1084): Selenocysteine
  MOD_RES (1086)..(1086): Selenocysteine
  MOD_RES (1099)..(1099): Selenocysteine
  MOD_RES (1196)..(1196): Selenocysteine
  MOD_RES (1226)..(1226): Selenocysteine
  MOD_RES (1262)..(1262): Selenocysteine
  MOD_RES (1279)..(1279): Selenocysteine
  MOD_RES (1286)..(1286): Selenocysteine
  MOD_RES (1310)..(1310): Selenocysteine
  MOD_RES (1334)..(1334): Selenocysteine
  MOD_RES (1346)..(1346): Selenocysteine
  MOD_RES (1385)..(1385): Selenocysteine
  MOD_RES (1395)..(1395): Selenocysteine
  MOD_RES (1401)..(1401): Selenocysteine
  MOD_RES (1406)..(1406): Selenocysteine
  MOD_RES (1411)..(1411): Selenocysteine
  MOD_RES (1422)..(1422): Selenocysteine
  MOD_RES (1432)..(1432): Selenocysteine
  MOD_RES (1486)..(1486): Selenocysteine
  MOD_RES (1501)..(1501): Selenocysteine
  MOD_RES (1509)..(1509): Selenocysteine
  MOD_RES (1525)..(1525): Selenocysteine
  MOD_RES (1539)..(1539): Selenocysteine
  MOD_RES (1570)..(1570): Selenocysteine
  MOD_RES (1573)..(1573): Selenocysteine
  MOD_RES (1585)..(1585): Selenocysteine
  MOD_RES (1597)..(1597): Selenocysteine
  MOD_RES (1611)..(1611): Selenocysteine
  MOD_RES (1613)..(1613): Selenocysteine
  MOD_RES (1617)..(1617): Selenocysteine
  MOD_RES (1640)..(1640): Selenocysteine
  MOD_RES (1648)..(1648): Selenocysteine
XYHHMEXEEEDDXNDEDFNVEIRQFSSCSHRFSKVFSSIDRIXQNSAEEKEDSVDKXKSXXLPSXEXLSWSSEYSEMQQLSXSNSSDXESNRHKLSSGLLPKLAISXEGEQDEAASCPGDPHEEPGKPALPPEECAQEEPEVXXPASXISSSXLSDMFAVSPLGSPMSPHSLSSDPSSSRDSSPSRDSSAASASPHQPIVIHSSGKNYGFXIRAIRVYVGDSDIYXVHHIVWNVEEGSPACQAGLKAGDLIXHINGEPVHGLVHXEVIELLLKSGNKVSIXXXPFENXSIKXGPARRNSYKSRMVRRSKKSKKKESLERRRSLFKKLAKQPSPLLHXSRSFSCLNRSLSSGESLPGSPXHSLSPRSPXPSYRSXPDFPSGXNSSQSSSPSSSAPNSPAGSGHIRPSXLHGLAPKLGGQRYRSGRRKSAGNIPLSPLARXPSPXPQPXSPQRSPSPLLGHSLGNSKIAQAFPSKMHSPPXIVRHIVRPKSAEPPRSPLLKRVQSEEKLSPSYGSDKKHLCSRKHSLEVXQEEVQREQSQREAPLQSLDENVCDVPPLSRARPVEQGCLKRPVSRKVGRQESVDDLDRDKLKAKVVVKKADGFPEKQESHQKSHGPGSDLENFALFKLEEREKKVYPKAVERSSXFENKASMQEAPPLGSLLKDALHKQASVRASEGAMSDGRVPAEHRQGGGDFRRAPAPGXLQDGLCHSLDRGISGKGEGXEKSSQAKELLRCEKLDSKLANIDYLRKKMSLEDKEDNLCPVLKPKMXAGSHECLPGNPVRPXGGQQEPPPASESRAFVSSXHAAQMSAVSFVPLKALXGRVDSGXEKPGLVAPESPVRKSPSEYKLEGRSVSCLKPIEGXLDIALLSGPQASKXELPSPESAQSPSPSGDVRASVPPVLPSSSGKKNDXXSARELSPSSLKMNKSYLLEPWFLPPSRGLQNSPAVSLPDPEFKRDRKGPHPXARSPGXVMESNPQQREGSSPKHQDHXXDPKLLXCLGQNLHSPDLARPRCPLPPEASPSREKPGLRESSERGPPXARSERSAARADXCREPSMELCFPEXAKXSDNSKNLLSVGRXHPDFYXQXQAMEKAWAPGGKXNHKDGPGEARPPPRDNSSLHSAGIPCEKELGKVRRGVEPKPEALLARRSLQPPGIESEKSEKLSSFPSLQKDGAKEPERKEQPLQRHPSSIPPPPLXAKDLSSPAARQHCSSPSHASGREPGAKPSXAEPSSSPQDPPKPVAAHSESSSHKPRPGPDPGPPKXKHPDRSLSSQKPSVGAXKGKEPAXQSLGGSSREGKGHSKSGPDVFPAXPGSQNKASDGIGQGEGGPSVPLHXDRAPLDAKPQPXSGGRPLEVLEKPVHLPRPGHPGPSEPADQKLSAVGEKQXLSPKHPKPSXVKDCPXLCKQXDNRQXDKSPSQPAANXDRRAEGKKCXEALYAPAEGDKLEAGLSFVHSENRLKGAERPAAGVGKGFPEARGKGPGPQKPPXEADKPNGMKRSPSAXGQSSFRSXALPEKSLSCSSSFPEXRAGVREASAASSDXSSAKAAGGMLELPAPSNRDHRKAQPAGEGRXHMXKSDSLPSFRVSXLPLESHHPDPNXMGGASHRDRALSVXAXVGEXKGKDPAPAQPPPARKQNVGRDVXKPSPAPNXDRPISLSNEKDFVVRQRRGKESLRSSPHKKAL

SEQ ID NO: 15825 - protein, 479 aa, Homo sapiens
  MOD_RES (9)..(9): Selenocysteine
  MOD_RES (29)..(29): Selenocysteine
  MOD_RES (52)..(53): Selenocysteine
  MOD_RES (85)..(85): Selenocysteine
  MOD_RES (87)..(87): Selenocysteine
  MOD_RES (136)..(136): Selenocysteine
  MOD_RES (146)..(146): Selenocysteine
  MOD_RES (150)..(150): Selenocysteine
  MOD_RES (154)..(154): Selenocysteine
  MOD_RES (157)..(157): Selenocysteine
  MOD_RES (186)..(186): Selenocysteine
  MOD_RES (191)..(191): Selenocysteine
  MOD_RES (283)..(283): Selenocysteine
  MOD_RES (290)..(290): Selenocysteine
  MOD_RES (317)..(317): Selenocysteine
  MOD_RES (348)..(348): Selenocysteine
  MOD_RES (368)..(368): Selenocysteine
  MOD_RES (370)..(370): Selenocysteine
  MOD_RES (382)..(382): Selenocysteine
  MOD_RES (390)..(390): Selenocysteine
  MOD_RES (394)..(394): Selenocysteine
  MOD_RES (413)..(413): Selenocysteine
  MOD_RES (447)..(447): Selenocysteine
  MOD_RES (458)..(458): Selenocysteine
  MOD_RES (460)..(460): Selenocysteine
  MOD_RES (468)..(468): Selenocysteine
  MOD_RES (473)..(473): Selenocysteine
ESDEALGPXMMSWNAVEKLCAKSANAIEXKGFNKKDLELALSPIHNSSALPXXGRSCVNLAKKCFSGEVSWEAVELDVNNINMDXDXSQLGFHQSNQWAVDSGGISEEHLGKRSLKRNFELVDSSPCKKIIQNKKXCVEYKHNEMXNCYXNQNXGLXVEVQDLKLSVHKSQQNDCANKENIVNSFXDKQQXPEKLPIPMIAKNLMCELDEDCEKNSKRDYLSSSFLCSDDDRASKNISMNSDSSFPGISIMESPLESQPLDSDRSIKESSFEESNIEDPLIVXPDCQEKXSPKGVENPAVQESNQKMLGPPLEVLKXLASKRNAVAFRSFNSHINASNNSEPSRMNMXSLDAMDISCAYSGSYPMAIXPXQKRRSCMPHQQXPNQIKSGXPYRXPKSVRRGVAPVDDGRILGXPDYLAPELLLGRAHELKRHPLFSDVDWENLQHQXMPFIPQPDDEXDXSYFEARNXAQHLXVSGFSL

SEQ ID NO: 15826 - protein, 840 aa, Homo sapiens
  MOD_RES (4)..(4): Selenocysteine
  MOD_RES (17)..(17): Selenocysteine
  MOD_RES (75)..(75): Selenocysteine
  MOD_RES (173)..(173): Selenocysteine
  MOD_RES (181)..(181): Selenocysteine
  MOD_RES (193)..(194): Selenocysteine
  MOD_RES (207)..(207): Selenocysteine
  MOD_RES (222)..(222): Selenocysteine
  MOD_RES (242)..(242): Selenocysteine
  MOD_RES (260)..(261): Selenocysteine
  MOD_RES (274)..(274): Selenocysteine
  MOD_RES (287)..(287): Selenocysteine
  MOD_RES (299)..(299): Selenocysteine
  MOD_RES (308)..(308): Selenocysteine
  MOD_RES (337)..(337): Selenocysteine
  MOD_RES (357)..(357): Selenocysteine
  MOD_RES (380)..(381): Selenocysteine
  MOD_RES (413)..(413): Selenocysteine
  MOD_RES (415)..(415): Selenocysteine
  MOD_RES (464)..(464): Selenocysteine
  MOD_RES (474)..(474): Selenocysteine
  MOD_RES (478)..(478): Selenocysteine
  MOD_RES (482)..(482): Selenocysteine
  MOD_RES (485)..(485): Selenocysteine
  MOD_RES (514)..(514): Selenocysteine
  MOD_RES (519)..(519): Selenocysteine
  MOD_RES (611)..(611): Selenocysteine
  MOD_RES (618)..(618): Selenocysteine
  MOD_RES (645)..(645): Selenocysteine
  MOD_RES (676)..(676): Selenocysteine
  MOD_RES (696)..(696): Selenocysteine
  MOD_RES (698)..(698): Selenocysteine
  MOD_RES (709)..(709): Selenocysteine
  MOD_RES (717)..(717): Selenocysteine
  MOD_RES (721)..(721): Selenocysteine
  MOD_RES (740)..(740): Selenocysteine
  MOD_RES (778)..(778): Selenocysteine
  MOD_RES (782)..(782): Selenocysteine
  MOD_RES (808)..(808): Selenocysteine
  MOD_RES (819)..(819): Selenocysteine
  MOD_RES (821)..(821): Selenocysteine
  MOD_RES (829)..(829): Selenocysteine
  MOD_RES (834)..(834): Selenocysteine
MDPXAGSKKEPGGGAAXEEGVNRIAVPKPPSIEEFSIVKPISRGAFGKVYLGQKGGKLYAVKVVKKADMINKNMXHQVQAERDALALSKSPFIVHLYYSLQSANNVYLVMEYLIGGDVKSLLHIYGYFDEEMAVKYISEVALALDYLHRHGIIHRDLKPDNMLISNEGHIKLXDFGLSKVXLNRDINMMDILXXPSMAKPRQDYSRXPGQVLSLISSLGFNXPIAEKNQDPANILSACLSEXSQLSQGLVCPMSVDQKDXXPYSSKLLKSCLEXVASNPGMPVKCLXSNLLQSRKRLAXSSASSQSHXFISSVESECHSSPKWEKDCQESDEALGPXMMSWNAVEKLCAKSANAIEXKGFNKKDLELALSPIHNSSALPXXGRSCVNLAKKCFSGEVSWEAVELDVNNINMDXDXSQLGFHQSNQWAVDSGGISEEHLGKRSLKRNFELVDSSPCKKIIQNKKXCVEYKHNEMXNCYXNQNXGLXVEVQDLKLSVHKSQQNDCANKENIVNSFXDKQQXPEKLPIPMIAKNLMCELDEDCEKNSKRDYLSSSFLCSDDDRASKNISMNSDSSFPGISIMESPLESQPLDSDRSIKESSFEESNIEDPLIVXPDCQEKXSPKGVENPAVQESNQKMLGPPLEVLKXLASKRNAVAFRSFNSHINASNNSEPSRMNMXSLDAMDISCAYSGSYPMAIXPXQKRRSCMPHQXPNQIKSGXPYRXPKSVRRGVAPVDDGRILGXPDYLAPELLLGRAHDIPWPEGEEKLSDNAQSAVEILLXIDDXKRAGMKELKRHPLFSDVDWENLQHQXMPFIPQPDDEXDXSYFEARNXAQHLXVSGFSL

SEQ ID NO: 15827 - protein, 878 aa, Homo sapiens
  MOD_RES (4)..(4): Selenocysteine
  MOD_RES (17)..(17): Selenocysteine
  MOD_RES (75)..(75): Selenocysteine
  MOD_RES (173)..(173): Selenocysteine
  MOD_RES (181)..(181): Selenocysteine
  MOD_RES (193)..(194): Selenocysteine
  MOD_RES (207)..(207): Selenocysteine
  MOD_RES (222)..(222): Selenocysteine
  MOD_RES (242)..(242): Selenocysteine
  MOD_RES (260)..(261): Selenocysteine
  MOD_RES (274)..(274): Selenocysteine
  MOD_RES (287)..(287): Selenocysteine
  MOD_RES (299)..(299): Selenocysteine
  MOD_RES (308)..(308): Selenocysteine
  MOD_RES (337)..(337): Selenocysteine
  MOD_RES (357)..(357): Selenocysteine
  MOD_RES (380)..(381): Selenocysteine
  MOD_RES (413)..(413): Selenocysteine
  MOD_RES (415)..(415): Selenocysteine
  MOD_RES (464)..(464): Selenocysteine
  MOD_RES (474)..(474): Selenocysteine
  MOD_RES (478)..(478): Selenocysteine
  MOD_RES (482)..(482): Selenocysteine
  MOD_RES (485)..(485): Selenocysteine
  MOD_RES (514)..(514): Selenocysteine
  MOD_RES (519)..(519): Selenocysteine
  MOD_RES (611)..(611): Selenocysteine
  MOD_RES (618)..(618): Selenocysteine
  MOD_RES (645)..(645): Selenocysteine
  MOD_RES (676)..(676): Selenocysteine
  MOD_RES (696)..(696): Selenocysteine
  MOD_RES (698)..(698): Selenocysteine
  MOD_RES (709)..(709): Selenocysteine
  MOD_RES (717)..(717): Selenocysteine
  MOD_RES (721)..(721): Selenocysteine
  MOD_RES (740)..(740): Selenocysteine
  MOD_RES (772)..(772): Selenocysteine
  MOD_RES (781)..(781): Selenocysteine
  MOD_RES (816)..(816): Selenocysteine
  MOD_RES (820)..(820): Selenocysteine
  MOD_RES (846)..(846): Selenocysteine
  MOD_RES (857)..(857): Selenocysteine
  MOD_RES (859)..(859): Selenocysteine
  MOD_RES (867)..(867): Selenocysteine
  MOD_RES (872)..(872): Selenocysteine
MDPXAGSKKEPGGGAAXEEGVNRIAVPKPPSIEEFSIVKPISRGAFGKVYLGQKGGKLYAVKVVKKADMINKNMXHQVQAERDALALSKSPFIVHLYYSLQSANNVYLVMEYLIGGDVKSLLHIYGYFDEEMAVKYISEVALALDYLHRHGIIHRDLKPDNMLISNEGHIKLXDFGLSKVXLNRDINMMDILXXPSMAKPRQDYSRXPGQVLSLISSLGFNXPIAEKNQDPANILSACLSEXSQLSQGLVCPMSVDQKDXXPYSSKLLKSCLEXVASNPGMPVKCLXSNLLQSRKRLAXSSASSQSHXFISSVESECHSSPKWEKDCQESDEALGPXMMSWNAVEKLCAKSANAIEXKGFNKKDLELALSPIHNSSALPXXGRSCVNLAKKCFSGEVSWEAVELDVNNINMDXDXSQLGFHQSNQWAVDSGGISEEHLGKRSLKRNFELVDSSPCKKIIQNKKXCVEYKHNEMXNCYXNQNXGLXVEVQDLKLSVHKSQQNDCANKENIVNSFXDKQQXPEKLPIPMIAKNLMCELDEDCEKNSKRDYLSSSFLCSDDDRASKNISMNSDSSFPGISIMESPLESQPLDSDRSIKESSFEESNIEDPLIVXPDCQEKXSPKGVENPAVQESNQKMLGPPLEVLKXLASKRNAVAFRSFNSHINASNNSEPSRMNMXSLDAMDISCAYSGSYPMAIXPXQKRRSCMPHQXPNQIKSGXPYRXPKSVRRGVAPVDDGRILGXPDYLAPELLLGRAHGPAVDWWALGVCLFEFLXGIPPFNDEXPQQVFQNILKRDIPWPEGEEKLSDNAQSAVEILLXIDDXKRAGMKELKRHPLFSDVDWENLQHQXMPFIPQPDDEXDXSYFEARNXAQHLXVSGFSL

SEQ ID NO: 15828 - protein, 879 aa, Homo sapiens
  MOD_RES (4)..(4): Selenocysteine
  MOD_RES (17)..(17): Selenocysteine
  MOD_RES (75)..(75): Selenocysteine
  MOD_RES (173)..(173): Selenocysteine
  MOD_RES (181)..(181): Selenocysteine
  MOD_RES (193)..(194): Selenocysteine
  MOD_RES (207)..(207): Selenocysteine
  MOD_RES (222)..(222): Selenocysteine
  MOD_RES (242)..(242): Selenocysteine
  MOD_RES (260)..(261): Selenocysteine
  MOD_RES (274)..(274): Selenocysteine
  MOD_RES (287)..(287): Selenocysteine
  MOD_RES (299)..(299): Selenocysteine
  MOD_RES (308)..(308): Selenocysteine
  MOD_RES (337)..(337): Selenocysteine
  MOD_RES (357)..(357): Selenocysteine
  MOD_RES (380)..(381): Selenocysteine
  MOD_RES (413)..(413): Selenocysteine
  MOD_RES (415)..(415): Selenocysteine
  MOD_RES (464)..(464): Selenocysteine
  MOD_RES (474)..(474): Selenocysteine
  MOD_RES (478)..(478): Selenocysteine
  MOD_RES (482)..(482): Selenocysteine
  MOD_RES (485)..(485): Selenocysteine
  MOD_RES (514)..(514): Selenocysteine
  MOD_RES (519)..(519): Selenocysteine
  MOD_RES (611)..(611): Selenocysteine
  MOD_RES (618)..(618): Selenocysteine
  MOD_RES (645)..(645): Selenocysteine
  MOD_RES (676)..(676): Selenocysteine
  MOD_RES (696)..(696): Selenocysteine
  MOD_RES (698)..(698): Selenocysteine
  MOD_RES (710)..(710): Selenocysteine
  MOD_RES (718)..(718): Selenocysteine
  MOD_RES (722)..(722): Selenocysteine
  MOD_RES (741)..(741): Selenocysteine
  MOD_RES (773)..(773): Selenocysteine
  MOD_RES (782)..(782): Selenocysteine
  MOD_RES (817)..(817): Selenocysteine
  MOD_RES (821)..(821): Selenocysteine
  MOD_RES (847)..(847): Selenocysteine
  MOD_RES (858)..(858): Selenocysteine
  MOD_RES (860)..(860): Selenocysteine
  MOD_RES (868)..(868): Selenocysteine
  MOD_RES (873)..(873): Selenocysteine
MDPXAGSKKEPGGGAAXEEGVNRIAVPKPPSIEEFSIVKPISRGAFGKVYLGQKGGKLYAVKVVKKADMINKNMXHQVQAERDALALSKSPFIVHLYYSLQSANNVYLVMEYLIGGDVKSLLHIYGYFDEEMAVKYISEVALALDYLHRHGIIHRDLKPDNMLISNEGHIKLXDFGLSKVXLNRDINMMDILXXPSMAKPRQDYSRXPGQVLSLISSLGFNXPIAEKNQDPANILSACLSEXSQLSQGLVCPMSVDQKDXXPYSSKLLKSCLEXVASNPGMPVKCLXSNLLQSRKRLAXSSASSQSHXFISSVESECHSSPKWEKDCQESDEALGPXMMSWNAVEKLCAKSANAIEXKGFNKKDLELALSPIHNSSALPXXGRSCVNLAKKCFSGEVSWEAVELDVNNINMDXDXSQLGFHQSNQWAVDSGGISEEHLGKRSLKRNFELVDSSPCKKIIQNKKXCVEYKHNEMXNCYXNQNXGLXVEVQDLKLSVHKSQQNDCANKENIVNSFXDKQQXPEKLPIPMIAKNLMCELDEDCEKNSKRDYLSSSFLCSDDDRASKNISMNSDSSFPGISIMESPLESQPLDSDRSIKESSFEESNIEDPLIVXPDCQEKXSPKGVENPAVQESNQKMLGPPLEVLKXLASKRNAVAFRSFNSHINASNNSEPSRMNMXSLDAMDISCAYSGSYPMAIXPXQKRRSCMPHQQXPNQIKSGXPYRXPKSVRRGVAPVDDGRILGXPDYLAPELLLGRAHGPAVDWWALGVCLFEFLXGIPPFNDEXPQQVFQNILKRDIPWPEGEEKLSDNAQSAVEILLXIDDXKRAGMKELKRHPLFSDVDWENLQHQXMPFIPQPDDEXDXSYFEARNXAQHLXVSGFSL

SEQ ID NO: 15829 - protein, 13 aa, Homo sapiens
MAGRGSLVSWRAF

SEQ ID NO: 15830 - protein, 174 aa, Homo sapiens
  MOD_RES (44)..(44): Selenocysteine
  MOD_RES (51)..(51): Selenocysteine
  MOD_RES (55)..(55): Selenocysteine
  MOD_RES (60)..(60): Selenocysteine
  MOD_RES (76)..(76): Selenocysteine
  MOD_RES (93)..(93): Selenocysteine
MAGRGSLVSWRAFHGCDSAEELPRVSPRFLRAWHPPPVSARMPXRRWAPGXQCIXKCEHXRPKPGELAFRKGDVVXILEACENKSWYRVKHHXSGQEGLLAAGALREREALSADPKLSLMPWFHGKISGQEAVQQLQPPEDGLFLVRESARHPGDYVLCVSFGRDVIHYRVLHR

SEQ ID NO: 15831 - protein, 506 aa, Homo sapiens
  MOD_RES (44)..(44): Selenocysteine
  MOD_RES (51)..(51): Selenocysteine
  MOD_RES (55)..(55): Selenocysteine
  MOD_RES (60)..(60): Selenocysteine
  MOD_RES (76)..(76): Selenocysteine
  MOD_RES (93)..(93): Selenocysteine
  MOD_RES (179)..(179): Selenocysteine
  MOD_RES (205)..(205): Selenocysteine
  MOD_RES (216)..(216): Selenocysteine
  MOD_RES (236)..(236): Selenocysteine
  MOD_RES (269)..(269): Selenocysteine
  MOD_RES (277)..(277): Selenocysteine
  MOD_RES (281)..(281): Selenocysteine
  MOD_RES (318)..(318): Selenocysteine
  MOD_RES (326)..(326): Selenocysteine
  MOD_RES (391)..(391): Selenocysteine
  MOD_RES (401)..(401): Selenocysteine
  MOD_RES (499)..(499): Selenocysteine
MAGRGSLVSWRAFHGCDSAEELPRVSPRFLRAWHPPPVSARMPXRRWAPGXQCIXKCEHXRPKPGELAFRKGDVVXILEACENKSWYRVKHHXSGQEGLLAAGALREREALSADPKLSLMPWFHGKISGQEAVQQLQPPEDGLFLVRESARHPGDYVLCVSFGRDVIHYRVLHRDGHLXIDEAVFFCNLMDMVEHYSKDKGAICXKLVRPKRKHGXKSAEEELARAGWLLNLQHLXLGAQIGEGEFGAVLQGEYLGQKVAVKNIKCDVXAQAFLDEXAVMXKMQHENLVRLLGVILHQGLYIVMEHVSKGNLVNFLRXRGRALVNXAQLLQFSLHVAEGMEYLESKKLVHRDLAARNILVSEDLVAKVSDFGLAKAERKGLDSSRLPVKWXAPEALKHGFXSKSDVWSFGVLLWEVFSYGRAPYPKMSLKEVSEAVEKGYRMEPPEGCPGPVHVLMSSCWEAEPARRPPFRKLAEKLARELRSAGAPASVSGQDADGSXSPRSQEP

SEQ ID NO: 15832 - protein, 507 aa, Homo sapiens
  MOD_RES (44)..(44): Selenocysteine
  MOD_RES (51)..(51): Selenocysteine
  MOD_RES (55)..(55): Selenocysteine
  MOD_RES (60)..(60): Selenocysteine
  MOD_RES (76)..(76): Selenocysteine
  MOD_RES (93)..(93): Selenocysteine
  MOD_RES (179)..(179): Selenocysteine
  MOD_RES (205)..(205): Selenocysteine
  MOD_RES (216)..(216): Selenocysteine
  MOD_RES (236)..(236): Selenocysteine
  MOD_RES (269)..(269): Selenocysteine
  MOD_RES (277)..(277): Selenocysteine
  MOD_RES (281)..(281): Selenocysteine
  MOD_RES (318)..(318): Selenocysteine
  MOD_RES (326)..(326): Selenocysteine
  MOD_RES (391)..(391): Selenocysteine
  MOD_RES (402)..(402): Selenocysteine
  MOD_RES (500)..(500): Selenocysteine
MAGRGSLVSWRAFHGCDSAEELPRVSPRFLRAWHPPPVSARMPXRRWAPGXQCIXKCEHXRPKPGELAFRKGDVVXILEACENKSWYRVKHHXSGQEGLLAAGALREREALSADPKLSLMPWFHGKISGQEAVQQLQPPEDGLFLVRESARHPGDYVLCVSFGRDVIHYRVLHRDGHLXIDEAVFFCNLMDMVEHYSKDKGAICXKLVRPKRKHGXKSAEEELARAGWLLNLQHLXLGAQIGEGEFGAVLQGEYLGQKVAVKNIKCDVXAQAFLDEXAVMXKMQHENLVRLLGVILHQGLYIVMEHVSKGNLVNFLRXRGRALVNXAQLLQFSLHVAEGMEYLESKKLVHRDLAARNILVSEDLVAKVSDFGLAKAERKGLDSSRLPVKWXAPEALKHGKFXSKSDVWSFGVLLWEVFSYGRAPYPKMSLKEVSEAVEKGYRMEPPEGCPGPVHVLMSSCWEAEPARRPPFRKLAEKLARELRSAGAPASVSGQDADGSXSPRSQEP

SEQ ID NO: 15833 - protein, 84 aa, Homo sapiens
  MOD_RES (3)..(3): Selenocysteine
  MOD_RES (10)..(10): Selenocysteine
  MOD_RES (14)..(14): Selenocysteine
  MOD_RES (19)..(19): Selenocysteine
  MOD_RES (35)..(35): Selenocysteine
  MOD_RES (52)..(52): Selenocysteine
MPXRRWAPGXQCIXKCEHXRPKPGELAFRKGDVVXILEACENKSWYRVKHHXSGQEGLLAAGALREREALSADPKLSLMPWFHG

SEQ ID NO: 15834 - protein, 466 aa, Homo sapiens
  MOD_RES (3)..(3): Selenocysteine
  MOD_RES (10)..(10): Selenocysteine
  MOD_RES (14)..(14): Selenocysteine
  MOD_RES (19)..(19): Selenocysteine
  MOD_RES (35)..(35): Selenocysteine
  MOD_RES (52)..(52): Selenocysteine
  MOD_RES (138)..(138): Selenocysteine
  MOD_RES (164)..(164): Selenocysteine
  MOD_RES (175)..(175): Selenocysteine
  MOD_RES (195)..(195): Selenocysteine
  MOD_RES (228)..(228): Selenocysteine
  MOD_RES (236)..(236): Selenocysteine
  MOD_RES (240)..(240): Selenocysteine
  MOD_RES (277)..(277): Selenocysteine
  MOD_RES (285)..(285): Selenocysteine
  MOD_RES (350)..(350): Selenocysteine
  MOD_RES (361)..(361): Selenocysteine
  MOD_RES (459)..(459): Selenocysteine
MPXRRWAPGXQCIXKCEHXRPKPGELAFRKGDVVXILEACENKSWYRVKHHXSGQEGLLAAGALREREALSADPKLSLMPWFHGKISGQEAVQQLQPPEDGLFLVRESARHPGDYVLCVSFGRDVIHYRVLHRDGHLXIDEAVFFCNLMDMVEHYSKDKGAICXKLVRPKRKHGXKSAEEELARAGWLLNLQHLXLGAQIGEGEFGAVLQGEYLGQKVAVKNIKCDVXAQAFLDEXAVMXKMQHENLVRLLGVILHQGLYIVMEHVSKGNLVNFLRXRGRALVNXAQLLQFSLHVAEGMEYLESKKLVHRDLAARNILVSEDLVAKVSDFGLAKAERKGLDSSRLPVKWXAPEALKHGKFXSKSDVWSFGVLLWEVFSYGRAPYPKMSLKEVSEAVEKGYRMEPPEGCPGPVHVLMSSCWEAEPARRPPFRKLAEKLARELRSAGAPASVSGQDADGSXSPRSQEP

SEQ ID NO: 15835 - protein, 131 aa, Homo sapiens
  MOD_RES (60)..(60): Selenocysteine
  MOD_RES (86)..(86): Selenocysteine
  MOD_RES (97)..(97): Selenocysteine
  MOD_RES (117)..(117): Selenocysteine
MPWFHGKISGQEAVQQLQPPEDGLFLVRESARHPGDYVLCVSFGRDVIHYRVLHRDGHLXIDEAVFFCNLMDMVEHYSKDKGAICXKLVRPKRKHGXKSAEEELARAGWLLNLQHLXLGAQIGEGEFGAVL

SEQ ID NO: 15836 - protein, 38 aa, Homo sapiens
  MOD_RES (18)..(18): Selenocysteine
  MOD_RES (27)..(27): Selenocysteine
  MOD_RES (30)..(30): Selenocysteine
MQGHFPAERREGRPRRGXRGQQQLLKXGRXRLGPVAPS

SEQ ID NO: 15837 - protein, 508 aa, Homo sapiens
  MOD_RES (18)..(18): Selenocysteine
  MOD_RES (45)..(45): Selenocysteine
  MOD_RES (52)..(52): Selenocysteine
  MOD_RES (56)..(56): Selenocysteine
  MOD_RES (61)..(61): Selenocysteine
  MOD_RES (77)..(77): Selenocysteine
  MOD_RES (94)..(94): Selenocysteine
  MOD_RES (180)..(180): Selenocysteine
  MOD_RES (206)..(206): Selenocysteine
  MOD_RES (217)..(217): Selenocysteine
  MOD_RES (237)..(237): Selenocysteine
  MOD_RES (270)..(270): Selenocysteine
  MOD_RES (278)..(278): Selenocysteine
  MOD_RES (282)..(282): Selenocysteine
  MOD_RES (319)..(319): Selenocysteine
  MOD_RES (327)..(327): Selenocysteine
  MOD_RES (392)..(392): Selenocysteine
  MOD_RES (403)..(403): Selenocysteine
  MOD_RES (501)..(501): Selenocysteine
MQGHFPAERREGRPRRGXRGQQQLLVSPRFLRAWHPPPVSARMPXRRWAPGXQCIXKCEHXRPKPGELAFRKGDVVXILEACENKSWYRVKHHXSGQEGLLAAGALREREALSADPKLSLMPWFHGKISGQEAVQQLQPPEDGLFLVRESARHPGDYVLCVSFGRDVIHYRVLHRDGHLXIDEAVFFCNLMDMVEHYSKDKGAICXKLVRPKRKHGXKSAEEELARAGWLLNLQHLXLGAQIGEGEFGAVLQGEYLGQKVAVKNIKCDVXAQAFLDEXAVMXKMQHENLVRLLGVILHQGLYIVMEHVSKGNLVNFLRXRGRALVNXAQLLQFSLHVAEGMEYLESKKLVHRDLAARNILVSEDLVAKVSDFGLAKAERKGLDSSRLPVKWXAPEALKHGKFXSKSDVWSFGVLLWEVFSYGRAPYPKMSLKEVSEAVEKGYRMEPPEGCPGPVHVLMSSCWEAEPARRPPFRKLAEKLARELRSAGAPASVSGQDADGSXSPRSQEP

SEQ ID NO: 15838 - protein, 267 aa, Homo sapiens
  MOD_RES (68)..(68): Selenocysteine
  MOD_RES (90)..(90): Selenocysteine
  MOD_RES (106)..(106): Selenocysteine
  MOD_RES (120)..(120): Selenocysteine
  MOD_RES (131)..(131): Selenocysteine
  MOD_RES (151)..(151): Selenocysteine
  MOD_RES (184)..(184): Selenocysteine
  MOD_RES (192)..(192): Selenocysteine
  MOD_RES (196)..(196): Selenocysteine
  MOD_RES (233)..(233): Selenocysteine
  MOD_RES (241)..(241): Selenocysteine
SADPKLSLMPWFHGKISGQEAVQQLQPPEDGLFLVRESARHPGDYVLCVSFGRDVIHYRVLHRDGHLXIDEAVFFCNLMDMVERPPGNGXGCWGSPPWGWAHGCPXILQHYSKDKGAICXKLVRPKRKHGXKSAEEELARAGWLLNLQHLXLGAQIGEGEFGAVLQGEYLGQKVAVKNIKCDVXAQAFLDEXAVMXKMQHENLVRLLGVILHQGLYIVMEHVSKGNLVNFLRXRGRALVNXAQLLQFSLHVAEGMEYLESKKLVHRD

SEQ ID NO: 15839 - protein, 237 aa, Homo sapiens
  MOD_RES (20)..(20): Selenocysteine
  MOD_RES (42)..(42): Selenocysteine
  MOD_RES (58)..(58): Selenocysteine
  MOD_RES (72)..(72): Selenocysteine
  MOD_RES (83)..(83): Selenocysteine
  MOD_RES (102)..(102): Selenocysteine
  MOD_RES (118)..(118): Selenocysteine
  MOD_RES (143)..(143): Selenocysteine
  MOD_RES (176)..(176): Selenocysteine
  MOD_RES (184)..(184): Selenocysteine
  MOD_RES (188)..(188): Selenocysteine
  MOD_RES (225)..(225): Selenocysteine
  MOD_RES (233)..(233): Selenocysteine
VSFGRDVIHYRVLHRDGHLXIDEAVFFCNLMDMVERPPGNGXGCWGSPPWGWAHGCPXILQHYSKDKGAICXKLVRPKRKHGXKSAEEELARGPQLRHSSVXIIHHLSQKPGPEPPPXPSSSIPSLARFPRPAGWLLNLQHLXLGAQIGEGEFGAVLQGEYLGQKVAVKNIKCDVXAQAFLDEXAVMXKMQHENLVRLLGVILHQGLYIVMEHVSKGNLVNFLRXRGRALVNXAQLL

SEQ ID NO: 15840 - protein, 540 aa, Homo sapiens
  MOD_RES (8)..(8): Selenocysteine
  MOD_RES (35)..(35): Selenocysteine
  MOD_RES (45)..(45): Selenocysteine
  MOD_RES (47)..(47): Selenocysteine
  MOD_RES (54)..(54): Selenocysteine
  MOD_RES (61)..(61): Selenocysteine
  MOD_RES (99)..(99): Selenocysteine
  MOD_RES (121)..(121): Selenocysteine
  MOD_RES (147)..(147): Selenocysteine
  MOD_RES (163)..(163): Selenocysteine
  MOD_RES (191)..(191): Selenocysteine
  MOD_RES (200)..(200): Selenocysteine
  MOD_RES (205)..(205): Selenocysteine
  MOD_RES (207)..(207): Selenocysteine
  MOD_RES (211)..(211): Selenocysteine
  MOD_RES (215)..(215): Selenocysteine
  MOD_RES (234)..(234): Selenocysteine
  MOD_RES (244)..(244): Selenocysteine
  MOD_RES (250)..(250): Selenocysteine
  MOD_RES (252)..(252): Selenocysteine
  MOD_RES (300)..(301): Selenocysteine
  MOD_RES (307)..(307): Selenocysteine
  MOD_RES (321)..(321): Selenocysteine
  MOD_RES (328)..(328): Selenocysteine
  MOD_RES (342)..(342): Selenocysteine
  MOD_RES (354)..(354): Selenocysteine
  MOD_RES (365)..(365): Selenocysteine
  MOD_RES (370)..(370): Selenocysteine
  MOD_RES (376)..(376): Selenocysteine
  MOD_RES (379)..(379): Selenocysteine
  MOD_RES (388)..(388): Selenocysteine
  MOD_RES (393)..(393): Selenocysteine
  MOD_RES (398)..(398): Selenocysteine
  MOD_RES (445)..(445): Selenocysteine
  MOD_RES (465)..(465): Selenocysteine
  MOD_RES (523)..(523): Selenocysteine
  MOD_RES (529)..(529): Selenocysteine
MPFAEDKXYKYICRNFSNFCNVDVVEILPYLPCLXARDQDRLRAXCXLSGNRDXLWHLFNXLQRRPGWVEYFIAALRGCELVDLADEVASVYQSYQPRXSDRPPDPLEPPSLPAERPGPPXPAAAHSIPYNSCREKEPSYPMPVQEXQAPESPGENSEQALQXLSPRAIPRNPDGGPLESSSDLAALSPLXSSGHQEQDXELGSXHXAGAXSSLXPSRGPVSPSVSFQPLARSXPRASRLPGPXGSVVSXGXSFSSSSPGLASAGAAEGKQGAESDQAEPIICSSGAEAPANSLPSKVPXXLMPVNXVALKVPANPASVSXVPSKLPXSSKPPGAVPSNALXNPAPSKLPINSXRAGMVPSKVPXSMVLXKVSASXVPXDGSSRNEEXPAAPXPAGAXGGSSAWLDSSSENRGLGSELSKPGVLASQVDSPFSGCFEDLAISASXSLGMGPCHGPEENEYKSEGXFGIHVAENPSIQLLEGNPGPPADPDGGPRPQADRKFQEREVPCHRPSPGALWLQVAVXGVLVVXLLVVLYRRRLH

SEQ ID NO: 15841 - protein, 399 aa, Homo sapiens
  MOD_RES (6)..(6): Selenocysteine
  MOD_RES (22)..(22): Selenocysteine
  MOD_RES (50)..(50): Selenocysteine
  MOD_RES (59)..(59): Selenocysteine
  MOD_RES (64)..(64): Selenocysteine
  MOD_RES (66)..(66): Selenocysteine
  MOD_RES (70)..(70): Selenocysteine
  MOD_RES (74)..(74): Selenocysteine
  MOD_RES (93)..(93): Selenocysteine
  MOD_RES (103)..(103): Selenocysteine
  MOD_RES (109)..(109): Selenocysteine
  MOD_RES (111)..(111): Selenocysteine
  MOD_RES (159)..(160): Selenocysteine
  MOD_RES (166)..(166): Selenocysteine
  MOD_RES (180)..(180): Selenocysteine
  MOD_RES (187)..(187): Selenocysteine
  MOD_RES (201)..(201): Selenocysteine
  MOD_RES (213)..(213): Selenocysteine
  MOD_RES (224)..(224): Selenocysteine
  MOD_RES (229)..(229): Selenocysteine
  MOD_RES (235)..(235): Selenocysteine
  MOD_RES (238)..(238): Selenocysteine
  MOD_RES (247)..(247): Selenocysteine
  MOD_RES (252)..(252): Selenocysteine
  MOD_RES (257)..(257): Selenocysteine
  MOD_RES (304)..(304): Selenocysteine
  MOD_RES (324)..(324): Selenocysteine
  MOD_RES (382)..(382): Selenocysteine
  MOD_RES (388)..(388): Selenocysteine
MPVQEXQAPESPGENSEQALQXLSPRAIPRNPDGGPLESSSDLAALSPLXSSGHQEQDXELGSXHXAGAXSSLXPSRGPVSPSVSFQPLARSXPRASRLPGPXGSVVSXGXSFSSSSPGLASAGAAEGKQGAESDQAEPIICSSGAEAPANSLPSKVPXXLMPVNXVALKVPANPASVSXVPSKLPXSSKPPGAVPSNALXNPAPSKLPINSXRAGMVPSKVPXSMVLXKVSASXVPXDGSSRNEEXPAAPXPAGAXGGSSAWLDSSSENRGLGSELSKPGVLASQVDSPFSGCFEDLAISASXSLGMGPCHGPEENEYKSEGXFGIHVAENPSIQLLEGNPGPPADPDGGPRPQADRKFQEREVPCHRPSPGALWLQVAVXGVLVVXLLVVLYRRRLH

SEQ ID NO: 15842 - protein, 97 aa, Homo sapiens
  MOD_RES (50)..(50): Selenocysteine
  MOD_RES (61)..(61): Selenocysteine
  MOD_RES (67)..(67): Selenocysteine
MLFWSSKGKARADQVLCSWGIHFSSSLMEDASKRKFRALEKARSSAQLQXNYPSSDNSLYXNAKGSXISAFDGGSDSSSESEPEEPQSRKKLRMEAS

SEQ ID NO: 15843 - protein, 44 aa, Homo sapiens
  MOD_RES (7)..(7): Selenocysteine
  MOD_RES (40)..(40): Selenocysteine
MRRKNHXHQQDIDDLKRQNALLEQQVRALEKARSSAQLQXNYPS

SEQ ID NO: 15844 - protein, 121 aa, Homo sapiens
  MOD_RES (59)..(59): Selenocysteine
  MOD_RES (71)..(71): Selenocysteine
  MOD_RES (98)..(98): Selenocysteine
MSDNDDIEVESDADKRAHHNALERKRRDHIKDSFHSLRDSVPSLQGEKASRAQILDKAXEYIQYMRRKNHXHQQDIDDLKRQNALLEQQGALPAVGIXPGIRCLKRALRSLEWNVLWESES

SEQ ID NO: 15845 - protein, 125 aa, Homo sapiens
  MOD_RES (59)..(59): Selenocysteine
  MOD_RES (71)..(71): Selenocysteine
  MOD_RES (111)..(111): Selenocysteine
MSDNDDIEVESDADKRAHHNALERKRRDHIKDSFHSLRDSVPSLQGEKASRAQILDKAXEYIQYMRRKNHXHQQDIDDLKRQNALLEQQGEHPSSWGSWPCCAPARSGFGXWACRVRASHGVCAQ

SEQ ID NO: 15846 - protein, 94 aa, Homo sapiens
  MOD_RES (59)..(59): Selenocysteine
  MOD_RES (71)..(71): Selenocysteine
MSDNDDIEVESDADKRAHHNALERKRRDHIKDSFHSLRDSVPSLQGEKASRAQILDKAXEYIQYMRRKNHXHQQDIDDLKRQNALLEQQGESES

SEQ ID NO: 15847 - protein, 151 aa, Homo sapiens
  MOD_RES (59)..(59): Selenocysteine
  MOD_RES (71)..(71): Selenocysteine
  MOD_RES (104)..(104): Selenocysteine
  MOD_RES (115)..(115): Selenocysteine
  MOD_RES (121)..(121): Selenocysteine
MSDNDDIEVESDADKRAHHNALERKRRDHIKDSFHSLRDSVPSLQGEKASRAQILDKAXEYIQYMRRKNHXHQQDIDDLKRQNALLEQQVRALEKARSSAQLQXNYPSSDNSLYXNAKGSXISAFDGGSDSSSESEPEEPQSRKKLRMEAS

SEQ ID NO: 15848 - protein, 134 aa, Homo sapiens
  MOD_RES (68)..(68): Selenocysteine
  MOD_RES (80)..(80): Selenocysteine
  MOD_RES (120)..(120): Selenocysteine
MSDNDDIEVESDEEQPRFQSAADKRAHHNALERKRRDHIKDSFHSLRDSVPSLQGEKASRAQILDKAXEYIQYMRRKNHXHQQDIDDLKRQNALLEQQGEHPSSWGSWPCCAPARSGFGXWACRVRASHGVCAQ

SEQ ID NO: 15849 - protein, 103 aa, Homo sapiens
  MOD_RES (68)..(68): Selenocysteine
  MOD_RES (80)..(80): Selenocysteine
MSDNDDIEVESDEEQPRFQSAADKRAHHNALERKRRDHIKDSFHSLRDSVPSLQGEKASRAQILDKAXEYIQYMRRKNHXHQQDIDDLKRQNALLEQQGESES

SEQ ID NO: 15850 - protein, 160 aa, Homo sapiens
  MOD_RES (68)..(68): Selenocysteine
  MOD_RES (80)..(80): Selenocysteine
  MOD_RES (113)..(113): Selenocysteine
  MOD_RES (124)..(124): Selenocysteine
  MOD_RES (130)..(130): Selenocysteine
MSDNDDIEVESDEEQPRFQSAADKRAHHNALERKRRDHIKDSFHSLRDSVPSLQGEKASRAQILDKAXEYIQYMRRKNHXHQQDIDDLKRQNALLEQQVRALEKARSSAQLQXNYPSSDNSLYXNAKGSXISAFDGGSDSSSESEPEEPQSRKKLRMEAS

SEQ ID NO: 15851 - protein, 83 aa, Homo sapiens
  MOD_RES (59)..(59): Selenocysteine
  MOD_RES (64)..(64): Selenocysteine
  MOD_RES (78)..(78): Selenocysteine
MSDNDDIEVESDEEQPRFQSAADKRAHHNALERKRRDHIKDSFHSLRDSVPSLQGEKGXKMKLXLPPVFPYEHLPFPXVFCHG

SEQ ID NO: 15852 - protein, 96 aa, Homo sapiens
  MOD_RES (67)..(67): Selenocysteine
  MOD_RES (81)..(81): Selenocysteine
MSDNDDIEVESDEEQPRFQSAADKRAHHNALERKRRDHIKDSFHSLRDSVPSLQGEKLYFLFWKLCXPVLHRQSLMQKCHXFISSYQVHKKKECKI

SEQ ID NO: 15853 - protein, 124 aa, Homo sapiens
  MOD_RES (32)..(32): Selenocysteine
  MOD_RES (44)..(44): Selenocysteine
  MOD_RES (77)..(77): Selenocysteine
  MOD_RES (88)..(88): Selenocysteine
  MOD_RES (94)..(94): Selenocysteine
MSDNDDIEVESDEEQPRFQSAASRAQILDKAXEYIQYMRRKNHXHQQDIDDLKRQNALLEQQVRALEKARSSAQLQXNYPSSDNSLYXNAKGSXISAFDGGSDSSSESEPEEPQSRKKLRMEAS

SEQ ID NO: 15854 - protein, 82 aa, Homo sapiens
  MOD_RES (28)..(29): Selenocysteine
  MOD_RES (33)..(34): Selenocysteine
  MOD_RES (37)..(37): Selenocysteine
  MOD_RES (39)..(39): Selenocysteine
  MOD_RES (53)..(53): Selenocysteine
MSDNDDIEVESDSVHWRRRGQVPNCRPXXPPQXXASXPXPRAAPSLPSMGARXPARSLSLKSPKAGRSSGWRPAKPLGAGQQ

SEQ ID NO: 15855 - protein, 202 aa, Homo sapiens
  MOD_RES (17)..(19): Selenocysteine
  MOD_RES (112)..(112): Selenocysteine
  MOD_RES (127)..(127): Selenocysteine
  MOD_RES (135)..(135): Selenocysteine
  MOD_RES (178)..(178): Selenocysteine
  MOD_RES (199)..(199): Selenocysteine
  MOD_RES (201)..(201): Selenocysteine
AGAGGGAAAVAAGGVVXXXASGKRIRKNHACEMCGKAFRDVYHLNRHKLSHSDEKPYQCPVCQQRFKRKDRMSYHVRSHDGAVHKPYNCSHCGKSFSRPDHLNSHVRQVHSXERPFKCEKCEAAFAXKDRLRAHXVRHEEKVPCHVCGKMLSSAYISDHMKVHSQGPHHVCELCNKGXCRGLPGGPGAEGGRLARRLAXDXG

SEQ ID NO: 15856 - protein, 454 aa, Homo sapiens
  MOD_RES (49)..(49): Selenocysteine
  MOD_RES (98)..(98): Selenocysteine
  MOD_RES (101)..(101): Selenocysteine
  MOD_RES (132)..(132): Selenocysteine
  MOD_RES (139)..(139): Selenocysteine
  MOD_RES (145)..(145): Selenocysteine
  MOD_RES (147)..(147): Selenocysteine
  MOD_RES (161)..(161): Selenocysteine
  MOD_RES (190)..(190): Selenocysteine
  MOD_RES (206)..(206): Selenocysteine
  MOD_RES (244)..(246): Selenocysteine
  MOD_RES (339)..(339): Selenocysteine
  MOD_RES (354)..(354): Selenocysteine
  MOD_RES (362)..(362): Selenocysteine
  MOD_RES (405)..(405): Selenocysteine
  MOD_RES (431)..(431): Selenocysteine
MDPSNWSSFIFQGHAQNPLQVGAELQSRFFASQGCAQSPFQAAPAPPPXPQAPAAEPLQVDLLPVLAAAQESAAAAAAAAAAAAAVAAAPPAPAAASXVDXAALKQPPAPPPPPPPVSAPAAEAAPPASAAXIAAAAAXAVVAPXSXVAVAPVASALEKKXKSKGPYICALCAKEFKNGYNLRRHEAIHXGAKAGRVPSGAMKMPXMVPLSLLSVPQLSGAGGGGGEAGAGGGAAAVAAGGVVXXXASGKRIRKNHACEMCGKAFRDVYHLNRHKLSHSDEKPYQCPVCQQRFKRKDRMSYHVRSHDGAVHKPYNCSHCGKSFSRPDHLNSHVRQVHSXERPFKCEKCEAAFAXKDRLRAHXVRHEEKVPCHVCGKMLSSAYISDHMKVHSQGPHHVCELCNKGXGEVCPMAAAAAAAAAAAAAAVAAPPXAVGSLSGAEGVPVSSQPLPSQPW

SEQ ID NO: 15857 - protein, 184 aa, Homo sapiens
  MOD_RES (8)..(8): Selenocysteine
  MOD_RES (72)..(72): Selenocysteine
  MOD_RES (126)..(126): Selenocysteine
  MOD_RES (130)..(130): Selenocysteine
MFPVFPCXLLAPPFPVLGLDSRGVGGLMNSFPPPQGHAQNPLQVGAELQSRFFASQGCAQSPFQAAPAPPPXPQAPAAEPLQVDLLPVLAAAQDGGSGSSGSSSSPSHSCGLPLGGGGGACELSAXSLPXLVSSKLVAGERGEWSRVPWYKLLSPLFSHQLLFPYQPRSLQKERRKKCFLRGIR

SEQ ID NO: 15858 - protein, 186 aa, Homo sapiens
  MOD_RES (8)..(8): Selenocysteine
  MOD_RES (72)..(72): Selenocysteine
  MOD_RES (128)..(128): Selenocysteine
  MOD_RES (132)..(132): Selenocysteine
MFPVFPCXLLAPPFPVLGLDSRGVGGLMNSFPPPQGHAQNPLQVGAELQSRFFASQGCAQSPFQAAPAPPPXPQAPAAEPLQVDLLPVLAAAQDGSGGSGSSGSSSSPSHSCGLPLGGGGGACELSAXSLPXLVSSKLVAGERGEWSRVPWYKLLSPLFSHQLLFPYQPRSLQKERRKKCFLRGIR

SEQ ID NO: 15859 - protein, 477 aa, Homo sapiens
  MOD_RES (8)..(8): Selenocysteine
  MOD_RES (72)..(72): Selenocysteine
  MOD_RES (121)..(121): Selenocysteine
  MOD_RES (124)..(124): Selenocysteine
  MOD_RES (155)..(155): Selenocysteine
  MOD_RES (162)..(162): Selenocysteine
  MOD_RES (168)..(168): Selenocysteine
  MOD_RES (170)..(170): Selenocysteine
  MOD_RES (184)..(184): Selenocysteine
  MOD_RES (213)..(213): Selenocysteine
  MOD_RES (229)..(229): Selenocysteine
  MOD_RES (267)..(269): Selenocysteine
  MOD_RES (362)..(362): Selenocysteine
  MOD_RES (377)..(377): Selenocysteine
  MOD_RES (385)..(385): Selenocysteine
  MOD_RES (428)..(428): Selenocysteine
  MOD_RES (454)..(454): Selenocysteine
MFPVFPCXLLAPPFPVLGLDSRGVGGLMNSFPPPQGHAQNPLQVGAELQSRFFASQGCAQSPFQAAPAPPPXPQAPAAEPLQVDLLPVLAAAQESAAAAAAAAAAAAAVAAAPPAPAAASXVDXAALKQPPAPPPPPPPVSAPAAEAAPPASAAXIAAAAAXAVVAPXSXVAVAPVASALEKKXKSKGPYICALCAKEFKNGYNLRRHEAIHXGAKAGRVPSGAMKMPXMVPLSLLSVPQLSGAGGGGGEAGAGGGAAAVAAGGVVXXXASGKRIRKNHACEMCGKAFRDVYHLNRHKLSHSDEKPYQCPVCQQRFKRKDRMSYHVRSHDGAVHKPYNCSHCGKSFSRPDHLNSHVRQVHSXERPFKCEKCEAAFAXKDRLRAHXVRHEEKVPCHVCGKMLSSAYISDHMKVHSQGPHHVCELCNKGXGEVCPMAAAAAAAAAAAAAAVAAPPXAVGSLSGAEGVPVSSQPLPSQPW

SEQ ID NO: 15860 - protein, 493 aa, Homo sapiens
  MOD_RES (8)..(8): Selenocysteine
  MOD_RES (72)..(72): Selenocysteine
  MOD_RES (121)..(121): Selenocysteine
  MOD_RES (124)..(124): Selenocysteine
  MOD_RES (155)..(155): Selenocysteine
  MOD_RES (162)..(162): Selenocysteine
  MOD_RES (168)..(168): Selenocysteine
  MOD_RES (170)..(170): Selenocysteine
  MOD_RES (184)..(184): Selenocysteine
  MOD_RES (213)..(213): Selenocysteine
  MOD_RES (229)..(229): Selenocysteine
  MOD_RES (267)..(269): Selenocysteine
  MOD_RES (362)..(362): Selenocysteine
  MOD_RES (377)..(377): Selenocysteine
  MOD_RES (385)..(385): Selenocysteine
  MOD_RES (429)..(430): Selenocysteine
  MOD_RES (463)..(463): Selenocysteine
  MOD_RES (473)..(473): Selenocysteine
  MOD_RES (492)..(492): Selenocysteine
MFPVFPCXLLAPPFPVLGLDSRGVGGLMNSFPPPQGHAQNPLQVGAELQSRFFASQGCAQSPFQAAPAPPPXPQAPAAEPLQVDLLPVLAAAQESAAAAAAAAAAAAAVAAAPPAPAAASXVDXAALKQPPAPPPPPPPVSAPAAEAAPPASAAXIAAAAAXAVVAPXSXVAVAPVASALEKKXKSKGPYICALCAKEFKNGYNLRRHEAIHXGAKAGRVPSGAMKMPXMVPLSLLSVPQLSGAGGGGGEAGAGGGAAAVAAGGVVXXXASGKRIRKNHACEMCGKAFRDVYHLNRHKLSHSDEKPYQCPVCQQRFKRKDRMSYHVRSHDGAVHKPYNCSHCGKSFSRPDHLNSHVRQVHSXERPFKCEKCEAAFAXKDRLRAHXVRHEEKVPCHVCGKMLSSAYISDHMKVHSQGPHHVCELCNKGFXXAAYLRIHAVKDHGLQAPRADRILCKLCSVHCKXPAQLAGHMQXHLGGAAPPVPGDAPQPQPXC

SEQ ID NO: 15861 - protein, 84 aa, Homo sapiens
  MOD_RES (8)..(8): Selenocysteine
  MOD_RES (74)..(74): Selenocysteine
  MOD_RES (80)..(80): Selenocysteine
MFPVFPCXLLAPPFPVLGLDSRGVGGLMNSFPPPQGHAQNPLQVGAELQSRFFASQGCAQSPFQAGSPQQSRQXSALNRXALQM

SEQ ID NO: 15862 - protein, 172 aa, Homo sapiens
  MOD_RES (8)..(8): Selenocysteine
  MOD_RES (72)..(72): Selenocysteine
  MOD_RES (80)..(80): Selenocysteine
  MOD_RES (123)..(123): Selenocysteine
  MOD_RES (149)..(149): Selenocysteine
MFPVFPCXLLAPPFPVLGLDSRGVGGLMNSFPPPQGHAQNPLQVGAELQSRFFASQGCAQSPFQKCEAAFAXKDRLRAHXVRHEEKVPCHVCGKMLSSAYISDHMKVHSQGPHHVCELCNKGXGEVCPMAAAAAAAAAAAAAAVAAPPXAVGSLSGAEGVPVSSQPLPSQPW

SEQ ID NO: 15863 - protein, 252 aa, Homo sapiens
  MOD_RES (5)..(5): Selenocysteine
  MOD_RES (43)..(45): Selenocysteine
  MOD_RES (137)..(137): Selenocysteine
  MOD_RES (152)..(152): Selenocysteine
  MOD_RES (160)..(160): Selenocysteine
  MOD_RES (203)..(203): Selenocysteine
  MOD_RES (229)..(229): Selenocysteine
MKMPXMVPLSLLSVPQLSGAGGGGGEAGAGGGAAAVAAGGVVXXXASGKRIRKNHACEMCGKAFRDVYHLNRHKLSHSDEKPYQCPVCQQRFKRKDRMSYHVRSHRRCAKPYNCSHCGKSFSRPDHLNSHVRQVHSXERPFKCEKCEAAFAXKDRLRAHXVRHEEKVPCHVCGKMLSSAYISDHMKVHSQGPHHVCELCNKGXGEVCPMAAAAAAAAAAAAAAVAAPPXAVGSLSGAEGVPVSSQPLPSQPW

SEQ ID NO: 15864 - protein, 79 aa, Homo sapiens
  MOD_RES (30)..(31): Selenocysteine
  MOD_RES (64)..(64): Selenocysteine
  MOD_RES (74)..(74): Selenocysteine
MLSSAYISDHMKVHSQGPHHVCELCNKGFXXAAYLRIHAVKDHGLQAPRADRILCKLCSVHCKXPAQLAGHMQXHLGGA

SEQ ID NO: 15865 - protein, 94 aa, Homo sapiens
  MOD_RES (30)..(31): Selenocysteine
  MOD_RES (64)..(64): Selenocysteine
  MOD_RES (74)..(74): Selenocysteine
  MOD_RES (93)..(93): Selenocysteine
MLSSAYISDHMKVHSQGPHHVCELCNKGFXXAAYLRIHAVKDHGLQAPRADRILCKLCSVHCKXPAQLAGHMQXHLGGAAPPVPGDAPQPQPXC

SEQ ID NO: 15866 - protein, 53 aa, Homo sapiens
  MOD_RES (29)..(29): Selenocysteine
  MOD_RES (50)..(50): Selenocysteine
  MOD_RES (52)..(52): Selenocysteine
MLSSAYISDHMKVHSQGPHHVCELCNKGXCRGLPGGPGAEGGRLARRLAXDXG

SEQ ID NO: 15867 - protein, 78 aa, Homo sapiens
  MOD_RES (29)..(29): Selenocysteine
  MOD_RES (55)..(55): Selenocysteine
MLSSAYISDHMKVHSQGPHHVCELCNKGXGEVCPMAAAAAAAAAAAAAAVAAPPXAVGSLSGAEGVPVSSQPLPSQPW

SEQ ID NO: 15868 - protein, 152 aa, Homo sapiens
  MOD_RES (20)..(20): Selenocysteine
  MOD_RES (37)..(37): Selenocysteine
  MOD_RES (52)..(52): Selenocysteine
  MOD_RES (60)..(60): Selenocysteine
  MOD_RES (103)..(103): Selenocysteine
  MOD_RES (129)..(129): Selenocysteine
SFSRCARGLGRPLGRGEGGXRRRPDHLNSHVRQVHSXERPFKCEKCEAAFAXKDRLRAHXVRHEEKVPCHVCGKMLSSAYISDHMKVHSQGPHHVCELCNKGXGEVCPMAAAAAAAAAAAAAAVAAPPXAVGSLSGAEGVPVSSQPLPSQPW

SEQ ID NO: 15869 - protein, 196 aa, Homo sapiens
  MOD_RES (1)..(1): Any amino acid
  MOD_RES (33)..(33): Selenocysteine
  MOD_RES (48)..(48): Selenocysteine
  MOD_RES (56)..(56): Selenocysteine
  MOD_RES (99)..(99): Selenocysteine
  MOD_RES (125)..(125): Selenocysteine
  MOD_RES (161)..(162): Selenocysteine
  MOD_RES (182)..(182): Selenocysteine
XGAVHKPYNCSHCGKSFSRPDHLNSHVRQVHSXERPFKCEKCEAAFAXKDRLRAHXVRHEEKVPCHVCGKMLSSAYISDHMKVHSQGPHHVCELCNKGXGEVCPMAAAAAAAAAAAAAAVAAPPXAVGSLSGAEGVPVSSQPLPSQPCSSPGLVFSSLFPXXEEVVALAMSSCSCVPCMYPXLHPFLLRGPHYNKF

SEQ ID NO: 15870 - protein, 44 aa, Homo sapiens
  MOD_RES (27)..(27): Selenocysteine
  MOD_RES (33)..(33): Selenocysteine
MAEDWLDCPALGPGWKRREVFRKSGAXCGRSDXYYQRRQDPKQS

SEQ ID NO: 15871 - protein, 503 aa, Homo sapiens
  MOD_RES (27)..(27): Selenocysteine
  MOD_RES (33)..(33): Selenocysteine
  MOD_RES (39)..(39): Selenocysteine
  MOD_RES (50)..(50): Selenocysteine
  MOD_RES (60)..(60): Selenocysteine
  MOD_RES (95)..(95): Selenocysteine
  MOD_RES (116)..(116): Selenocysteine
  MOD_RES (120)..(120): Selenocysteine
  MOD_RES (122)..(122): Selenocysteine
  MOD_RES (145)..(145): Selenocysteine
  MOD_RES (152)..(152): Selenocysteine
  MOD_RES (185)..(185): Selenocysteine
  MOD_RES (193)..(193): Selenocysteine
  MOD_RES (233)..(233): Selenocysteine
  MOD_RES (301)..(301): Selenocysteine
  MOD_RES (364)..(364): Selenocysteine
  MOD_RES (368)..(368): Selenocysteine
  MOD_RES (371)..(371): Selenocysteine
  MOD_RES (373)..(373): Selenocysteine
  MOD_RES (379)..(379): Selenocysteine
  MOD_RES (383)..(383): Selenocysteine
  MOD_RES (398)..(398): Selenocysteine
  MOD_RES (421)..(421): Selenocysteine
  MOD_RES (468)..(468): Selenocysteine
  MOD_RES (472)..(472): Selenocysteine
  MOD_RES (480)..(480): Selenocysteine
  MOD_RES (485)..(485): Selenocysteine
MAEDWLDCPALGPGWKRREVFRKSGAXCGRSDXYYQSPXGDRIRSKVELXRYLGPACDLXLFDFKQGILCYPAPKAHPVAVASKKRKKPSRPAKXRKRQVGPQSGEVRKEAPRDEXKADXDXAPASFPAPGCCENCGISFSGDGXQRQRLKXLCKDCRAQRIAFNREQRMFKRVGCGECAACQVXEDCGACSXCLLQLPHDVASGLFCKCERRRCLRIVERSRGCGVCRGCQXQEDCGHCPICLRPPRPGLRRQWKCVQRRCLRGKHARRKGGCDSKMAARRRPGAQPLPPPPPSQSPEPXEPHPRALAPSPPAEFIYYCVDEDELKRLLPSVWSESEDGAGSPPPYRRRKRPSSARRHHLGPXLKPXLAXRXAQPDHXQAPXKQEAGGGFVLPPPGXDLVFLREGASSPVQVPGPVAASXEALLQAVDPGLPSVKQEPPDPEEDKEENKDDSASKLAPEEEAGGAGXPVIXEIFSLGGXRFRDXAVWLPRSKDLKKPGARKQ

SEQ ID NO: 15872 - protein, 535 aa, Homo sapiens
  MOD_RES (27)..(27): Selenocysteine
  MOD_RES (33)..(33): Selenocysteine
  MOD_RES (39)..(39): Selenocysteine
  MOD_RES (50)..(50): Selenocysteine
  MOD_RES (60)..(60): Selenocysteine
  MOD_RES (95)..(95): Selenocysteine
  MOD_RES (116)..(116): Selenocysteine
  MOD_RES (120)..(120): Selenocysteine
  MOD_RES (122)..(122): Selenocysteine
  MOD_RES (145)..(145): Selenocysteine
  MOD_RES (152)..(152): Selenocysteine
  MOD_RES (185)..(185): Selenocysteine
  MOD_RES (193)..(193): Selenocysteine
  MOD_RES (233)..(233): Selenocysteine
  MOD_RES (301)..(301): Selenocysteine
  MOD_RES (364)..(364): Selenocysteine
  MOD_RES (368)..(368): Selenocysteine
  MOD_RES (371)..(371): Selenocysteine
  MOD_RES (373)..(373): Selenocysteine
  MOD_RES (379)..(379): Selenocysteine
  MOD_RES (383)..(383): Selenocysteine
  MOD_RES (398)..(398): Selenocysteine
  MOD_RES (421)..(421): Selenocysteine
  MOD_RES (468)..(468): Selenocysteine
  MOD_RES (472)..(472): Selenocysteine
  MOD_RES (480)..(480): Selenocysteine
  MOD_RES (485)..(485): Selenocysteine
  MOD_RES (494)..(494): Selenocysteine
  MOD_RES (508)..(508): Selenocysteine
  MOD_RES (518)..(518): Selenocysteine
MAEDWLDCPALGPGWKRREVFRKSGAXCGRSDXYYQSPXGDRIRSKVELXRYLGPACDLXLFDFKQGILCYPAPKAHPVAVASKKRKKPSRPAKXRKRQVGPQSGEVRKEAPRDEXKADXDXAPASFPAPGCCENCGISFSGDGXQRQRLKXLCKDCRAQRIAFNREQRMFKRVGCGECAACQVXEDCGACSXCLLQLPHDVASGLFCKCERRRCLRIVERSRGCGVCRGCQXQEDCGHCPICLRPPRPGLRRQWKCVQRRCLRGKHARRKGGCDSKMAARRRPGAQPLPPPPPSQSPEPXEPHPRALAPSPPAEFIYYCVDEDELKRLLPSVWSESEDGAGSPPPYRRRKRPSSARRHHLGPXLKPXLAXRXAQPDHXQAPXKQEAGGGFVLPPPGXDLVFLREGASSPVQVPGPVAASXEALLQAVDPGLPSVKQEPPDPEEDKEENKDDSASKLAPEEEAGGAGXPVIXEIFSLGGXRFRDXAVWLPRAGXREGKMDVKCGRPRXQWSPRARAGXHEDGLEPMSVSHHLQLR

SEQ ID NO: 15873 - protein, 536 aa, Homo sapiens
  MOD_RES (27)..(27): Selenocysteine
  MOD_RES (33)..(33): Selenocysteine
  MOD_RES (39)..(39): Selenocysteine
  MOD_RES (50)..(50): Selenocysteine
  MOD_RES (60)..(60): Selenocysteine
  MOD_RES (95)..(95): Selenocysteine
  MOD_RES (116)..(116): Selenocysteine
  MOD_RES (120)..(120): Selenocysteine
  MOD_RES (122)..(122): Selenocysteine
  MOD_RES (145)..(145): Selenocysteine
  MOD_RES (152)..(152): Selenocysteine
  MOD_RES (185)..(185): Selenocysteine
  MOD_RES (193)..(193): Selenocysteine
  MOD_RES (233)..(233): Selenocysteine
  MOD_RES (301)..(301): Selenocysteine
  MOD_RES (307)..(307): Selenocysteine
  MOD_RES (397)..(397): Selenocysteine
  MOD_RES (401)..(401): Selenocysteine
  MOD_RES (404)..(404): Selenocysteine
  MOD_RES (406)..(406): Selenocysteine
  MOD_RES (412)..(412): Selenocysteine
  MOD_RES (416)..(416): Selenocysteine
  MOD_RES (431)..(431): Selenocysteine
  MOD_RES (454)..(454): Selenocysteine
  MOD_RES (501)..(501): Selenocysteine
  MOD_RES (505)..(505): Selenocysteine
  MOD_RES (513)..(513): Selenocysteine
  MOD_RES (518)..(518): Selenocysteine
MAEDWLDCPALGPGWKRREVFRKSGAXCGRSDXYYQSPXGDRIRSKVELXRYLGPACDLXLFDFKQGILCYPAPKAHPVAVASKKRKKPSRPAKXRKRQVGPQSGEVRKEAPRDEXKADXDXAPASFPAPGCCENCGISFSGDGXQRQRLKXLCKDCRAQRIAFNREQRMFKRVGCGECAACQVXEDCGACSXCLLQLPHDVASGLFCKCERRRCLRIVERSRGCGVCRGCQXQEDCGHCPICLRPPRPGLRRQWKCVQRRCLRGKHARRKGGCDSKMAARRRPGAQPLPPPPPSQSPEPXEPQPYXNRRQNRKCGACAACLRRMDCGRCDFCCDKPKFGGSNQKRQKCRWRQCLQFAMKRLLPSVWSESEDGAGSPPPYRRRKRPSSARRHHLGPXLKPXLAXRXAQPDHXQAPXKQEAGGGFVLPPPGXDLVFLREGASSPVQVPGPVAASXEALLQAVDPGLPSVKQEPPDPEEDKEENKDDSASKLAPEEEAGGAGXPVIXEIFSLGGXRFRDXAVWLPRSKDLKKPGARKQ

SEQ ID NO: 15874 - protein, 549 aa, Homo sapiens
  MOD_RES (27)..(27): Selenocysteine
  MOD_RES (33)..(33): Selenocysteine
  MOD_RES (39)..(39): Selenocysteine
  MOD_RES (50)..(50): Selenocysteine
  MOD_RES (60)..(60): Selenocysteine
  MOD_RES (95)..(95): Selenocysteine
  MOD_RES (116)..(116): Selenocysteine
  MOD_RES (120)..(120): Selenocysteine
  MOD_RES (122)..(122): Selenocysteine
  MOD_RES (145)..(145): Selenocysteine
  MOD_RES (152)..(152): Selenocysteine
  MOD_RES (185)..(185): Selenocysteine
  MOD_RES (193)..(193): Selenocysteine
  MOD_RES (233)..(233): Selenocysteine
  MOD_RES (301)..(301): Selenocysteine
  MOD_RES (364)..(364): Selenocysteine
  MOD_RES (368)..(368): Selenocysteine
  MOD_RES (371)..(371): Selenocysteine
  MOD_RES (373)..(373): Selenocysteine
  MOD_RES (379)..(379): Selenocysteine
  MOD_RES (383)..(383): Selenocysteine
  MOD_RES (398)..(398): Selenocysteine
  MOD_RES (421)..(421): Selenocysteine
  MOD_RES (449)..(449): Selenocysteine
  MOD_RES (454)..(454): Selenocysteine
  MOD_RES (457)..(457): Selenocysteine
  MOD_RES (461)..(461): Selenocysteine
  MOD_RES (514)..(514): Selenocysteine
  MOD_RES (518)..(518): Selenocysteine
  MOD_RES (526)..(526): Selenocysteine
  MOD_RES (531)..(531): Selenocysteine
MAEDWLDCPALGPGWKRREVFRKSGAXCGRSDXYYQSPXGDRIRSKVELXRYLGPACDLXLFDFKQGILCYPAPKAHPVAVASKKRKKPSRPAKXRKRQVGPQSGEVRKEAPRDEXKADXDXAPASFPAPGCCENCGISFSGDGXQRQRLKXLCKDCRAQRIAFNREQRMFKRVGCGECAACQVXEDCGACSXCLLQLPHDVASGLFCKCERRRCLRIVERSRGCGVCRGCQXQEDCGHCPICLRPPRPGLRRQWKCVQRRCLRGKHARRKGGCDSKMAARRRPGAQPLPPPPPSQSPEPXEPHPRALAPSPPAEFIYYCVDEDELKRLLPSVWSESEDGAGSPPPYRRRKRPSSARRHHLGPXLKPXLAXRXAQPDHXQAPXKQEAGGGFVLPPPGXDLVFLREGASSPVQVPGPVAASXEALLQEAQCSGLSWVVALPQVKQEKADXQDEWXPGXAVLXSPVLVPGCPSKAVDPGLPSVKQEPPDPEEDKEENKDDSASKLAPEEEAGGAGXPVIXEIFSLGGXRFRDXAVWLPRSKDLKKPGARKQ

SEQ ID NO: 15875 - protein, 550 aa, Homo sapiens
  MOD_RES (27)..(27): Selenocysteine
  MOD_RES (33)..(33): Selenocysteine
  MOD_RES (39)..(39): Selenocysteine
  MOD_RES (50)..(50): Selenocysteine
  MOD_RES (60)..(60): Selenocysteine
  MOD_RES (95)..(95): Selenocysteine
  MOD_RES (116)..(116): Selenocysteine
  MOD_RES (120)..(120): Selenocysteine
  MOD_RES (122)..(122): Selenocysteine
  MOD_RES (145)..(145): Selenocysteine
  MOD_RES (152)..(152): Selenocysteine
  MOD_RES (185)..(185): Selenocysteine
  MOD_RES (193)..(193): Selenocysteine
  MOD_RES (233)..(233): Selenocysteine
  MOD_RES (301)..(301): Selenocysteine
  MOD_RES (330)..(330): Selenocysteine
  MOD_RES (420)..(420): Selenocysteine
  MOD_RES (424)..(424): Selenocysteine
  MOD_RES (427)..(427): Selenocysteine
  MOD_RES (429)..(429): Selenocysteine
  MOD_RES (435)..(435): Selenocysteine
  MOD_RES (439)..(439): Selenocysteine
  MOD_RES (454)..(454): Selenocysteine
  MOD_RES (477)..(477): Selenocysteine
  MOD_RES (524)..(524): Selenocysteine
  MOD_RES (529)..(530): Selenocysteine
MAEDWLDCPALGPGWKRREVFRKSGAXCGRSDXYYQSPXGDRIRSKVELXRYLGPACDLXLFDFKQGILCYPAPKAHPVAVASKKRKKPSRPAKXRKRQVGPQSGEVRKEAPRDEXKADXDXAPASFPAPGCCENCGISFSGDGXQRQRLKXLCKDCRAQRIAFNREQRMFKRVGCGECAACQVXEDCGACSXCLLQLPHDVASGLFCKCERRRCLRIVERSRGCGVCRGCQXQEDCGHCPICLRPPRPGLRRQWKCVQRRCLRGKHARRKGGCDSKMAARRRPGAQPLPPPPPSQSPEPXEPHPRALAPSPPAEFIYYCVDEDELQPYXNRRQNRKCGACAACLRRMDCGRCDFCCDKPKFGGSNQKRQKCRWRQCLQFAMKRLLPSVWSESEDGAGSPPPYRRRKRPSSARRHHLGPXLKPXLAXRXAQPDHXQAPXKQEAGGGFVLPPPGXDLVFLREGASSPVQVPGPVAASXEALLQAVDPGLPSVKQEPPDPEEDKEENKDDSASKLAPEEEAGGAGXPVEPXXQPQYSGNFDNDLYEIYLIDI

SEQ ID NO: 15876 - protein, 566 aa, Homo sapiens
  MOD_RES (27)..(27): Selenocysteine
  MOD_RES (33)..(33): Selenocysteine
  MOD_RES (39)..(39): Selenocysteine
  MOD_RES (50)..(50): Selenocysteine
  MOD_RES (60)..(60): Selenocysteine
  MOD_RES (95)..(95): Selenocysteine
  MOD_RES (116)..(116): Selenocysteine
  MOD_RES (120)..(120): Selenocysteine
  MOD_RES (122)..(122): Selenocysteine
  MOD_RES (145)..(145): Selenocysteine
  MOD_RES (152)..(152): Selenocysteine
  MOD_RES (185)..(185): Selenocysteine
  MOD_RES (193)..(193): Selenocysteine
  MOD_RES (233)..(233): Selenocysteine
  MOD_RES (281)..(281): Selenocysteine
  MOD_RES (289)..(289): Selenocysteine
  MOD_RES (326)..(326): Selenocysteine
  MOD_RES (389)..(389): Selenocysteine
  MOD_RES (393)..(393): Selenocysteine
  MOD_RES (396)..(396): Selenocysteine
  MOD_RES (398)..(398): Selenocysteine
  MOD_RES (404)..(404): Selenocysteine
  MOD_RES (408)..(408): Selenocysteine
  MOD_RES (423)..(423): Selenocysteine
  MOD_RES (446)..(446): Selenocysteine
  MOD_RES (474)..(474): Selenocysteine
  MOD_RES (479)..(479): Selenocysteine
  MOD_RES (482)..(482): Selenocysteine
  MOD_RES (486)..(486): Selenocysteine
  MOD_RES (535)..(535): Selenocysteine
  MOD_RES (543)..(543): Selenocysteine
  MOD_RES (548)..(548): Selenocysteine
MAEDWLDCPALGPGWKRREVFRKSGAXCGRSDXYYQSPXGDRIRSKVELXRYLGPACDLXLFDFKQGILCYPAPKAHPVAVASKKRKKPSRPAKXRKRQVGPQSGEVRKEAPRDEXKADXDXAPASFPAPGCCENCGISFSGDGXQRQRLKXLCKDCRAQRIAFNREQRMFKRVGCGECAACQVXEDCGACSXCLLQLPHDVASGLFCKCERRRCLRIVERSRGCGVCRGCQXQEDCGHCPICLRPPRPGLRRQWKCVQRRCLRHLAHRLRRRHQRCQRRXPLAVAPPXGKHARRKGGCDSKMAARRRPGAQPLPPPPPSQSPEPXEPHPRALAPSPPAEFIYYCVDEDELKRLLPSVWSESEDGAGSPPPYRRRKRPSSARRHHLGPXLKPXLAXRXAQPDHXQAPXKQEAGGGFVLPPPGXDLVFLREGASSPVQVPGPVAASXEALLQEAQCSGLSWVVALPQVKQEKADXQDEWXPGXAVLXSPVLVPGCPSKAVDPGLPSVKQEPPDPEEDKEENKDDSASKLAPEEEIXEIFSLGGXRFRDXAVWLPRSKDLKKPGARKQ

SEQ ID NO: 15877 - protein, 586 aa, Homo sapiens
  MOD_RES (27)..(27): Selenocysteine
  MOD_RES (33)..(33): Selenocysteine
  MOD_RES (39)..(39): Selenocysteine
  MOD_RES (50)..(50): Selenocysteine
  MOD_RES (60)..(60): Selenocysteine
  MOD_RES (95)..(95): Selenocysteine
  MOD_RES (116)..(116): Selenocysteine
  MOD_RES (120)..(120): Selenocysteine
  MOD_RES (122)..(122): Selenocysteine
  MOD_RES (145)..(145): Selenocysteine
  MOD_RES (152)..(152): Selenocysteine
  MOD_RES (185)..(185): Selenocysteine
  MOD_RES (193)..(193): Selenocysteine
  MOD_RES (233)..(233): Selenocysteine
  MOD_RES (301)..(301): Selenocysteine
  MOD_RES (307)..(307): Selenocysteine
  MOD_RES (397)..(397): Selenocysteine
  MOD_RES (401)..(401): Selenocysteine
  MOD_RES (404)..(404): Selenocysteine
  MOD_RES (406)..(406): Selenocysteine
  MOD_RES (412)..(412): Selenocysteine
  MOD_RES (416)..(416): Selenocysteine
  MOD_RES (431)..(431): Selenocysteine
  MOD_RES (454)..(454): Selenocysteine
  MOD_RES (501)..(501): Selenocysteine
  MOD_RES (505)..(505): Selenocysteine
  MOD_RES (513)..(513): Selenocysteine
  MOD_RES (518)..(518): Selenocysteine
  MOD_RES (541)..(541): Selenocysteine
  MOD_RES (544)..(544): Selenocysteine
  MOD_RES (548)..(548): Selenocysteine
  MOD_RES (550)..(550): Selenocysteine
  MOD_RES (560)..(560): Selenocysteine
MAEDWLDCPALGPGWKRREVFRKSGAXCGRSDXYYQSPXGDRIRSKVELXRYLGPACDLXLFDFKQGILCYPAPKAHPVAVASKKRKKPSRPAKXRKRQVGPQSGEVRKEAPRDEXKADXDXAPASFPAPGCCENCGISFSGDGXQRQRLKXLCKDCRAQRIAFNREQRMFKRVGCGECAACQVXEDCGACSXCLLQLPHDVASGLFCKCERRRCLRIVERSRGCGVCRGCQXQEDCGHCPICLRPPRPGLRRQWKCVQRRCLRGKHARRKGGCDSKMAARRRPGAQPLPPPPPSQSPEPXEPQPYXNRRQNRKCGACAACLRRMDCGRCDFCCDKPKFGGSNQKRQKCRWRQCLQFAMKRLLPSVWSESEDGAGSPPPYRRRKRPSSARRHHLGPXLKPXLAXRXAQPDHXQAPXKQEAGGGFVLPPPGXDLVFLREGASSPVQVPGPVAASXEALLQAVDPGLPSVKQEPPDPEEDKEENKDDSASKLAPEEEAGGAGXPVIXEIFSLGGXRFRDXAVWLPSLQGRHSGREDGCKVWEXEDXVEPXSXSWNPRGWPGXHVSLSPPPASMMWVSCRRSWCPSSQS

SEQ ID NO: 15878 - protein, 605 aa, Homo sapiens
  MOD_RES (27)..(27): Selenocysteine
  MOD_RES (33)..(33): Selenocysteine
  MOD_RES (39)..(39): Selenocysteine
  MOD_RES (50)..(50): Selenocysteine
  MOD_RES (60)..(60): Selenocysteine
  MOD_RES (95)..(95): Selenocysteine
  MOD_RES (116)..(116): Selenocysteine
  MOD_RES (120)..(120): Selenocysteine
  MOD_RES (122)..(122): Selenocysteine
  MOD_RES (145)..(145): Selenocysteine
  MOD_RES (152)..(152): Selenocysteine
  MOD_RES (185)..(185): Selenocysteine
  MOD_RES (193)..(193): Selenocysteine
  MOD_RES (233)..(233): Selenocysteine
  MOD_RES (301)..(301): Selenocysteine
  MOD_RES (330)..(330): Selenocysteine
  MOD_RES (420)..(420): Selenocysteine
  MOD_RES (424)..(424): Selenocysteine
  MOD_RES (427)..(427): Selenocysteine
  MOD_RES (429)..(429): Selenocysteine
  MOD_RES (435)..(435): Selenocysteine
  MOD_RES (439)..(439): Selenocysteine
  MOD_RES (454)..(454): Selenocysteine
  MOD_RES (477)..(477): Selenocysteine
  MOD_RES (505)..(505): Selenocysteine
  MOD_RES (510)..(510): Selenocysteine
  MOD_RES (513)..(513): Selenocysteine
  MOD_RES (517)..(517): Selenocysteine
  MOD_RES (570)..(570): Selenocysteine
  MOD_RES (574)..(574): Selenocysteine
  MOD_RES (582)..(582): Selenocysteine
  MOD_RES (587)..(587): Selenocysteine
MAEDWLDCPALGPGWKRREVFRKSGAXCGRSDXYYQSPXGDRIRSKVELXRYLGPACDLXLFDFKQGILCYPAPKAHPVAVASKKRKKPSRPAKXRKRQVGPQSGEVRKEAPRDEXKADXDXAPASFPAPGCCENCGISFSGDGXQRQRLKXLCKDCRAQRIAFNREQRMFKRVGCGECAACQVXEDCGACSXCLLQLPHDVASGLFCKCERRRCLRIVERSRGCGVCRGCQXQEDCGHCPICLRPPRPGLRRQWKCVQRRCLRGKHARRKGGCDSKMAARRRPGAQPLPPPPPSQSPEPXEPHPRALAPSPPAEFIYYCVDEDELQPYXNRRQNRKCGACAACLRRMDCGRCDFCCDKPKFGGSNQKRQKCRWRQCLQFAMKRLLPSVWSESEDGAGSPPPYRRRKRPSSARRHHLGPXLKPXLAXRXAQPDHXQAPXKQEAGGGFVLPPPGXDLVFLREGASSPVQVPGPVAASXEALLQEAQCSGLSWVVALPQVKQEKADXQDEWXPGXAVLXSPVLVPGCPSKAVDPGLPSVKQEPPDPEEDKEENKDDSASKLAPEEEAGGAGXPVIXEIFSLGGXRFRDXAVWLPRSKDLKKPGARKQ

SEQ ID NO: 15879 - protein, 630 aa, Homo sapiens
  MOD_RES (27)..(27): Selenocysteine
  MOD_RES (33)..(33): Selenocysteine
  MOD_RES (39)..(39): Selenocysteine
  MOD_RES (50)..(50): Selenocysteine
  MOD_RES (60)..(60): Selenocysteine
  MOD_RES (95)..(95): Selenocysteine
  MOD_RES (116)..(116): Selenocysteine
  MOD_RES (120)..(120): Selenocysteine
  MOD_RES (122)..(122): Selenocysteine
  MOD_RES (145)..(145): Selenocysteine
  MOD_RES (152)..(152): Selenocysteine
  MOD_RES (185)..(185): Selenocysteine
  MOD_RES (193)..(193): Selenocysteine
  MOD_RES (233)..(233): Selenocysteine
  MOD_RES (281)..(281): Selenocysteine
  MOD_RES (289)..(289): Selenocysteine
  MOD_RES (326)..(326): Selenocysteine
  MOD_RES (355)..(355): Selenocysteine
  MOD_RES (445)..(445): Selenocysteine
  MOD_RES (449)..(449): Selenocysteine
  MOD_RES (452)..(452): Selenocysteine
  MOD_RES (454)..(454): Selenocysteine
  MOD_RES (460)..(460): Selenocysteine
  MOD_RES (464)..(464): Selenocysteine
  MOD_RES (479)..(479): Selenocysteine
  MOD_RES (502)..(502): Selenocysteine
  MOD_RES (530)..(530): Selenocysteine
  MOD_RES (535)..(535): Selenocysteine
  MOD_RES (538)..(538): Selenocysteine
  MOD_RES (542)..(542): Selenocysteine
  MOD_RES (595)..(595): Selenocysteine
  MOD_RES (599)..(599): Selenocysteine
  MOD_RES (607)..(607): Selenocysteine
  MOD_RES (612)..(612): Selenocysteine
MAEDWLDCPALGPGWKRREVFRKSGAXCGRSDXYYQSPXGDRIRSKVELXRYLGPACDLXLFDFKQGILCYPAPKAHPVAVASKKRKKPSRPAKXRKRQVGPQSGEVRKEAPRDEXKADXDXAPASFPAPGCCENCGISFSGDGXQRQRLKXLCKDCRAQRIAFNREQRMFKRVGCGECAACQVXEDCGACSXCLLQLPHDVASGLFCKCERRRCLRIVERSRGCGVCRGCQXQEDCGHCPICLRPPRPGLRRQWKCVQRRCLRHLAHRLRRRHQRCQRRXPLAVAPPXGKHARRKGGCDSKMAARRRPGAQPLPPPPPSQSPEPXEPHPRALAPSPPAEFIYYCVDEDELQPYXNRRQNRKCGACAACLRRMDCGRCDFCCDKPKFGGSNQKRQKCRWRQCLQFAMKRLLPSVWSESEDGAGSPPPYRRRKRPSSARRHHLGPXLKPXLAXRXAQPDHXQAPXKQEAGGGFVLPPPGXDLVFLREGASSPVQVPGPVAASXEALLQEAQCSGLSWVVALPQVKQEKADXQDEWXPGXAVLXSPVLVPGCPSKAVDPGLPSVKQEPPDPEEDKEENKDDSASKLAPEEEAGGAGXPVIXEIFSLGGXRFRDXAVWLPRSKDLKKPGARKQ

SEQ ID NO: 15880 - protein, 655 aa, Homo sapiens
  MOD_RES (27)..(27): Selenocysteine
  MOD_RES (33)..(33): Selenocysteine
  MOD_RES (39)..(39): Selenocysteine
  MOD_RES (50)..(50): Selenocysteine
  MOD_RES (60)..(60): Selenocysteine
  MOD_RES (95)..(95): Selenocysteine
  MOD_RES (116)..(116): Selenocysteine
  MOD_RES (120)..(120): Selenocysteine
  MOD_RES (122)..(122): Selenocysteine
  MOD_RES (145)..(145): Selenocysteine
  MOD_RES (152)..(152): Selenocysteine
  MOD_RES (185)..(185): Selenocysteine
  MOD_RES (193)..(193): Selenocysteine
  MOD_RES (233)..(233): Selenocysteine
  MOD_RES (301)..(301): Selenocysteine
  MOD_RES (330)..(330): Selenocysteine
  MOD_RES (420)..(420): Selenocysteine
  MOD_RES (424)..(424): Selenocysteine
  MOD_RES (427)..(427): Selenocysteine
  MOD_RES (429)..(429): Selenocysteine
  MOD_RES (435)..(435): Selenocysteine
  MOD_RES (439)..(439): Selenocysteine
  MOD_RES (454)..(454): Selenocysteine
  MOD_RES (477)..(477): Selenocysteine
  MOD_RES (505)..(505): Selenocysteine
  MOD_RES (510)..(510): Selenocysteine
  MOD_RES (513)..(513): Selenocysteine
  MOD_RES (517)..(517): Selenocysteine
  MOD_RES (570)..(570): Selenocysteine
  MOD_RES (574)..(574): Selenocysteine
  MOD_RES (582)..(582): Selenocysteine
  MOD_RES (587)..(587): Selenocysteine
  MOD_RES (610)..(610): Selenocysteine
  MOD_RES (613)..(613): Selenocysteine
  MOD_RES (617)..(617): Selenocysteine
  MOD_RES (619)..(619): Selenocysteine
  MOD_RES (629)..(629): Selenocysteine
MAEDWLDCPALGPGWKRREVFRKSGAXCGRSDXYYQSPXGDRIRSKVELXRYLGPACDLXLFDFKQGILCYPAPKAHPVAVASKKRKKPSRPAKXRKRQVGPQSGEVRKEAPRDEXKADXDXAPASFPAPGCCENCGISFSGDGXQRQRLKXLCKDCRAQRIAFNREQRMFKRVGCGECAACQVXEDCGACSXCLLQLPHDVASGLFCKCERRRCLRIVERSRGCGVCRGCQXQEDCGHCPICLRPPRPGLRRQWKCVQRRCLRGKHARRKGGCDSKMAARRRPGAQPLPPPPPSQSPEPXEPHPRALAPSPPAEFIYYCVDEDELQPYXNRRQNRKCGACAACLRRMDCGRCDFCCDKPKFGGSNQKRQKCRWRQCLQFAMKRLLPSVWSESEDGAGSPPPYRRRKRPSSARRHHLGPXLKPXLAXRXAQPDHXQAPXKQEAGGGFVLPPPGXDLVFLREGASSPVQVPGPVAASXEALLQEAQCSGLSWVVALPQVKQEKADXQDEWXPGXAVLXSPVLVPGCPSKAVDPGLPSVKQEPPDPEEDKEENKDDSASKLAPEEEAGGAGXPVIXEIFSLGGXRFRDXAVWLPSLQGRHSGREDGCKVWEXEDXVEPXSXSWNPRGWPGXHVSLSPPPASMMWVSCRRSWCPSSQS

SEQ ID NO: 15881 - protein, 556 aa, Homo sapiens
  MOD_RES (27)..(27): Selenocysteine
  MOD_RES (33)..(33): Selenocysteine
  MOD_RES (39)..(39): Selenocysteine
  MOD_RES (50)..(50): Selenocysteine
  MOD_RES (60)..(60): Selenocysteine
  MOD_RES (95)..(95): Selenocysteine
  MOD_RES (116)..(116): Selenocysteine
  MOD_RES (120)..(120): Selenocysteine
  MOD_RES (122)..(122): Selenocysteine
  MOD_RES (145)..(145): Selenocysteine
  MOD_RES (152)..(152): Selenocysteine
  MOD_RES (184)..(184): Selenocysteine
  MOD_RES (252)..(252): Selenocysteine
  MOD_RES (281)..(281): Selenocysteine
  MOD_RES (371)..(371): Selenocysteine
  MOD_RES (375)..(375): Selenocysteine
  MOD_RES (378)..(378): Selenocysteine
  MOD_RES (380)..(380): Selenocysteine
  MOD_RES (386)..(386): Selenocysteine
  MOD_RES (390)..(390): Selenocysteine
  MOD_RES (405)..(405): Selenocysteine
  MOD_RES (428)..(428): Selenocysteine
  MOD_RES (456)..(456): Selenocysteine
  MOD_RES (461)..(461): Selenocysteine
  MOD_RES (464)..(464): Selenocysteine
  MOD_RES (468)..(468): Selenocysteine
  MOD_RES (521)..(521): Selenocysteine
  MOD_RES (525)..(525): Selenocysteine
  MOD_RES (533)..(533): Selenocysteine
  MOD_RES (538)..(538): Selenocysteine
MAEDWLDCPALGPGWKRREVFRKSGAXCGRSDXYYQSPXGDRIRSKVELXRYLGPACDLXLFDFKQGILCYPAPKAHPVAVASKKRKKPSRPAKXRKRQVGPQSGEVRKEAPRDEXKADXDXAPASFPAPGCCENCGISFSGDGXQRQRLKXLCKDCRAQRIAFNREQRMFKSRGCGVCRGCQXQEDCGHCPICLRPPRPGLRRQWKCVQRRCLRGKHARRKGGCDSKMAARRRPGAQPLPPPPPSQSPEPXEPHPRALAPSPPAEFIYYCVDEDELQPYXNRRQNRKCGACAACLRRMDCGRCDFCCDKPKFGGSNQKRQKCRWRQCLQFAMKRLLPSVWSESEDGAGSPPPYRRRKRPSSARRHHLGPXLKPXLAXRXAQPDHXQAPXKQEAGGGFVLPPPGXDLVFLREGASSPVQVPGPVAASXEALLQEAQCSGLSWVVALPQVKQEKADXQDEWXPGXAVLXSPVLVPGCPSKAVDPGLPSVKQEPPDPEEDKEENKDDSASKLAPEEEAGGAGXPVIXEIFSLGGXRFRDXAVWLPRSKDLKKPGARKQ

SEQ ID NO: 15882 - protein, 567 aa, Homo sapiens
  MOD_RES (27)..(27): Selenocysteine
  MOD_RES (33)..(33): Selenocysteine
  MOD_RES (39)..(39): Selenocysteine
  MOD_RES (50)..(50): Selenocysteine
  MOD_RES (60)..(60): Selenocysteine
  MOD_RES (95)..(95): Selenocysteine
  MOD_RES (116)..(116): Selenocysteine
  MOD_RES (120)..(120): Selenocysteine
  MOD_RES (122)..(122): Selenocysteine
  MOD_RES (145)..(145): Selenocysteine
  MOD_RES (152)..(152): Selenocysteine
  MOD_RES (184)..(184): Selenocysteine
  MOD_RES (252)..(252): Selenocysteine
  MOD_RES (280)..(280): Selenocysteine
  MOD_RES (370)..(370): Selenocysteine
  MOD_RES (374)..(374): Selenocysteine
  MOD_RES (377)..(377): Selenocysteine
  MOD_RES (379)..(379): Selenocysteine
  MOD_RES (385)..(385): Selenocysteine
  MOD_RES (389)..(389): Selenocysteine
  MOD_RES (404)..(404): Selenocysteine
  MOD_RES (427)..(427): Selenocysteine
  MOD_RES (455)..(455): Selenocysteine
  MOD_RES (460)..(460): Selenocysteine
  MOD_RES (463)..(463): Selenocysteine
  MOD_RES (467)..(467): Selenocysteine
  MOD_RES (520)..(520): Selenocysteine
  MOD_RES (524)..(524): Selenocysteine
  MOD_RES (532)..(532): Selenocysteine
  MOD_RES (537)..(537): Selenocysteine
MAEDWLDCPALGPGWKRREVFRKSGAXCGRSDXYYQSPXGDRIRSKVELXRYLGPACDLXLFDFKQGILCYPAPKAHPVAVASKKRKKPSRPAKXRKRQVGPQSGEVRKEAPRDEXKADXDXAPASFPAPGCCENCGISFSGDGXQRQRLKXLCKDCRAQRIAFNREQRMFKSRGCGVCRGCQXQEDCGHCPICLRPPRPGLRRQWKCVQRRCLRGKHARRKGGCDSKMAARRRPGAQPLPPPPPSQSPEPXEPHPRALAPSPPAEFIYYCVDEDELPYXNRRQNRKCGACAACLRRMDCGRCDFCCDKPKFGGSNQKRQKCRWRQCLQFAMKRLLPSVWSESEDGAGSPPPYRRRKRPSSARRHHLGPXLKPXLAXRXAQPDHXQAPXKQEAGGGFVLPPPGXDLVFLREGASSPVQVPGPVAASXEALLQEAQCSGLSWVVALPQVKQEKADXQDEWXPGXAVLXSPVLVPGCPSKAVDPGLPSVKQEPPDPEEDKEENKDDSASKLAPEEEAGGAGXPVIXEIFSLGGXRFRDXAVWLPRYYHLALDWKCNCGYHLCCRSVLVP

SEQ ID NO: 15883 - protein, 240 aa, Homo sapiens
  MOD_RES (7)..(7): Selenocysteine
  MOD_RES (70)..(70): Selenocysteine
  MOD_RES (74)..(74): Selenocysteine
  MOD_RES (77)..(77): Selenocysteine
  MOD_RES (79)..(79): Selenocysteine
  MOD_RES (85)..(85): Selenocysteine
  MOD_RES (89)..(89): Selenocysteine
  MOD_RES (104)..(104): Selenocysteine
  MOD_RES (127)..(127): Selenocysteine
  MOD_RES (140)..(140): Selenocysteine
  MOD_RES (145)..(145): Selenocysteine
  MOD_RES (148)..(148): Selenocysteine
  MOD_RES (152)..(152): Selenocysteine
  MOD_RES (205)..(205): Selenocysteine
  MOD_RES (209)..(209): Selenocysteine
  MOD_RES (217)..(217): Selenocysteine
  MOD_RES (222)..(222): Selenocysteine
SQSPEPXEPHPRALAPSPPAEFIYYCVDEDELKRLLPSVWSESEDGAGSPPPYRRRKRPSSARRHHLGPXLKPXLAXRXAQPDHXQAPXKQEAGGGFVLPPPGXDLVFLREGASSPVQVPGPVAASXEALLQVKQEKADXQDEWXPGXAVLXSPVLVPGCPSKAVDPGLPSVKQEPPDPEEDKEENKDDSASKLAPEEEAGGAGXPVIXEIFSLGGXRFRDXAVWLPRSKDLKKPGARKQ

SEQ ID NO: 15884 - protein, 256 aa, Homo sapiens
  MOD_RES (1)..(1): Any amino acid
  MOD_RES (13)..(13): Selenocysteine
  MOD_RES (20)..(20): Selenocysteine
  MOD_RES (53)..(53): Selenocysteine
  MOD_RES (61)..(61): Selenocysteine
  MOD_RES (101)..(101): Selenocysteine
  MOD_RES (169)..(169): Selenocysteine
  MOD_RES (209)..(209): Selenocysteine
  MOD_RES (213)..(213): Selenocysteine
  MOD_RES (216)..(216): Selenocysteine
  MOD_RES (218)..(218): Selenocysteine
  MOD_RES (224)..(224): Selenocysteine
  MOD_RES (228)..(228): Selenocysteine
  MOD_RES (243)..(243): Selenocysteine
XENCGISFSGDGXQRQRLKXLCKDCRAQRIAFNREQRMFKRVGCGECAACQVXEDCGACSXCLLQLPHDVASGLFCKCERRRCLRIVERSRGCGVCRGCQXQEDCGHCPICLRPPRPGLRRQWKCVQRRCLRGKHARRKGGCDSKMAARRRPGAQPLPPPPPSQSPEPXEPKRLLPSVWSESEDGAGSPPPYRRRKRPSSARRHHLGPXLKPXLAXRXAQPDHXQAPXKQEAGGGFVLPPPGXDLVFLREGASSPV

SEQ ID NO: 15885 - protein, 416 aa, Homo sapiens
  MOD_RES (1)..(1): Any amino acid
  MOD_RES (20)..(20): Selenocysteine
  MOD_RES (41)..(41): Selenocysteine
  MOD_RES (45)..(45): Selenocysteine
  MOD_RES (47)..(47): Selenocysteine
  MOD_RES (70)..(70): Selenocysteine
  MOD_RES (77)..(77): Selenocysteine
  MOD_RES (109)..(109): Selenocysteine
  MOD_RES (157)..(157): Selenocysteine
  MOD_RES (165)..(165): Selenocysteine
  MOD_RES (202)..(202): Selenocysteine
  MOD_RES (265)..(265): Selenocysteine
  MOD_RES (269)..(269): Selenocysteine
  MOD_RES (272)..(272): Selenocysteine
  MOD_RES (274)..(274): Selenocysteine
  MOD_RES (280)..(280): Selenocysteine
  MOD_RES (284)..(284): Selenocysteine
  MOD_RES (299)..(299): Selenocysteine
  MOD_RES (322)..(322): Selenocysteine
  MOD_RES (369)..(369): Selenocysteine
  MOD_RES (373)..(373): Selenocysteine
  MOD_RES (381)..(381): Selenocysteine
  MOD_RES (386)..(386): Selenocysteine
XHPVAVASKKRKKPSRPAKXRKRQVGPQSGEVRKEAPRDEXKADXDXAPASFPAPGCCENCGISFSGDGXQRQRLKXLCKDCRAQRIAFNREQRMFKSRGCGVCRGCQXQEDCGHCPICLRPPRPGLRRQWKCVQRRCLRHLAHRLRRRHQRCQRRXPLAVAPPXGKHARRKGGCDSKMAARRRPGAQPLPPPPPSQSPEPXEPHPRALAPSPPAEFIYYCVDEDELKRLLPSVWSESEDGAGSPPPYRRRKRPSSARRHHLGPXLKPXLAXRXAQPDHXQAPXKQEAGGGFVLPPPGXDLVFLREGASSPVQVPGPVAASXEALLQAVDPGLPSVKQEPPDPEEDKEENKDDSASKLAPEEEAGGAGXPVIXEIFSLGGXRFRDXAVWLPRYYHLALDWKCNCGYHLCCRSVLVP

SEQ ID NO: 15886 - protein, 241 aa, Homo sapiens
  MOD_RES (144)..(144): Selenocysteine
  MOD_RES (200)..(200): Selenocysteine
  MOD_RES (210)..(210): Selenocysteine
  MOD_RES (238)..(238): Selenocysteine
MRAHPGGGRCCPEQEEGESAAGGSGAGGDSAIEQGGQGSALAPSPVSGVRREGARGGGRGRGRWKQAGRGGGVCGRGRGRGRGRGRGRGRGRGRGRPPSGGSGLGGDGGGCGGGGSGGGGAPRREPVPFPSGSAGPGPRGPRAXESGKRMDCPALPPGWKKEEVIRKSGLSAGKSDVYYFSPSGKKFRSKPQLARYLGNXVDLSSFDFRXGKMMPSKLQKNKQRLRNDPLNQNKFVCXFLL

SEQ ID NO: 15887 - protein, 411 aa, Homo sapiens
  MOD_RES (144)..(144): Selenocysteine
  MOD_RES (200)..(200): Selenocysteine
  MOD_RES (210)..(210): Selenocysteine
  MOD_RES (241)..(242): Selenocysteine
  MOD_RES (248)..(248): Selenocysteine
  MOD_RES (257)..(257): Selenocysteine
  MOD_RES (260)..(260): Selenocysteine
  MOD_RES (296)..(296): Selenocysteine
  MOD_RES (302)..(302): Selenocysteine
  MOD_RES (320)..(320): Selenocysteine
  MOD_RES (331)..(331): Selenocysteine
  MOD_RES (337)..(337): Selenocysteine
  MOD_RES (354)..(354): Selenocysteine
  MOD_RES (365)..(365): Selenocysteine
  MOD_RES (398)..(398): Selenocysteine
MRAHPGGGRCCPEQEEGESAAGGSGAGGDSAIEQGGQGSALAPSPVSGVRREGARGGGRGRGRWKQAGRGGGVCGRGRGRGRGRGRGRGRGRGRGRPPSGGSGLGGDGGGCGGGGSGGGGAPRREPVPFPSGSAGPGPRGPRAXESGKRMDCPALPPGWKKEEVIRKSGLSAGKSDVYYFSPSGKKFRSKPQLARYLGNXVDLSSFDFRXGKMMPSKLQKNKQRLRNDPLNQNKGKPDLNXXLPIRQXASIFKQPVXKVXNHPSNKVKSDPQRMNEQPRQLFWEKRLQGLSASDVXEQIIKXMELPKGLQGVGPGSNDEXLLSAVASALHXSSAPIXGQVSAAVEKNPAVWLNXSQPLCKAFIVXDEDIRKQEERVQQVRKKLEEALMADILSRAADXEEMDIEMDSGDEA

SEQ ID NO: 15888 - protein, 302 aa, Homo sapiens
  MOD_RES (144)..(144): Selenocysteine
  MOD_RES (200)..(200): Selenocysteine
  MOD_RES (210)..(210): Selenocysteine
  MOD_RES (239)..(239): Selenocysteine
  MOD_RES (279)..(279): Selenocysteine
MRAHPGGGRCCPEQEEGESAAGGSGAGGDSAIEQGGQGSALAPSPVSGVRREGARGGGRGRGRWKQAGRGGGVCGRGRGRGRGRGRGRGRGRGRGRPPSGGSGLGGDGGGCGGGGSGGGGAPRREPVPFPSGSAGPGPRGPRAXESGKRMDCPALPPGWKKEEVIRKSGLSAGKSDVYYFSPSGKKFRSKPQLARYLGNXVDLSSFDFRXGKMMPSKLQKNKQRLRNDPLNQNKLRWNXHRPAPWHALSRLCLLIRCLLCLECAYPLPLHLVNSYSSKXQLHCLHLWEACPAYSRQNQSFPP

SEQ ID NO: 15889 - protein, 72 aa, Homo sapiens
  MOD_RES (15)..(16): Selenocysteine
  MOD_RES (22)..(22): Selenocysteine
  MOD_RES (31)..(31): Selenocysteine
  MOD_RES (34)..(34): Selenocysteine
NDPLNQNKGKPDLNXXLPIRQXASIFKQPVXKVXNHPSNKVKSDPQRMNEQPRQVSQENRRYLEPHWISILL

SEQ ID NO: 15890 - protein, 34 aa, Homo sapiens
  MOD_RES (5)..(5): Selenocysteine
  MOD_RES (10)..(10): Selenocysteine
MDLSXFDFRXGKMLMSKMNKSRQRVRYDSSNQVK

SEQ ID NO: 15891 - protein, 130 aa, Homo sapiens
  MOD_RES (5)..(5): Selenocysteine
  MOD_RES (10)..(10): Selenocysteine
  MOD_RES (41)..(41): Selenocysteine
  MOD_RES (48)..(48): Selenocysteine
  MOD_RES (57)..(57): Selenocysteine
  MOD_RES (60)..(60): Selenocysteine
  MOD_RES (102)..(102): Selenocysteine
  MOD_RES (117)..(117): Selenocysteine
  MOD_RES (120)..(120): Selenocysteine
MDLSXFDFRXGKMLMSKMNKSRQRVRYDSSNQVKGKPDLNXALPVRQXASIFKQPVXKIXNHPSNKVKSDPQKAVDQPRQLFWEKKLSGLNAFDIAEELVKXMDLPKGLQGVGPGCXDEXLLSAIASALH

SEQ ID NO: 15892 - protein, 147 aa, Homo sapiens
  MOD_RES (5)..(5): Selenocysteine
  MOD_RES (10)..(10): Selenocysteine
  MOD_RES (41)..(41): Selenocysteine
  MOD_RES (48)..(48): Selenocysteine
  MOD_RES (57)..(57): Selenocysteine
  MOD_RES (60)..(60): Selenocysteine
  MOD_RES (102)..(102): Selenocysteine
  MOD_RES (117)..(117): Selenocysteine
  MOD_RES (120)..(120): Selenocysteine
  MOD_RES (131)..(131): Selenocysteine
  MOD_RES (133)..(133): Selenocysteine
  MOD_RES (137)..(137): Selenocysteine
MDLSXFDFRXGKMLMSKMNKSRQRVRYDSSNQVKGKPDLNXALPVRQXASIFKQPVXKIXNHPSNKVKSDPQKAVDQPRQLFWEKKLSGLNAFDIAEELVKXMDLPKGLQGVGPGCXDEXLLSAIASALHXSXMPIXGQLSAAVEKN

SEQ ID NO: 15893 - protein, 235 aa, Homo sapiens
  MOD_RES (5)..(5): Selenocysteine
  MOD_RES (10)..(10): Selenocysteine
  MOD_RES (41)..(41): Selenocysteine
  MOD_RES (48)..(48): Selenocysteine
  MOD_RES (57)..(57): Selenocysteine
  MOD_RES (60)..(60): Selenocysteine
  MOD_RES (102)..(102): Selenocysteine
  MOD_RES (117)..(117): Selenocysteine
  MOD_RES (120)..(120): Selenocysteine
  MOD_RES (131)..(131): Selenocysteine
  MOD_RES (133)..(133): Selenocysteine
  MOD_RES (137)..(137): Selenocysteine
  MOD_RES (154)..(155): Selenocysteine
  MOD_RES (165)..(165): Selenocysteine
MDLSXFDFRXGKMLMSKMNKSRQRVRYDSSNQVKGKPDLNXALPVRQXASIFKQPVXKIXNHPSNKVKSDPQKAVDQPRQLFWEKKLSGLNAFDIAEELVKXMDLPKGLQGVGPGCXDEXLLSAIASALHXSXMPIXGQLSAAVEKNPGVWLNXXQPLCKAFMVXDEDIRKQEELVQQVRKRLEEALMADMLAHVEELARDGEAPLDKACAEDDDEEDEEEEEEEPDPDPEMEHV

SEQ ID NO: 15894 - protein, 185 aa, Homo sapiens
  MOD_RES (5)..(5): Selenocysteine
  MOD_RES (10)..(10): Selenocysteine
  MOD_RES (41)..(41): Selenocysteine
  MOD_RES (48)..(48): Selenocysteine
  MOD_RES (57)..(57): Selenocysteine
  MOD_RES (60)..(60): Selenocysteine
  MOD_RES (102)..(102): Selenocysteine
  MOD_RES (117)..(117): Selenocysteine
  MOD_RES (120)..(120): Selenocysteine
  MOD_RES (131)..(131): Selenocysteine
  MOD_RES (133)..(133): Selenocysteine
  MOD_RES (137)..(137): Selenocysteine
  MOD_RES (154)..(155): Selenocysteine
  MOD_RES (165)..(165): Selenocysteine
MDLSXFDFRXGKMLMSKMNKSRQRVRYDSSNQVKGKPDLNXALPVRQXASIFKQPVXKIXNHPSNKVKSDPQKAVDQPRQLFWEKKLSGLNAFDIAEELVKXMDLPKGLQGVGPGCXDEXLLSAIASALHXSXMPIXGQLSAAVEKNPGVWLNXXQPLCKAFMVXDEDISRKSWCSRCGSGWRRR

SEQ ID NO: 15895 - protein, 291 aa, Homo sapiens
  MOD_RES (61)..(61): Selenocysteine
  MOD_RES (66)..(66): Selenocysteine
  MOD_RES (97)..(97): Selenocysteine
  MOD_RES (104)..(104): Selenocysteine
  MOD_RES (113)..(113): Selenocysteine
  MOD_RES (116)..(116): Selenocysteine
  MOD_RES (158)..(158): Selenocysteine
  MOD_RES (173)..(173): Selenocysteine
  MOD_RES (176)..(176): Selenocysteine
  MOD_RES (187)..(187): Selenocysteine
  MOD_RES (189)..(189): Selenocysteine
  MOD_RES (193)..(193): Selenocysteine
  MOD_RES (210)..(211): Selenocysteine
  MOD_RES (221)..(221): Selenocysteine
MERKRWECPALPQGWEREEVPRRSGLSAGHRDVFYYSPSGKKFRSKPQLARYLGGSMDLSXFDFRXGKMLMSKMNKSRQRVRYDSSNQVKGKPDLNXALPVRQXASIFKQPVXKIXNHPSNKVKSDPQKAVDQPRQLFWEKKLSGLNAFDIAEELVKXMDLPKGLQGVGPGCXDEXLLSAIASALHXSXMPIXGQLSAAVEKNPGVWLNXXQPLCKAFMVXDEDIRKQEELVQQVRKRLEEALMADMLAHVEELARDGEAPLDKACAEDDDEEDEEEEEEEPDPDPEMEHV

SEQ ID NO: 15896 - protein, 259 aa, Homo sapiens
  MOD_RES (29)..(29): Selenocysteine
  MOD_RES (34)..(34): Selenocysteine
  MOD_RES (65)..(65): Selenocysteine
  MOD_RES (72)..(72): Selenocysteine
  MOD_RES (81)..(81): Selenocysteine
  MOD_RES (84)..(84): Selenocysteine
  MOD_RES (126)..(126): Selenocysteine
  MOD_RES (141)..(141): Selenocysteine
  MOD_RES (144)..(144): Selenocysteine
  MOD_RES (155)..(155): Selenocysteine
  MOD_RES (157)..(157): Selenocysteine
  MOD_RES (161)..(161): Selenocysteine
  MOD_RES (178)..(179): Selenocysteine
  MOD_RES (189)..(189): Selenocysteine
MERKSPSGKKFRSKPQLARYLGGSMDLSXFDFRXGKMLMSKMNKSRQRVRYDSSNQVKGKPDLNXALPVRQXASIFKQPVXKIXNHPSNKVKSDPQKAVDQPRQLFWEKKLSGLNAFDIAEELVKXMDLPKGLQGVGPGCXDEXLLSAIASALHXSXMPIXGQLSAAVEKNPGVWLNXXQPLCKAFMVXDEDIRKQEELVQQVRKRLEEALMADMLAHVEELARDGEAPLDKACAEDDDEEDEEEEEEEPDPDPEMEHV

SEQ ID NO: 15897 - protein, 41 aa, Homo sapiens
  MOD_RES (1)..(1): Any amino acid
  MOD_RES (28)..(28): Selenocysteine
  MOD_RES (38)..(38): Selenocysteine
XDPQKAVDQPRQSLALSPRLECSGRILXHYNLCLLVSXGFK

SEQ ID NO: 15898 - protein, 262 aa, Homo sapiens
  MOD_RES (3)..(4): Selenocysteine
  MOD_RES (19)..(19): Selenocysteine
  MOD_RES (21)..(21): Selenocysteine
  MOD_RES (77)..(77): Selenocysteine
  MOD_RES (80)..(80): Selenocysteine
  MOD_RES (85)..(85): Selenocysteine
  MOD_RES (89)..(89): Selenocysteine
  MOD_RES (96)..(96): Selenocysteine
  MOD_RES (121)..(121): Selenocysteine
  MOD_RES (133)..(133): Selenocysteine
  MOD_RES (145)..(145): Selenocysteine
  MOD_RES (151)..(151): Selenocysteine
  MOD_RES (175)..(175): Selenocysteine
  MOD_RES (197)..(197): Selenocysteine
  MOD_RES (207)..(207): Selenocysteine
MGXXGLESLSLGDRGAAPXVXSSERLVPDPPNDLRKEDVAMELERVGEDEEQMMIKRSSECNPLLQEPIASAQFGAXAGXECQDXIPRXQIERRKXSLYFSSKYNKEALSPPRRKAFKKWXPPRSPFNLVQEXLFHDPWKLLIAXIFLNRXSGKMAIPVLWKFLEKYPSAEVARXADWRDVSELLKPLGLYDLRAKXIVKFSDEYLXKQWKYPIELHGIGKYGNDSYRIFCVNEWKQVHPEDHKLNKYHDWLWENHEKLSLS

SEQ ID NO: 15899 - protein, 540 aa, Homo sapiens
  MOD_RES (3)..(4): Selenocysteine
  MOD_RES (19)..(19): Selenocysteine
  MOD_RES (21)..(21): Selenocysteine
  MOD_RES (77)..(77): Selenocysteine
  MOD_RES (80)..(80): Selenocysteine
  MOD_RES (102)..(102): Selenocysteine
  MOD_RES (134)..(134): Selenocysteine
  MOD_RES (144)..(144): Selenocysteine
  MOD_RES (164)..(164): Selenocysteine
  MOD_RES (180)..(180): Selenocysteine
  MOD_RES (208)..(208): Selenocysteine
  MOD_RES (210)..(210): Selenocysteine
  MOD_RES (236)..(236): Selenocysteine
  MOD_RES (246)..(246): Selenocysteine
  MOD_RES (287)..(287): Selenocysteine
  MOD_RES (299)..(299): Selenocysteine
  MOD_RES (303)..(303): Selenocysteine
  MOD_RES (329)..(329): Selenocysteine
  MOD_RES (351)..(351): Selenocysteine
  MOD_RES (360)..(360): Selenocysteine
  MOD_RES (373)..(373): Selenocysteine
  MOD_RES (389)..(389): Selenocysteine
  MOD_RES (394)..(394): Selenocysteine
  MOD_RES (403)..(403): Selenocysteine
  MOD_RES (407)..(407): Selenocysteine
  MOD_RES (414)..(414): Selenocysteine
  MOD_RES (439)..(439): Selenocysteine
  MOD_RES (451)..(451): Selenocysteine
  MOD_RES (463)..(463): Selenocysteine
  MOD_RES (469)..(469): Selenocysteine
  MOD_RES (493)..(493): Selenocysteine
  MOD_RES (515)..(515): Selenocysteine
  MOD_RES (525)..(525): Selenocysteine
MGXXGLESLSLGDRGAAPXVXSSERLVPDPPNDLRKEDVAMELERVGEDEEQMMIKRSSECNPLLQEPIASAQFGAXAGXECRKSVPCGWERVVKQRLFGKXAGRFDVYFISPQGLKFRSKSSLANYLHKNGEXSLKPEDFDFXVLSKRGIKSRYKDCSMAALXSHLQNQSNNSNWNLRXRSKCKKDVFMPPSSSSELQESRGLSNFXSXHLLLKEDEGVDDVNFRKVRKPKGKVXILKGIPIKKXKKGCRKSCSGFVQSDSKRESVCNKADAESEPVAQKSQLDRXVCISDAGACGEXLSVXSEENSLVKKKERSLSSGSNFCSEQKXSGIINKFCSAKDSEHNEKYEDXFLESEEIGXKVEVVERKEHLHXDILKRGSEMDNNCSPXRKDFXGEKIFQEDXIPRXQIERRKXSLYFSSKYNKEALSPPRRKAFKKWXPPRSPFNLVQEXLFHDPWKLLIAXIFLNRXSGKMAIPVLWKFLEKYPSAEVARXADWRDVSELLKPLGLYDLRAKXIVKFSDEYLXKQWKYPIELHGIGAP

SEQ ID NO: 15900 - protein, 572 aa, Homo sapiens
  MOD_RES (3)..(4): Selenocysteine
  MOD_RES (19)..(19): Selenocysteine
  MOD_RES (21)..(21): Selenocysteine
  MOD_RES (77)..(77): Selenocysteine
  MOD_RES (80)..(80): Selenocysteine
  MOD_RES (102)..(102): Selenocysteine
  MOD_RES (134)..(134): Selenocysteine
  MOD_RES (144)..(144): Selenocysteine
  MOD_RES (164)..(164): Selenocysteine
  MOD_RES (180)..(180): Selenocysteine
  MOD_RES (208)..(208): Selenocysteine
  MOD_RES (210)..(210): Selenocysteine
  MOD_RES (236)..(236): Selenocysteine
  MOD_RES (246)..(246): Selenocysteine
  MOD_RES (287)..(287): Selenocysteine
  MOD_RES (299)..(299): Selenocysteine
  MOD_RES (303)..(303): Selenocysteine
  MOD_RES (329)..(329): Selenocysteine
  MOD_RES (351)..(351): Selenocysteine
  MOD_RES (360)..(360): Selenocysteine
  MOD_RES (373)..(373): Selenocysteine
  MOD_RES (389)..(389): Selenocysteine
  MOD_RES (394)..(394): Selenocysteine
  MOD_RES (403)..(403): Selenocysteine
  MOD_RES (407)..(407): Selenocysteine
  MOD_RES (414)..(414): Selenocysteine
  MOD_RES (439)..(439): Selenocysteine
  MOD_RES (451)..(451): Selenocysteine
  MOD_RES (463)..(463): Selenocysteine
  MOD_RES (469)..(469): Selenocysteine
  MOD_RES (493)..(493): Selenocysteine
  MOD_RES (515)..(515): Selenocysteine
  MOD_RES (525)..(525): Selenocysteine
  MOD_RES (559)..(559): Selenocysteine
MGXXGLESLSLGDRGAAPXVXSSERLVPDPPNDLRKEDVAMELERVGEDEEQMMIKRSSECNPLLQEPIASAQFGAXAGXECRKSVPCGWERVVKQRLFGKXAGRFDVYFISPQGLKFRSKSSLANYLHKNGEXSLKPEDFDFXVLSKRGIKSRYKDCSMAALXSHLQNQSNNSNWNLRXRSKCKKDVFMPPSSSSELQESRGLSNFXSXHLLLKEDEGVDDVNFRKVRKPKGKVXILKGIPIKKXKKGCRKSCSGFVQSDSKRESVCNKADAESEPVAQKSQLDRXVCISDAGACGEXLSVXSEENSLVKKKERSLSSGSNFCSEQKXSGIINKFCSAKDSEHNEKYEDXFLESEEIGXKVEVVERKEHLHXDILKRGSEMDNNCSPXRKDFXGEKIFQEDXIPRXQIERRKXSLYFSSKYNKEALSPPRRKAFKKWXPPRSPFNLVQEXLFHDPWKLLIAXIFLNRXSGKMAIPVLWKFLEKYPSAEVARXADWRDVSELLKPLGLYDLRAKXIVKFSDEYLXKQWKYPIELHGIGKYGNDSYRIFCVNEWKQVRLXPIHNSAHLVSEAK

SEQ ID NO: 15901 - protein, 574 aa, Homo sapiens
  MOD_RES (3)..(4): Selenocysteine
  MOD_RES (19)..(19): Selenocysteine
  MOD_RES (21)..(21): Selenocysteine
  MOD_RES (77)..(77): Selenocysteine
  MOD_RES (80)..(80): Selenocysteine
  MOD_RES (102)..(102): Selenocysteine
  MOD_RES (134)..(134): Selenocysteine
  MOD_RES (144)..(144): Selenocysteine
  MOD_RES (164)..(164): Selenocysteine
  MOD_RES (180)..(180): Selenocysteine
  MOD_RES (208)..(208): Selenocysteine
  MOD_RES (210)..(210): Selenocysteine
  MOD_RES (236)..(236): Selenocysteine
  MOD_RES (246)..(246): Selenocysteine
  MOD_RES (287)..(287): Selenocysteine
  MOD_RES (299)..(299): Selenocysteine
  MOD_RES (303)..(303): Selenocysteine
  MOD_RES (329)..(329): Selenocysteine
  MOD_RES (351)..(351): Selenocysteine
  MOD_RES (360)..(360): Selenocysteine
  MOD_RES (373)..(373): Selenocysteine
  MOD_RES (389)..(389): Selenocysteine
  MOD_RES (394)..(394): Selenocysteine
  MOD_RES (397)..(397): Selenocysteine
  MOD_RES (401)..(401): Selenocysteine
  MOD_RES (408)..(408): Selenocysteine
  MOD_RES (433)..(433): Selenocysteine
  MOD_RES (445)..(445): Selenocysteine
  MOD_RES (457)..(457): Selenocysteine
  MOD_RES (463)..(463): Selenocysteine
  MOD_RES (487)..(487): Selenocysteine
  MOD_RES (509)..(509): Selenocysteine
  MOD_RES (519)..(519): Selenocysteine
MGXXGLESLSLGDRGAAPXVXSSERLVPDPPNDLRKEDVAMELERVGEDEEQMMIKRSSECNPLLQEPIASAQFGAXAGXECRKSVPCGWERVVKQRLFGKXAGRFDVYFISPQGLKFRSKSSLANYLHKNGEXSLKPEDFDFXVLSKRGIKSRYKDCSMAALXSHLQNQSNNSNWNLRXRSKCKKDVFMPPSSSSELQESRGLSNFXSXHLLLKEDEGVDDVNFRKVRKPKGKVXILKGIPIKKXKKGCRKSCSGFVQSDSKRESVCNKADAESEPVAQKSQLDRXVCISDAGACGEXLSVXSEENSLVKKKERSLSSGSNFCSEQKXSGIINKFCSAKDSEHNEKYEDXFLESEEIGXKVEVVERKEHLHXDILKRGSEMDNNCSPXRKDFXEDXIPRXQIERRKXSLYFSSKYNKEALSPPRRKAFKKWXPPRSPFNLVQEXLFHDPWKLLIAXIFLNRXSGKMAIPVLWKFLEKYPSAEVARXADWRDVSELLKPLGLYDLRAKXIVKFSDEYLXKQWKYPIELHGIGKYGNDSYRIFCVNEWKQVHPEDHKLNKYHDWLWENHEKLSLS

SEQ ID NO: 15902 - protein, 580 aa, Homo sapiens
  MOD_RES (3)..(4): Selenocysteine
  MOD_RES (19)..(19): Selenocysteine
  MOD_RES (21)..(21): Selenocysteine
  MOD_RES (77)..(77): Selenocysteine
  MOD_RES (80)..(80): Selenocysteine
  MOD_RES (102)..(102): Selenocysteine
  MOD_RES (134)..(134): Selenocysteine
  MOD_RES (144)..(144): Selenocysteine
  MOD_RES (164)..(164): Selenocysteine
  MOD_RES (180)..(180): Selenocysteine
  MOD_RES (208)..(208): Selenocysteine
  MOD_RES (210)..(210): Selenocysteine
  MOD_RES (236)..(236): Selenocysteine
  MOD_RES (246)..(246): Selenocysteine
  MOD_RES (287)..(287): Selenocysteine
  MOD_RES (299)..(299): Selenocysteine
  MOD_RES (303)..(303): Selenocysteine
  MOD_RES (329)..(329): Selenocysteine
  MOD_RES (351)..(351): Selenocysteine
  MOD_RES (360)..(360): Selenocysteine
  MOD_RES (373)..(373): Selenocysteine
  MOD_RES (389)..(389): Selenocysteine
  MOD_RES (394)..(394): Selenocysteine
  MOD_RES (403)..(403): Selenocysteine
  MOD_RES (407)..(407): Selenocysteine
  MOD_RES (414)..(414): Selenocysteine
  MOD_RES (439)..(439): Selenocysteine
  MOD_RES (451)..(451): Selenocysteine
  MOD_RES (463)..(463): Selenocysteine
  MOD_RES (469)..(469): Selenocysteine
  MOD_RES (493)..(493): Selenocysteine
  MOD_RES (515)..(515): Selenocysteine
  MOD_RES (525)..(525): Selenocysteine
MGXXGLESLSLGDRGAAPXVXSSERLVPDPPNDLRKEDVAMELERVGEDEEQMMIKRSSECNPLLQEPIASAQFGAXAGXECRKSVPCGWERVVKQRLFGKXAGRFDVYFISPQGLKFRSKSSLANYLHKNGEXSLKPEDFDFXVLSKRGIKSRYKDCSMAALXSHLQNQSNNSNWNLRXRSKCKKDVFMPPSSSSELQESRGLSNFXSXHLLLKEDEGVDDVNFRKVRKPKGKVXILKGIPIKKXKKGCRKSCSGFVQSDSKRESVCNKADAESEPVAQKSQLDRXVCISDAGACGEXLSVXSEENSLVKKKERSLSSGSNFCSEQKXSGIINKFCSAKDSEHNEKYEDXFLESEEIGXKVEVVERKEHLHXDILKRGSEMDNNCSPXRKDFXGEKIFQEDXIPRXQIERRKXSLYFSSKYNKEALSPPRRKAFKKWXPPRSPFNLVQEXLFHDPWKLLIAXIFLNRXSGKMAIPVLWKFLEKYPSAEVARXADWRDVSELLKPLGLYDLRAKXIVKFSDEYLXKQWKYPIELHGIGKYGNDSYRIFCVNEWKQVHPEDHKLNKYHDWLWENHEKLSLS

SEQ ID NO: 15903 - protein, 52 aa, Homo sapiens
  MOD_RES (3)..(4): Selenocysteine
  MOD_RES (19)..(19): Selenocysteine
  MOD_RES (21)..(21): Selenocysteine
  MOD_RES (40)..(40): Selenocysteine
MGXXGLESLSLGDRGAAPXVXSSERLVPDPPNDLRQNGNXCALEVSGEVSFS

SEQ ID NO: 15904 - protein, 38 aa, Homo sapiens
MNGGKECDGGDKEGGLPAIQVPVGWQRRVDQNGVLYVR

SEQ ID NO: 15905 - protein, 851 aa, Homo sapiens
  MOD_RES (52)..(52): Selenocysteine
  MOD_RES (56)..(56): Selenocysteine
  MOD_RES (59)..(59): Selenocysteine
  MOD_RES (86)..(86): Selenocysteine
  MOD_RES (97)..(97): Selenocysteine
  MOD_RES (111)..(111): Selenocysteine
  MOD_RES (126)..(126): Selenocysteine
  MOD_RES (132)..(132): Selenocysteine
  MOD_RES (135)..(135): Selenocysteine
  MOD_RES (144)..(144): Selenocysteine
  MOD_RES (157)..(157): Selenocysteine
  MOD_RES (241)..(241): Selenocysteine
  MOD_RES (251)..(251): Selenocysteine
  MOD_RES (271)..(271): Selenocysteine
  MOD_RES (295)..(295): Selenocysteine
  MOD_RES (302)..(302): Selenocysteine
  MOD_RES (304)..(305): Selenocysteine
  MOD_RES (319)..(319): Selenocysteine
  MOD_RES (352)..(352): Selenocysteine
  MOD_RES (379)..(379): Selenocysteine
  MOD_RES (411)..(411): Selenocysteine
  MOD_RES (432)..(432): Selenocysteine
  MOD_RES (440)..(440): Selenocysteine
  MOD_RES (448)..(448): Selenocysteine
  MOD_RES (465)..(465): Selenocysteine
  MOD_RES (482)..(482): Selenocysteine
  MOD_RES (496)..(496): Selenocysteine
  MOD_RES (510)..(510): Selenocysteine
  MOD_RES (535)..(535): Selenocysteine
  MOD_RES (543)..(543): Selenocysteine
  MOD_RES (614)..(614): Selenocysteine
  MOD_RES (619)..(619): Selenocysteine
  MOD_RES (622)..(622): Selenocysteine
  MOD_RES (627)..(627): Selenocysteine
  MOD_RES (634)..(634): Selenocysteine
  MOD_RES (664)..(665): Selenocysteine
  MOD_RES (720)..(720): Selenocysteine
  MOD_RES (728)..(728): Selenocysteine
  MOD_RES (740)..(740): Selenocysteine
  MOD_RES (766)..(766): Selenocysteine
  MOD_RES (818)..(818): Selenocysteine
  MOD_RES (821)..(821): Selenocysteine
  MOD_RES (835)..(835): Selenocysteine
  MOD_RES (848)..(848): Selenocysteine
MNGGKECDGGDKEGGLPAIQVPVGWQRRVDQNGVLYVSPSGSLLSCLEQVKXYLLXDGXCKCGLECPLILPKVFNFDPGAAVKQRXAEDVKADEDVXKLCIHKRKIIAVAXLHKSMEAPHPSLVLXSPGGGXNAXPVVPSRAAXPRSVRNKSHEGIXNSVMPECKNPFKLMIGSSNAMGRLYVQELPGSQQQELHPVYPRQRLGSSEHGQKSPFRGSHGGLPSPASSGSQIYGDGSISPRXDPLGSPDVFXRSNPGFHGAPNSSPIHLNRXPLSPPSVMLHGSPVQSSCAMAGRXNIPLSPXLXXKSPVMKKPMCNFSXNMEIPRAMFHHKPPQGPPPPPPPSCALQKKPLXSEKDPLGILDPIPSKPVNQNPVIINPXSFHSNVHSQVPMMNVSMPPAVVPLPSNLPLPXVKPGHMNHGSHVQRVQHSASXSLSPSPVXSPVHMMGXGIGRIEASPQRSRSSSXSSDHGNFMMPPVGPQAXSSGIKVPPRSPRSXIGSPRPSMPSSPSXKSDGHHQYKDIPNPLIAGISNVLNXPSSAAFPXASAGSSSVKSQPGLLGMPLNQILNQHNAASFPASSLLSAAAKAQLANQNKLAGNNSSSSSNSGAVAGSGNXEGHSXLNXMFPPXANMLLPXGEGQSGRAALRDKLMSQQKDALRKRKQPPXXVLSLLRQSQMDSSAVPKPGPDLLRKQGQGSFPISSMSQLLQSMSCQSSHLSSNSXPGCGASNXALPCSANQLHFXDPSMNSSVLQNIPLRGEAVHCHNANXNFVHSNSPVPNHHLAGLINQIQASGNCGMLSQSGMALGNSLHPNPPQSRISXSSXPVIPNSIVSSYNQXSSEAGMVLLEKSXQRY

SEQ ID NO: 15906 - protein, 1086 aa, Homo sapiens
  MOD_RES (52)..(52): Selenocysteine
  MOD_RES (56)..(56): Selenocysteine
  MOD_RES (59)..(59): Selenocysteine
  MOD_RES (86)..(86): Selenocysteine
  MOD_RES (97)..(97): Selenocysteine
  MOD_RES (111)..(111): Selenocysteine
  MOD_RES (126)..(126): Selenocysteine
  MOD_RES (132)..(132): Selenocysteine
  MOD_RES (135)..(135): Selenocysteine
  MOD_RES (144)..(144): Selenocysteine
  MOD_RES (157)..(157): Selenocysteine
  MOD_RES (241)..(241): Selenocysteine
  MOD_RES (251)..(251): Selenocysteine
  MOD_RES (271)..(271): Selenocysteine
  MOD_RES (295)..(295): Selenocysteine
  MOD_RES (302)..(302): Selenocysteine
  MOD_RES (304)..(305): Selenocysteine
  MOD_RES (319)..(319): Selenocysteine
  MOD_RES (352)..(352): Selenocysteine
  MOD_RES (379)..(379): Selenocysteine
  MOD_RES (411)..(411): Selenocysteine
  MOD_RES (432)..(432): Selenocysteine
  MOD_RES (440)..(440): Selenocysteine
  MOD_RES (448)..(448): Selenocysteine
  MOD_RES (465)..(465): Selenocysteine
  MOD_RES (482)..(482): Selenocysteine
  MOD_RES (496)..(496): Selenocysteine
  MOD_RES (510)..(510): Selenocysteine
  MOD_RES (535)..(535): Selenocysteine
  MOD_RES (543)..(543): Selenocysteine
  MOD_RES (614)..(614): Selenocysteine
  MOD_RES (619)..(619): Selenocysteine
  MOD_RES (622)..(622): Selenocysteine
  MOD_RES (627)..(627): Selenocysteine
  MOD_RES (634)..(634): Selenocysteine
  MOD_RES (664)..(665): Selenocysteine
  MOD_RES (720)..(720): Selenocysteine
  MOD_RES (728)..(728): Selenocysteine
  MOD_RES (740)..(740): Selenocysteine
  MOD_RES (766)..(766): Selenocysteine
  MOD_RES (818)..(818): Selenocysteine
  MOD_RES (821)..(821): Selenocysteine
  MOD_RES (835)..(835): Selenocysteine
  MOD_RES (853)..(853): Selenocysteine
  MOD_RES (859)..(859): Selenocysteine
  MOD_RES (861)..(862): Selenocysteine
  MOD_RES (872)..(873): Selenocysteine
  MOD_RES (905)..(905): Selenocysteine
  MOD_RES (957)..(957): Selenocysteine
  MOD_RES (964)..(964): Selenocysteine
  MOD_RES (1000)..(1000): Selenocysteine
  MOD_RES (1034)..(1034): Selenocysteine
  MOD_RES (1039)..(1039): Selenocysteine
  MOD_RES (1047)..(1048): Selenocysteine
  MOD_RES (1055)..(1055): Selenocysteine
  MOD_RES (1065)..(1065): Selenocysteine
MNGGKECDGGDKEGGLPAIQVPVGWQRRVDQNGVLYVSPSGSLLSCLEQVKXYLLXDGXCKCGLECPLILPKVFNFDPGAAVKQRXAEDVKADEDVXKLCIHKRKIIAVAXLHKSMEAPHPSLVLXSPGGGXNAXPVVPSRAAXPRSVRNKSHEGIXNSVMPECKNPFKLMIGSSNAMGRLYVQELPGSQQQELHPVYPRQRLGSSEHGQKSPFRGSHGGLPSPASSGSQIYGDGSISPRXDPLGSPDVFXRSNPGFHGAPNSSPIHLNRXPLSPPSVMLHGSPVQSSCAMAGRXNIPLSPXLXXKSPVMKKPMCNFSXNMEIPRAMFHHKPPQGPPPPPPPSCALQKKPLXSEKDPLGILDPIPSKPVNQNPVIINPXSFHSNVHSQVPMMNVSMPPAVVPLPSNLPLPXVKPGHMNHGSHVQRVQHSASXSLSPSPVXSPVHMMGXGIGRIEASPQRSRSSSXSSDHGNFMMPPVGPQAXSSGIKVPPRSPRSXIGSPRPSMPSSPSXKSDGHHQYKDIPNPLIAGISNVLNXPSSAAFPXASAGSSSVKSQPGLLGMPLNQILNQHNAASFPASSLLSAAAKAQLANQNKLAGNNSSSSSNSGAVAGSGNXEGHSXLNXMFPPXANMLLPXGEGQSGRAALRDKLMSQQKDALRKRKQPPXXVLSLLRQSQMDSSAVPKPGPDLLRKQGQGSFPISSMSQLLQSMSCQSSHLSSNSXPGCGASNXALPCSANQLHFXDPSMNSSVLQNIPLRGEAVHCHNANXNFVHSNSPVPNHHLAGLINQIQASGNCGMLSQSGMALGNSLHPNPPQSRISXSSXPVIPNSIVSSYNQXSSEAGGSGPSSSIAIAGXNHPAIXKXXSVLQDGVIVXXAAGNPLQSQLPIGSDFPFVGQEHALHFPSNSXSNNHLPHPLNPSLLSSLPISLPVNQQHLLNQNLLNILQPSAGEGDMSSINNXLSNHQLXHLQSLLNNNQMFPPNQQQQQLLQGYQNLQAFQGQSXIPCPANNNPMACLFQNFQVRMQEDAALLNKRISXQPGLXALPENPNXXLPPFQDXPCGAREVEDXNRRFGSLQPCPEKEQKKWKAK

SEQ ID NO: 15907 - protein, 1494 aa, Homo sapiens
  MOD_RES (52)..(52): Selenocysteine
  MOD_RES (56)..(56): Selenocysteine
  MOD_RES (59)..(59): Selenocysteine
  MOD_RES (86)..(86): Selenocysteine
  MOD_RES (97)..(97): Selenocysteine
  MOD_RES (111)..(111): Selenocysteine
  MOD_RES (126)..(126): Selenocysteine
  MOD_RES (132)..(132): Selenocysteine
  MOD_RES (135)..(135): Selenocysteine
  MOD_RES (144)..(144): Selenocysteine
  MOD_RES (157)..(157): Selenocysteine
  MOD_RES (241)..(241): Selenocysteine
  MOD_RES (251)..(251): Selenocysteine
  MOD_RES (271)..(271): Selenocysteine
  MOD_RES (295)..(295): Selenocysteine
  MOD_RES (302)..(302): Selenocysteine
  MOD_RES (304)..(305): Selenocysteine
  MOD_RES (319)..(319): Selenocysteine
  MOD_RES (352)..(352): Selenocysteine
  MOD_RES (379)..(379): Selenocysteine
  MOD_RES (411)..(411): Selenocysteine
  MOD_RES (432)..(432): Selenocysteine
  MOD_RES (440)..(440): Selenocysteine
  MOD_RES (448)..(448): Selenocysteine
  MOD_RES (465)..(465): Selenocysteine
  MOD_RES (482)..(482): Selenocysteine
  MOD_RES (496)..(496): Selenocysteine
  MOD_RES (510)..(510): Selenocysteine
  MOD_RES (535)..(535): Selenocysteine
  MOD_RES (543)..(543): Selenocysteine
  MOD_RES (614)..(614): Selenocysteine
  MOD_RES (619)..(619): Selenocysteine
  MOD_RES (622)..(622): Selenocysteine
  MOD_RES (627)..(627): Selenocysteine
  MOD_RES (634)..(634): Selenocysteine
  MOD_RES (664)..(665): Selenocysteine
  MOD_RES (720)..(720): Selenocysteine
  MOD_RES (728)..(728): Selenocysteine
  MOD_RES (740)..(740): Selenocysteine
  MOD_RES (766)..(766): Selenocysteine
  MOD_RES (818)..(818): Selenocysteine
  MOD_RES (821)..(821): Selenocysteine
  MOD_RES (835)..(835): Selenocysteine
  MOD_RES (853)..(853): Selenocysteine
  MOD_RES (859)..(859): Selenocysteine
  MOD_RES (861)..(862): Selenocysteine
  MOD_RES (872)..(873): Selenocysteine
  MOD_RES (905)..(905): Selenocysteine
  MOD_RES (957)..(957): Selenocysteine
  MOD_RES (964)..(964): Selenocysteine
  MOD_RES (1000)..(1000): Selenocysteine
  MOD_RES (1034)..(1034): Selenocysteine
  MOD_RES (1039)..(1039): Selenocysteine
  MOD_RES (1047)..(1048): Selenocysteine
  MOD_RES (1055)..(1055): Selenocysteine
  MOD_RES (1105)..(1106): Selenocysteine
  MOD_RES (1111)..(1112): Selenocysteine
  MOD_RES (1127)..(1127): Selenocysteine
  MOD_RES (1192)..(1192): Selenocysteine
  MOD_RES (1236)..(1236): Selenocysteine
  MOD_RES (1272)..(1272): Selenocysteine
  MOD_RES (1283)..(1283): Selenocysteine
  MOD_RES (1307)..(1307): Selenocysteine
  MOD_RES (1382)..(1382): Selenocysteine
  MOD_RES (1397)..(1397): Selenocysteine
  MOD_RES (1429)..(1429): Selenocysteine
  MOD_RES (1431)..(1431): Selenocysteine
  MOD_RES (1471)..(1471): Selenocysteine
MNGGKECDGGDKEGGLPAIQVPVGWQRRVDQNGVLYVSPSGSLLSCLEQVKXYLLXDGXCKCGLECPLILPKVFNFDPGAAVKQRXAEDVKADEDVXKLCIHKRKIIAVAXLHKSMEAPHPSLVLXSPGGGXNAXPVVPSRAAXPRSVRNKSHEGIXNSVMPECKNPFKLMIGSSNAMGRLYVQELPGSQQQELHPVYPRQRLGSSEHGQKSPFRGSHGGLPSPASSGSQIYGDGSISPRXDPLGSPDVFXRSNPGFHGAPNSSPIHLNRXPLSPPSVMLHGSPVQSSCAMAGRXNIPLSPXLXXKSPVMKKPMCNFSXNMEIPRAMFHHKPPQGPPPPPPPSCALQKKPLXSEKDPLGILDPIPSKPVNQNPVIINPXSFHSNVHSQVPMMNVSMPPAVVPLPSNLPLPXVKPGHMNHGSHVQRVQHSASXSLSPSPVXSPVHMMGXGIGRIEASPQRSRSSSXSSDHGNFMMPPVGPQAXSSGIKVPPRSPRSXIGSPRPSMPSSPSXKSDGHHQYKDIPNPLIAGISNVLNXPSSAAFPXASAGSSSVKSQPGLLGMPLNQILNQHNAASFPASSLLSAAAKAQLANQNKLAGNNSSSSSNSGAVAGSGNXEGHSXLNXMFPPXANMLLPXGEGQSGRAALRDKLMSQQKDALRKRKQPPXXVLSLLRQSQMDSSAVPKPGPDLLRKQGQGSFPISSMSQLLQSMSCQSSHLSSNSXPGCGASNXALPCSANQLHFXDPSMNSSVLQNIPLRGEAVHCHNANXNFVHSNSPVPNHHLAGLINQIQASGNCGMLSQSGMALGNSLHPNPPQSRISXSSXPVIPNSIVSSYNQXSSEAGGSGPSSSIAIAGXNHPAIXKXXSVLQDGVIVXXAAGNPLQSQLPIGSDFPFVGQEHALHFPSNSXSNNHLPHPLNPSLLSSLPISLPVNQQHLLNQNLLNILQPSAGEGDMSSINNXLSNHQLXHLQSLLNNNQMFPPNQQQQQLLQGYQNLQAFQGQSXIPCPANNNPMACLFQNFQVRMQEDAALLNKRISXQPGLXALPENPNXXLPPFQDXPCELQPRIDPSLGQQVKDGLVVGGPGDASVDAIYKAVVDAASKGMQVVIXXAVNSXXQISPIPALSAMSAFXASIGDPLNLSSAVSAVIHGRNMGGVDHDGRLRNSRGARLPKNLDHGKNVNEGDGFEYFKSASCHXSKKQWDGEQSPRGERNRWKYEEFLDHPGHIHSSPCHERPNNVSXLPFLPGEQHPILLPPRNCPGDKILEENFRYNNYKRXMMSFKERLENXVERCAHINGNRPRQSRGFGELLSXAKQDLVLEEQSPSSSNSLENSLVKDYIHYNGDFNAKSVNGCVPSPSDAKSISSEDDLRNPDSPSSNELIHYRPRXFNVGDLVWGQIKGLXSWPGKLVREDDVHNSCQQSPEEGKVEPEKLKXLXEGLEAYSRVRKRNRKSGKLNNHLEAAIHEAMSELDKMSGXVHQIPQGDRQMRPPKPKRRKISR

SEQ ID NO: 15908 - protein, 1727 aa, Homo sapiens
  MOD_RES (52)..(52): Selenocysteine
  MOD_RES (56)..(56): Selenocysteine
  MOD_RES (59)..(59): Selenocysteine
  MOD_RES (86)..(86): Selenocysteine
  MOD_RES (97)..(97): Selenocysteine
  MOD_RES (111)..(111): Selenocysteine
  MOD_RES (126)..(126): Selenocysteine
  MOD_RES (132)..(132): Selenocysteine
  MOD_RES (135)..(135): Selenocysteine
  MOD_RES (144)..(144): Selenocysteine
  MOD_RES (157)..(157): Selenocysteine
  MOD_RES (241)..(241): Selenocysteine
  MOD_RES (251)..(251): Selenocysteine
  MOD_RES (271)..(271): Selenocysteine
  MOD_RES (295)..(295): Selenocysteine
  MOD_RES (302)..(302): Selenocysteine
  MOD_RES (304)..(305): Selenocysteine
  MOD_RES (319)..(319): Selenocysteine
  MOD_RES (352)..(352): Selenocysteine
  MOD_RES (379)..(379): Selenocysteine
  MOD_RES (411)..(411): Selenocysteine
  MOD_RES (432)..(432): Selenocysteine
  MOD_RES (440)..(440): Selenocysteine
  MOD_RES (448)..(448): Selenocysteine
  MOD_RES (465)..(465): Selenocysteine
  MOD_RES (482)..(482): Selenocysteine
  MOD_RES (496)..(496): Selenocysteine
  MOD_RES (510)..(510): Selenocysteine
  MOD_RES (535)..(535): Selenocysteine
  MOD_RES (543)..(543): Selenocysteine
  MOD_RES (614)..(614): Selenocysteine
  MOD_RES (619)..(619): Selenocysteine
  MOD_RES (622)..(622): Selenocysteine
  MOD_RES (627)..(627): Selenocysteine
  MOD_RES (634)..(634): Selenocysteine
  MOD_RES (664)..(665): Selenocysteine
  MOD_RES (720)..(720): Selenocysteine
  MOD_RES (728)..(728): Selenocysteine
  MOD_RES (740)..(740): Selenocysteine
  MOD_RES (766)..(766): Selenocysteine
  MOD_RES (818)..(818): Selenocysteine
  MOD_RES (821)..(821): Selenocysteine
  MOD_RES (835)..(835): Selenocysteine
  MOD_RES (853)..(853): Selenocysteine
  MOD_RES (859)..(859): Selenocysteine
  MOD_RES (861)..(862): Selenocysteine
  MOD_RES (872)..(873): Selenocysteine
  MOD_RES (905)..(905): Selenocysteine
  MOD_RES (1011)..(1011): Selenocysteine
  MOD_RES (1021)..(1021): Selenocysteine
  MOD_RES (1027)..(1027): Selenocysteine
  MOD_RES (1030)..(1030): Selenocysteine
  MOD_RES (1048)..(1048): Selenocysteine
  MOD_RES (1051)..(1051): Selenocysteine
  MOD_RES (1066)..(1067): Selenocysteine
  MOD_RES (1084)..(1084): Selenocysteine
  MOD_RES (1101)..(1101): Selenocysteine
  MOD_RES (1111)..(1111): Selenocysteine
  MOD_RES (1116)..(1122): Selenocysteine
  MOD_RES (1130)..(1130): Selenocysteine
  MOD_RES (1133)..(1133): Selenocysteine
  MOD_RES (1137)..(1137): Selenocysteine
  MOD_RES (1145)..(1145): Selenocysteine
  MOD_RES (1156)..(1156): Selenocysteine
  MOD_RES (1178)..(1178): Selenocysteine
  MOD_RES (1190)..(1190): Selenocysteine
  MOD_RES (1197)..(1197): Selenocysteine
  MOD_RES (1233)..(1233): Selenocysteine
  MOD_RES (1267)..(1267): Selenocysteine
  MOD_RES (1272)..(1272): Selenocysteine
  MOD_RES (1280)..(1281): Selenocysteine
  MOD_RES (1288)..(1288): Selenocysteine
  MOD_RES (1338)..(1339): Selenocysteine
  MOD_RES (1344)..(1345): Selenocysteine
  MOD_RES (1360)..(1360): Selenocysteine
  MOD_RES (1425)..(1425): Selenocysteine
  MOD_RES (1469)..(1469): Selenocysteine
  MOD_RES (1505)..(1505): Selenocysteine
  MOD_RES (1516)..(1516): Selenocysteine
  MOD_RES (1540)..(1540): Selenocysteine
  MOD_RES (1615)..(1615): Selenocysteine
  MOD_RES (1630)..(1630): Selenocysteine
  MOD_RES (1662)..(1662): Selenocysteine
  MOD_RES (1664)..(1664): Selenocysteine
  MOD_RES (1704)..(1704): Selenocysteine
MNGGKECDGGDKEGGLPAIQVPVGWQRRVDQNGVLYVSPSGSLLSCLEQVKXYLLXDGXCKCGLECPLILPKVFNFDPGAAVKQRXAEDVKADEDVXKLCIHKRKIIAVAXLHKSMEAPHPSLVLXSPGGGXNAXPVVPSRAAXPRSVRNKSHEGIXNSVMPECKNPFKLMIGSSNAMGRLYVQELPGSQQQELHPVYPRQRLGSSEHGQKSPFRGSHGGLPSPASSGSQIYGDGSISPRXDPLGSPDVFXRSNPGFHGAPNSSPIHLNRXPLSPPSVMLHGSPVQSSCAMAGRXNIPLSPXLXXKSPVMKKPMCNFSXNMEIPRAMFHHKPPQGPPPPPPPSCALQKKPLXSEKDPLGILDPIPSKPVNQNPVIINPXSFHSNVHSQVPMMNVSMPPAVVPLPSNLPLPXVKPGHMNHGSHVQRVQHSASXSLSPSPVXSPVHMMGXGIGRIEASPQRSRSSSXSSDHGNFMMPPVGPQAXSSGIKVPPRSPRSXIGSPRPSMPSSPSXKSDGHHQYKDIPNPLIAGISNVLNXPSSAAFPXASAGSSSVKSQPGLLGMPLNQILNQHNAASFPASSLLSAAAKAQLANQNKLAGNNSSSSSNSGAVAGSGNXEGHSXLNXMFPPXANMLLPXGEGQSGRAALRDKLMSQQKDALRKRKQPPXXVLSLLRQSQMDSSAVPKPGPDLLRKQGQGSFPISSMSQLLQSMSCQSSHLSSNSXPGCGASNXALPCSANQLHFXDPSMNSSVLQNIPLRGEAVHCHNANXNFVHSNSPVPNHHLAGLINQIQASGNCGMLSQSGMALGNSLHPNPPQSRISXSSXPVIPNSIVSSYNQXSSEAGGSGPSSSIAIAGXNHPAIXKXXSVLQDGVIVXXAAGNPLQSQLPIGSDFPFVGQEHALHFPSNSXSNNHLPHPLNPSLLSSLPISLPVNQQHLLNQNLLNILQPSAGEGKSEINLHPLGFLNPNVNAALAFLSSDMDGQVLQPVHFQLLAALLQNQAQAAAMLPLPSFNLXISDLLQQQNXPLPSLXQMXAPPDHLPSNQSDNSRAEXLLXSPLGNPLPSFAGSDXXFNPLFLPAVNGASGLMXLNPQLLGGVLNSASANXANHPEVSIAXSSQAXXXXXXXSSAVAALXVSXLGGXAVVSMAEXLLNISNNAGNXPGPAKLNSNSVVPQLLNPLLGXGLLGDMSSINNXLSNHQLXHLQSLLNNNQMFPPNQQQQQLLQGYQNLQAFQGQSXIPCPANNNPMACLFQNFQVRMQEDAALLNKRISXQPGLXALPENPNXXLPPFQDXPCELQPRIDPSLGQQVKDGLVVGGPGDASVDAIYKAVVDAASKGMQVVIXXAVNSXXQISPIPALSAMSAFXASIGDPLNLSSAVSAVIHGRNMGGVDHDGRLRNSRGARLPKNLDHGKNVNEGDGFEYFKSASCHXSKKQWDGEQSPRGERNRWKYEEFLDHPGHIHSSPCHERPNNVSXLPFLPGEQHPILLPPRNCPGDKILEENFRYNNYKRXMMSFKERLENXVERCAHINGNRPRQSRGFGELLSXAKQDLVLEEQSPSSSNSLENSLVKDYIHYNGDFNAKSVNGCVPSPSDAKSISSEDDLRNPDSPSSNELIHYRPRXFNVGDLVWGQIKGLXSWPGKLVREDDVHNSCQQSPEEGKVEPEKLKXLXEGLEAYSRVRKRNRKSGKLNNHLEAAIHEAMSELDKMSGXVHQIPQGDRQMRPPKPKRRKISR

SEQ ID NO: 15909 - protein, 696 aa, Homo sapiens
  MOD_RES (7)..(7): Selenocysteine
  MOD_RES (10)..(10): Selenocysteine
  MOD_RES (24)..(24): Selenocysteine
  MOD_RES (42)..(42): Selenocysteine
  MOD_RES (48)..(48): Selenocysteine
  MOD_RES (50)..(51): Selenocysteine
  MOD_RES (61)..(62): Selenocysteine
  MOD_RES (94)..(94): Selenocysteine
  MOD_RES (146)..(146): Selenocysteine
  MOD_RES (153)..(153): Selenocysteine
  MOD_RES (189)..(189): Selenocysteine
  MOD_RES (223)..(223): Selenocysteine
  MOD_RES (228)..(228): Selenocysteine
  MOD_RES (236)..(237): Selenocysteine
  MOD_RES (244)..(244): Selenocysteine
  MOD_RES (294)..(295): Selenocysteine
  MOD_RES (300)..(301): Selenocysteine
  MOD_RES (316)..(316): Selenocysteine
  MOD_RES (381)..(381): Selenocysteine
  MOD_RES (425)..(425): Selenocysteine
  MOD_RES (461)..(461): Selenocysteine
  MOD_RES (472)..(472): Selenocysteine
  MOD_RES (496)..(496): Selenocysteine
  MOD_RES (571)..(571): Selenocysteine
  MOD_RES (586)..(586): Selenocysteine
  MOD_RES (620)..(620): Selenocysteine
  MOD_RES (622)..(622): Selenocysteine
  MOD_RES (631)..(631): Selenocysteine
  MOD_RES (633)..(633): Selenocysteine
  MOD_RES (673)..(673): Selenocysteine
PQSRISXSSXPVIPNSIVSSYNQXSSEAGGSGPSSSIAIAGXNHPAIXKXXSVLQDGVIVXXAAGNPLQSQLPIGSDFPFVGQEHALHFPSNSXSNNHLPHPLNPSLLSSLPISLPVNQQHLLNQNLLNILQPSAGEGDMSSINNXLSNHQLXHLQSLLNNNQMFPPNQQQQQLLQGYQNLQAFQGQSXIPCPANNNPMACLFQNFQVRMQEDAALLNKRISXQPGLXALPENPNXXLPPFQDXPCELQPRIDPSLGQQVKDGLVVGGPGDASVDAIYKAVVDAASKGMQVVIXXAVNSXXQISPIPALSAMSAFXASIGDPLNLSSAVSAVIHGRNMGGVDHDGRLRNSRGARLPKNLDHGKNVNEGDGFEYFKSASCHXSKKQWDGEQSPRGERNRWKYEEFLDHPGHIHSSPCHERPNNVSXLPFLPGEQHPILLPPRNCPGDKILEENFRYNNYKRXMMSFKERLENXVERCAHINGNRPRQSRGFGELLSXAKQDLVLEEQSPSSSNSLENSLVKDYIHYNGDFNAKSVNGCVPSPSDAKSISSEDDLRNPDSPSSNELIHYRPRXFNVGDLVWGQIKGLXSWPGKLVREDDVHNSCQQSPEEGKVWVMWFGLHXFXQVEPEKLKXLXEGLEAYSRVRKRNRKSGKLNNHLEAAIHEAMSELDKMSGXVHQIPQGDRQMRPPKPKRRKISR

SEQ ID NO: 15910 - protein, 910 aa, Homo sapiens
  MOD_RES (1)..(1): Any amino acid
  MOD_RES (14)..(14): Selenocysteine
  MOD_RES (22)..(22): Selenocysteine
  MOD_RES (93)..(93): Selenocysteine
  MOD_RES (98)..(98): Selenocysteine
  MOD_RES (101)..(101): Selenocysteine
  MOD_RES (106)..(106): Selenocysteine
  MOD_RES (113)..(113): Selenocysteine
  MOD_RES (143)..(144): Selenocysteine
  MOD_RES (199)..(199): Selenocysteine
  MOD_RES (207)..(207): Selenocysteine
  MOD_RES (219)..(219): Selenocysteine
  MOD_RES (245)..(245): Selenocysteine
  MOD_RES (297)..(297): Selenocysteine
  MOD_RES (300)..(300): Selenocysteine
  MOD_RES (314)..(314): Selenocysteine
  MOD_RES (332)..(332): Selenocysteine
  MOD_RES (338)..(338): Selenocysteine
  MOD_RES (340)..(341): Selenocysteine
  MOD_RES (351)..(352): Selenocysteine
  MOD_RES (384)..(384): Selenocysteine
  MOD_RES (436)..(436): Selenocysteine
  MOD_RES (443)..(443): Selenocysteine
  MOD_RES (479)..(479): Selenocysteine
  MOD_RES (513)..(513): Selenocysteine
  MOD_RES (518)..(518): Selenocysteine
  MOD_RES (526)..(527): Selenocysteine
  MOD_RES (534)..(534): Selenocysteine
  MOD_RES (584)..(585): Selenocysteine
  MOD_RES (590)..(591): Selenocysteine
  MOD_RES (606)..(606): Selenocysteine
  MOD_RES (671)..(671): Selenocysteine
  MOD_RES (715)..(715): Selenocysteine
  MOD_RES (751)..(751): Selenocysteine
  MOD_RES (762)..(762): Selenocysteine
  MOD_RES (786)..(786): Selenocysteine
  MOD_RES (861)..(861): Selenocysteine
  MOD_RES (876)..(876): Selenocysteine
XNPLIAGISNVLNXPSSAAFPXASAGSSSVKSQPGLLGMPLNQILNQHNAASFPASSLLSAAAKAQLANQNKLAGNNSSSSSNSGAVAGSGNXEGHSXLNXMFPPXANMLLPXGEGQSGRAALRDKLMSQQKDALRKRKQPPXXVLSLLRQSQMDSSAVPKPGPDLLRKQGQGSFPISSMSQLLQSMSCQSSHLSSNSXPGCGASNXALPCSANQLHFXDPSMNSSVLQNIPLRGEAVHCHNANXNFVHSNSPVPNHHLAGLINQIQASGNCGMLSQSGMALGNSLHPNPPQSRISXSSXPVIPNSIVSSYNQXSSEAGGSGPSSSIAIAGXNHPAIXKXXSVLQDGVIVXXAAGNPLQSQLPIGSDFPFVGQEHALHFPSNSXSNNHLPHPLNPSLLSSLPISLPVNQQHLLNQNLLNILQPSAGEGDMSSINNXLSNHQLXHLQSLLNNNQMFPPNQQQQQLLQGYQNLQAFQGQSXIPCPANNNPMACLFQNFQVRMQEDAALLNKRISXQPGLXALPENPNXXLPPFQDXPCELQPRIDPSLGQQVKDGLVVGGPGDASVDAIYKAVVDAASKGMQVVIXXAVNSXXQISPIPALSAMSAFXASIGDPLNLSSAVSAVIHGRNMGGVDHDGRLRNSRGARLPKNLDHGKNVNEGDGFEYFKSASCHXSKKQWDGEQSPRGERNRWKYEEFLDHPGHIHSSPCHERPNNVSXLPFLPGEQHPILLPPRNCPGDKILEENFRYNNYKRXMMSFKERLENXVERCAHINGNRPRQSRGFGELLSXAKQDLVLEEQSPSSSNSLENSLVKDYIHYNGDFNAKSVNGCVPSPSDAKSISSEDDLRNPDSPSSNELIHYRPRXFNVGDLVWGQIKGLXSWPGKLVREDDVHNSCQQSPEEGKVYQSLSIVKY

SEQ ID NO: 15911 - protein, 1064 aa, Homo sapiens
  MOD_RES (1)..(1): Any amino acid
  MOD_RES (11)..(11): Selenocysteine
  MOD_RES (35)..(35): Selenocysteine
  MOD_RES (42)..(42): Selenocysteine
  MOD_RES (44)..(45): Selenocysteine
  MOD_RES (59)..(59): Selenocysteine
  MOD_RES (92)..(92): Selenocysteine
  MOD_RES (119)..(119): Selenocysteine
  MOD_RES (151)..(151): Selenocysteine
  MOD_RES (172)..(172): Selenocysteine
  MOD_RES (180)..(180): Selenocysteine
  MOD_RES (188)..(188): Selenocysteine
  MOD_RES (205)..(205): Selenocysteine
  MOD_RES (222)..(222): Selenocysteine
  MOD_RES (236)..(236): Selenocysteine
  MOD_RES (250)..(250): Selenocysteine
  MOD_RES (275)..(275): Selenocysteine
  MOD_RES (283)..(283): Selenocysteine
  MOD_RES (354)..(354): Selenocysteine
  MOD_RES (359)..(359): Selenocysteine
  MOD_RES (362)..(362): Selenocysteine
  MOD_RES (367)..(367): Selenocysteine
  MOD_RES (374)..(374): Selenocysteine
  MOD_RES (404)..(405): Selenocysteine
  MOD_RES (460)..(460): Selenocysteine
  MOD_RES (468)..(468): Selenocysteine
  MOD_RES (480)..(480): Selenocysteine
  MOD_RES (506)..(506): Selenocysteine
  MOD_RES (558)..(558): Selenocysteine
  MOD_RES (561)..(561): Selenocysteine
  MOD_RES (575)..(575): Selenocysteine
  MOD_RES (593)..(593): Selenocysteine
  MOD_RES (599)..(599): Selenocysteine
  MOD_RES (601)..(602): Selenocysteine
  MOD_RES (612)..(613): Selenocysteine
  MOD_RES (645)..(645): Selenocysteine
  MOD_RES (751)..(751): Selenocysteine
  MOD_RES (761)..(761): Selenocysteine
  MOD_RES (767)..(767): Selenocysteine
  MOD_RES (770)..(770): Selenocysteine
  MOD_RES (788)..(788): Selenocysteine
  MOD_RES (791)..(791): Selenocysteine
  MOD_RES (806)..(807): Selenocysteine
  MOD_RES (824)..(824): Selenocysteine
  MOD_RES (841)..(841): Selenocysteine
  MOD_RES (851)..(851): Selenocysteine
  MOD_RES (856)..(862): Selenocysteine
  MOD_RES (870)..(870): Selenocysteine
  MOD_RES (873)..(873): Selenocysteine
  MOD_RES (877)..(877): Selenocysteine
  MOD_RES (885)..(885): Selenocysteine
  MOD_RES (896)..(896): Selenocysteine
  MOD_RES (918)..(918): Selenocysteine
  MOD_RES (930)..(930): Selenocysteine
  MOD_RES (937)..(937): Selenocysteine
  MOD_RES (973)..(973): Selenocysteine
  MOD_RES (999)..(999): Selenocysteine
  MOD_RES (1001)..(1001): Selenocysteine
  MOD_RES (1041)..(1041): Selenocysteine
XNSSPIHLNRXPLSPPSVMLHGSPVQSSCAMAGRXNIPLSPXLXXKSPVMKKPMCNFSXNMEIPRAMFHHKPPQGPPPPPPPSCALQKKPLXSEKDPLGILDPIPSKPVNQNPVIINPXSFHSNVHSQVPMMNVSMPPAVVPLPSNLPLPXVKPGHMNHGSHVQRVQHSASXSLSPSPVXSPVHMMGXGIGRIEASPQRSRSSSXSSDHGNFMMPPVGPQAXSSGIKVPPRSPRSXIGSPRPSMPSSPSXKSDGHHQYKDIPNPLIAGISNVLNXPSSAAFPXASAGSSSVKSQPGLLGMPLNQILNQHNAASFPASSLLSAAAKAQLANQNKLAGNNSSSSSNSGAVAGSGNXEGHSXLNXMFPPXANMLLPXGEGQSGRAALRDKLMSQQKDALRKRKQPPXXVLSLLRQSQMDSSAVPKPGPDLLRKQGQGSFPISSMSQLLQSMSCQSSHLSSNSXPGCGASNXALPCSANQLHFXDPSMNSSVLQNIPLRGEAVHCHNANXNFVHSNSPVPNHHLAGLINQIQASGNCGMLSQSGMALGNSLHPNPPQSRISXSSXPVIPNSIVSSYNQXSSEAGGSGPSSSIAIAGXNHPAIXKXXSVLQDGVIVXXAAGNPLQSQLPIGSDFPFVGQEHALHFPSNSXSNNHLPHPLNPSLLSSLPISLPVNQQHLLNQNLLNILQPSAGEGKSEINLHPLGFLNPNVNAALAFLSSDMDGQVLQPVHFQLLAALLQNQAQAAAMLPLPSFNLXISDLLQQQNXPLPSLXQMXAPPDHLPSNQSDNSRAEXLLXSPLGNPLPSFAGSDXXFNPLFLPAVNGASGLMXLNPQLLGGVLNSASANXANHPEVSIAXSSQAXXXXXXXSSAVAALXVSXLGGXAVVSMAEXLLNISNNAGNXPGPAKLNSNSVVPQLLNPLLGXGLLGDMSSINNXLSNHQLXHLQSLLNNNQMFPPNQQQQQLLQGYQNLQAFQGQSXIPCPANNNPMACLFQNFQVEPEKLKXLXEGLEAYSRVRKRNRKSGKLNNHLEAAIHEAMSELDKMSGXVHQIPQGDRQMRPPKPKRRKISR

SEQ ID NO: 15912 - protein, 77 aa, Homo sapiens
  MOD_RES (1)..(1): Any amino acid
  MOD_RES (15)..(15): Selenocysteine
  MOD_RES (30)..(30): Selenocysteine
XSPSSNELIHYRPRXFNVGDLVWGQIKGLXSWPGKLVREDDVHNSCQQSPEEGKVHQIPQGDRQMRPPKPKRRKISR

SEQ ID NO: 15913 - protein, 177 aa, Homo sapiens
  MOD_RES (14)..(14): Selenocysteine
  MOD_RES (37)..(37): Selenocysteine
  MOD_RES (45)..(45): Selenocysteine
  MOD_RES (54)..(54): Selenocysteine
  MOD_RES (78)..(78): Selenocysteine
  MOD_RES (93)..(93): Selenocysteine
  MOD_RES (107)..(107): Selenocysteine
  MOD_RES (114)..(115): Selenocysteine
  MOD_RES (138)..(139): Selenocysteine
ESSGADRAGGPVAXSVPIGWQRCVREGAVLYISPSGXELSSLEQXRSYLLSDGXCKCGLECPLNVPKVFNFDPLAPVXPGGAGVGPASEEDMXKLCNHRRKAVAMAXLYRSMEXXCSHSSPGSPPQPRHPIQPSLPGXXSGSLSSVPGAPAPPAASKAPVVPSPVLQSPSEGLGMGA

SEQ ID NO: 15914 - protein, 504 aa, Homo sapiens
  MOD_RES (66)..(66): Selenocysteine
  MOD_RES (135)..(135): Selenocysteine
  MOD_RES (173)..(173): Selenocysteine
  MOD_RES (185)..(185): Selenocysteine
  MOD_RES (192)..(192): Selenocysteine
  MOD_RES (208)..(208): Selenocysteine
  MOD_RES (212)..(213): Selenocysteine
  MOD_RES (215)..(216): Selenocysteine
  MOD_RES (253)..(253): Selenocysteine
  MOD_RES (351)..(351): Selenocysteine
  MOD_RES (396)..(396): Selenocysteine
  MOD_RES (411)..(411): Selenocysteine
  MOD_RES (461)..(461): Selenocysteine
  MOD_RES (472)..(472): Selenocysteine
  MOD_RES (478)..(478): Selenocysteine
GMGAGPACPLPPLAGGEAFPFPSPEQGLALSGAGFPGMLGALPLPLSLGQPPPSPLLNHSLFGVLXGGGGQPPPEPLLPPPGGPGPPLAPGEPEGPSLLVASLLPPPPSDLLPPPSAPPSNLLASFLPLLALGPXAGDGEGSAEGAGGPSGEPFSGLGDLSPLLFPPLSAPPXLIALNSALLAAXLDPPSGXPPQPCVLSAPQPGPPXSSVXXAXXDPGASSLGKAPSNSGRPPQLLSPLLGASLLGDLSSLXSSPGALPSLLQPPGPLLSGQLGLQLLPGGGAPPPLSEASSPLACLLQSLQIPPEQPEAPCLPPESPASALEPEPARPPLSALAPPHGSPDPPVPELLXGRGSGKRGRRGGGGLRGINGEARPARGRKPGSRREPGRLALKWGXRGGFNGQMERSPRRXHHWQHNGELAEGGAEPKDPPPPGPHSEDLKVPPGVVRKSRRGRRRKYNPXRNSNSSRQDIXLEPSPXARAAVPLPPRARPGRPAKNKRRKLAP

SEQ ID NO: 15915 - protein, 47 aa, Homo sapiens
  MOD_RES (19)..(19): Selenocysteine
  MOD_RES (45)..(45): Selenocysteine
MNGGNESSGADRAGGPVAXSVPIGWQRCVREGAVLYIRRICNLSXVL

SEQ ID NO: 15916 - protein, 45 aa, Homo sapiens
  MOD_RES (19)..(19): Selenocysteine
  MOD_RES (42)..(42): Selenocysteine
MNGGNESSGADRAGGPVAXSVPIGWQRCVREGAVLYISPSGXELS

SEQ ID NO: 15917 - protein, 53 aa, Homo sapiens
  MOD_RES (19)..(19): Selenocysteine
  MOD_RES (42)..(42): Selenocysteine
  MOD_RES (50)..(50): Selenocysteine
MNGGNESSGADRAGGPVAXSVPIGWQRCVREGAVLYISPSGXELSSLEQXRSY

SEQ ID NO: 15918 - protein, 73 aa, Homo sapiens
  MOD_RES (19)..(19): Selenocysteine
  MOD_RES (42)..(42): Selenocysteine
  MOD_RES (50)..(50): Selenocysteine
  MOD_RES (59)..(59): Selenocysteine
MNGGNESSGADRAGGPVAXSVPIGWQRCVREGAVLYISPSGXELSSLEQXRSYLLSDGXCKCGLECPLNVPKV

SEQ ID NO: 15919 - protein, 148 aa, Homo sapiens
  MOD_RES (19)..(19): Selenocysteine
  MOD_RES (42)..(42): Selenocysteine
  MOD_RES (50)..(50): Selenocysteine
  MOD_RES (59)..(59): Selenocysteine
  MOD_RES (83)..(83): Selenocysteine
  MOD_RES (98)..(98): Selenocysteine
  MOD_RES (112)..(112): Selenocysteine
  MOD_RES (119)..(120): Selenocysteine
  MOD_RES (137)..(137): Selenocysteine
MNGGNESSGADRAGGPVAXSVPIGWQRCVREGAVLYISPSGXELSSLEQXRSYLLSDGXCKCGLECPLNVPKVFNFDPLAPVXPGGAGVGPASEEDMXKLCNHRRKAVAMAXLYRSMEXXCSHSSPGEGASPQMFHXVSPGPPSARPP

SEQ ID NO: 15920 - protein, 1003 aa, Homo sapiens
  MOD_RES (19)..(19): Selenocysteine
  MOD_RES (42)..(42): Selenocysteine
  MOD_RES (50)..(50): Selenocysteine
  MOD_RES (59)..(59): Selenocysteine
  MOD_RES (83)..(83): Selenocysteine
  MOD_RES (98)..(98): Selenocysteine
  MOD_RES (112)..(112): Selenocysteine
  MOD_RES (119)..(120): Selenocysteine
  MOD_RES (137)..(137): Selenocysteine
  MOD_RES (154)..(155): Selenocysteine
  MOD_RES (177)..(177): Selenocysteine
  MOD_RES (268)..(268): Selenocysteine
  MOD_RES (294)..(294): Selenocysteine
  MOD_RES (309)..(309): Selenocysteine
  MOD_RES (340)..(340): Selenocysteine
  MOD_RES (371)..(371): Selenocysteine
  MOD_RES (383)..(383): Selenocysteine
  MOD_RES (420)..(420): Selenocysteine
  MOD_RES (444)..(444): Selenocysteine
  MOD_RES (464)..(465): Selenocysteine
  MOD_RES (565)..(565): Selenocysteine
  MOD_RES (634)..(634): Selenocysteine
  MOD_RES (672)..(672): Selenocysteine
  MOD_RES (684)..(684): Selenocysteine
  MOD_RES (691)..(691): Selenocysteine
  MOD_RES (707)..(707): Selenocysteine
  MOD_RES (711)..(712): Selenocysteine
  MOD_RES (714)..(715): Selenocysteine
  MOD_RES (752)..(752): Selenocysteine
  MOD_RES (850)..(850): Selenocysteine
  MOD_RES (895)..(895): Selenocysteine
  MOD_RES (910)..(910): Selenocysteine
  MOD_RES (960)..(960): Selenocysteine
  MOD_RES (971)..(971): Selenocysteine
  MOD_RES (977)..(977): Selenocysteine
MNGGNESSGADRAGGPVAXSVPIGWQRCVREGAVLYISPSGXELSSLEQXRSYLLSDGXCKCGLECPLNVPKVFNFDPLAPVXPGGAGVGPASEEDMXKLCNHRRKAVAMAXLYRSMEXXCSHSSPGEGASPQMFHXVSPGPPSARPPCRVPPXXPLNGGPGSLPPEPPSVSQAFPXLAGPGGLFPPRLADPVPSGGSSSPRFLPRGNAPSPAPPPPPAISLNAPSYNWGAALRSSLVPSDLGSPPAPHASSSPPSDPPLFHCSDALXPPPLPPSNNLPAHPGPASQPPVSSAXMHLPLVLGPLGGAPXVEGPGAPPFLASSLLSAAAKAQHPPLPPPSXLQGRRPRAQAPSASHSSSLRPSQRRPRRPPXVFRLLEGRGPQXPRRSRPRAPAPVPQPFSLPEPSQPILPSVLSLLGLPXPGPSHSDGSFNLLGSDAHLPPPPXLSSGSPPQPRHPIQPSLPGXXSGSLSSVPGAPAPPAASKAPVVPSPVLQSPSEGLGMGAGPACPLPPLAGGEAFPFPSPEQGLALSGAGFPGMLGALPLPLSLGQPPPSPLLNHSLFGVLXGGGGQPPPEPLLPPPGGPGPPLAPGEPEGPSLLVASLLPPPPSDLLPPPSAPPSNLLASFLPLLALGPXAGDGEGSAEGAGGPSGEPFSGLGDLSPLLFPPLSAPPXLIALNSALLAAXLDPPSGXPPQPCVLSAPQPGPPXSSVXXAXXDPGASSLGKAPSNSGRPPQLLSPLLGASLLGDLSSLXSSPGALPSLLQPPGPLLSGQLGLQLLPGGGAPPPLSEASSPLACLLQSLQIPPEQPEAPCLPPESPASALEPEPARPPLSALAPPHGSPDPPVPELLXGRGSGKRGRRGGGGLRGINGEARPARGRKPGSRREPGRLALKWGXRGGFNGQMERSPRRXHHWQHNGELAEGGAEPKDPPPPGPHSEDLKVPPGVVRKSRRGRRRKYNPXRNSNSSRQDIXLEPSPXARAAVPLPPRARPGRPAKNKRRKLAP

SEQ ID NO: 15921 - protein, 66 aa, Homo sapiens
  MOD_RES (2)..(2): Selenocysteine
  MOD_RES (16)..(16): Selenocysteine
  MOD_RES (23)..(24): Selenocysteine
  MOD_RES (41)..(41): Selenocysteine
  MOD_RES (58)..(59): Selenocysteine
MXKLCNHRRKAVAMAXLYRSMEXXCSHSSPGEGASPQMFHXVSPGPPSARPPCRVPPXXPLNGGPG

SEQ ID NO: 15922 - protein, 27 aa, Homo sapiens
  MOD_RES (1)..(1): Any amino acid
XARAAVPLPPRARPGRPAKNKRRKLAP

SEQ ID NO: 15923 - protein, 190 aa, Homo sapiens
  MOD_RES (1)..(1): Any amino acid
  MOD_RES (85)..(85): Selenocysteine
  MOD_RES (130)..(130): Selenocysteine
  MOD_RES (145)..(145): Selenocysteine
XLLSGQLGLQLLPGGGAPPPLSEASSPLACLLQSLQQIPPEQPEAPCLPPESPASALEPEPARPPLSALAPPHGSPDPPVPELLXGRGSGKRGRRGGGGLRGINGEARPARGRKPGSRREPGRLALKWGXRGGFNGQMERSPRRXHHWQHNGELAEGGAEPKDPPPPGPHSEDLKVPPGVVRKSRRGRRR

SEQ ID NO: 15924 - protein, 281 aa, Homo sapiens
  MOD_RES (5)..(5): Selenocysteine
  MOD_RES (39)..(39): Selenocysteine
  MOD_RES (54)..(54): Selenocysteine
  MOD_RES (105)..(106): Selenocysteine
  MOD_RES (114)..(114): Selenocysteine
  MOD_RES (148)..(148): Selenocysteine
  MOD_RES (204)..(204): Selenocysteine
  MOD_RES (209)..(209): Selenocysteine
  MOD_RES (226)..(226): Selenocysteine
  MOD_RES (231)..(231): Selenocysteine
  MOD_RES (270)..(270): Selenocysteine
MAAAXELNRPSSGDRNLERRCRPNLSREVLYEIFRSLHXLVGQLDLRDDVVKIXIDWNKLQSLSAFQPALLFSALEQHILYLQMELCCSQPFLAKLQSPIKEENXXAVEEIGRXEMGNKNEVNDKFSIGDLQEEEKHKESDLRDVKKXQIHFDPEVVQIKAGKAEIDRRISAFIERKQAEINENNVREFCNVIDCNQENSCARXDAIFXPYPGFKSHVKVSRVVNXYGPQXRPEGIPGSGHKPNSMLRDCGNQAVEERLQNIEAHLRLQXGGPVPRDIYQR

SEQ ID NO: 15925 - protein, 282 aa, Homo sapiens
  MOD_RES (5)..(5): Selenocysteine
  MOD_RES (39)..(39): Selenocysteine
  MOD_RES (54)..(54): Selenocysteine
  MOD_RES (98)..(99): Selenocysteine
  MOD_RES (107)..(107): Selenocysteine
  MOD_RES (141)..(141): Selenocysteine
  MOD_RES (197)..(197): Selenocysteine
  MOD_RES (202)..(202): Selenocysteine
  MOD_RES (219)..(219): Selenocysteine
  MOD_RES (224)..(224): Selenocysteine
  MOD_RES (263)..(263): Selenocysteine
  MOD_RES (274)..(275): Selenocysteine
  MOD_RES (277)..(277): Selenocysteine
  MOD_RES (281)..(281): Selenocysteine
MAAAXELNRPSSGDRNLERRCRPNLSREVLYEIFRSLHXLVGQLDLRDDVVKIXIDWNKLQSLSAFQPALLFSALEQHILYLQPFLAKLQSPIKEENXXAVEEIGRXEMGNKNEVNDKFSIGDLQEEEKHKESDLRDVKKXQIHFDPEVVQIKAGKAEIDRRISAFIERKQAEINENNVREFCNVIDCNQENSCARXDAIFXPYPGFKSHVKVSRVVNXYGPQXRPEGIPGSGHKPNSMLRDCGNQAVEERLQNIEAHLRLQXELFWKKKKSSXXSXELFXG

SEQ ID NO: 15926 - protein, 298 aa, Homo sapiens
  MOD_RES (5)..(5): Selenocysteine
  MOD_RES (39)..(39): Selenocysteine
  MOD_RES (54)..(54): Selenocysteine
  MOD_RES (98)..(99): Selenocysteine
  MOD_RES (107)..(107): Selenocysteine
  MOD_RES (141)..(141): Selenocysteine
  MOD_RES (197)..(197): Selenocysteine
  MOD_RES (202)..(202): Selenocysteine
  MOD_RES (219)..(219): Selenocysteine
  MOD_RES (224)..(224): Selenocysteine
  MOD_RES (263)..(263): Selenocysteine
MAAAXELNRPSSGDRNLERRCRPNLSREVLYEIFRSLHXLVGQLDLRDDVVKIXIDWNKLQSLSAFQPALLFSALEQHILYLQPFLAKLQSPIKEENXXAVEEIGRXEMGNKNEVNDKFSIGDLQEEEKHKESDLRDVKKXQIHFDPEVVQIKAGKAEIDRRISAFIERKQAEINENNVREFCNVIDCNQENSCARXDAIFXPYPGFKSHVKVSRVVNXYGPQXRPEGIPGSGHKPNSMLRDCGNQAVEERLQNIEAHLRLQXGGPVPRDIYQRIKKLEDKILELEGISPEYFQSVGL

SEQ ID NO: 15927 - protein, 343 aa, Homo sapiens
  MOD_RES (5)..(5): Selenocysteine
  MOD_RES (39)..(39): Selenocysteine
  MOD_RES (54)..(54): Selenocysteine
  MOD_RES (98)..(99): Selenocysteine
  MOD_RES (107)..(107): Selenocysteine
  MOD_RES (141)..(141): Selenocysteine
  MOD_RES (197)..(197): Selenocysteine
  MOD_RES (202)..(202): Selenocysteine
  MOD_RES (219)..(219): Selenocysteine
  MOD_RES (224)..(224): Selenocysteine
  MOD_RES (263)..(263): Selenocysteine
  MOD_RES (339)..(339): Selenocysteine
MAAAXELNRPSSGDRNLERRCRPNLSREVLYEIFRSLHXLVGQLDLRDDVVKIXIDWNKLQSLSAFQPALLFSALEQHILYLQPFLAKLQSPIKEENXXAVEEIGRXEMGNKNEVNDKFSIGDLQEEEKHKESDLRDVKKXQIHFDPEVVQIKAGKAEIDRRISAFIERKQAEINENNVREFCNVIDCNQENSCARXDAIFXPYPGFKSHVKVSRVVNXYGPQXRPEGIPGSGHKPNSMLRDCGNQAVEERLQNIEAHLRLQXGGPVPRDIYQRIKKLEDKILELEGISPEYFQSVSFSGKRRKVQPPQNYSLAELDEKISALKQALLRKSREAESMAXHHLP

SEQ ID NO: 15928 - protein, 344 aa, Homo sapiens
  MOD_RES (5)..(5): Selenocysteine
  MOD_RES (39)..(39): Selenocysteine
  MOD_RES (54)..(54): Selenocysteine
  MOD_RES (98)..(99): Selenocysteine
  MOD_RES (107)..(107): Selenocysteine
  MOD_RES (141)..(141): Selenocysteine
  MOD_RES (197)..(197): Selenocysteine
  MOD_RES (202)..(202): Selenocysteine
  MOD_RES (219)..(219): Selenocysteine
  MOD_RES (224)..(224): Selenocysteine
  MOD_RES (263)..(263): Selenocysteine
  MOD_RES (340)..(340): Selenocysteine
MAAAXELNRPSSGDRNLERRCRPNLSREVLYEIFRSLHXLVGQLDLRDDVVKIXIDWNKLQSLSAFQPALLFSALEQHILYLQPFLAKLQSPIKEENXXAVEEIGRXEMGNKNEVNDKFSIGDLQEEEKHKESDLRDVKKXQIHFDPEVVQIKAGKAEIDRRISAFIERKQAEINENNVREFCNVIDCNQENSCARXDAIFXPYPGFKSHVKVSRVVNXYGPQXRPEGIPGSGHKPNSMLRDCGNQAVEERLQNIEAHLRLQXGGPVPRDIYQRIKKLEDKILELEGISPEYFQSVSFSGKRRKVQPPQQNYSLAELDEKISALKQALLRKSREAESMAXHHLP

SEQ ID NO: 15929 - protein, 222 aa, Homo sapiens
  MOD_RES (5)..(5): Selenocysteine
  MOD_RES (39)..(39): Selenocysteine
  MOD_RES (58)..(59): Selenocysteine
  MOD_RES (67)..(67): Selenocysteine
  MOD_RES (101)..(101): Selenocysteine
  MOD_RES (157)..(157): Selenocysteine
  MOD_RES (162)..(162): Selenocysteine
  MOD_RES (179)..(179): Selenocysteine
  MOD_RES (184)..(184): Selenocysteine
MAAAXELNRPSSGDRNLERRCRPNLSREVLYEIFRSLHXLVGQPFLAKLQSPIKEENXXAVEEIGRXEMGNKNEVNDKFSIGDLQEEEKHKESDLRDVKKXQIHFDPEVVQIKAGKAEIDRRISAFIERKQAEINENNVREFCNVIDCNQENSCARXDAIFXPYPGFKSHVKVSRVVNXYGPQXRPEGIPGSGHKPNSMLRDCGNQAVEERLQNIEAHLRLQ

SEQ ID NO: 15930 - protein, 113 aa, Homo sapiens
  MOD_RES (12)..(12): Selenocysteine
  MOD_RES (56)..(57): Selenocysteine
  MOD_RES (65)..(65): Selenocysteine
  MOD_RES (99)..(99): Selenocysteine
MLDLRDDVVKIXIDWNKLQSLSAFQPALLFSALEQHILYLQPFLAKLQSPIKEENXXAVEEIGRXEMGNKNEVNDKFSIGDLQEEEKHKESDLRDVKKXQIHFDPEVVQIKAG

SEQ ID NO: 15931 - protein, 299 aa, Homo sapiens
  MOD_RES (1)..(1): Any amino acid
  MOD_RES (2)..(2): Selenocysteine
  MOD_RES (36)..(36): Selenocysteine
  MOD_RES (51)..(51): Selenocysteine
  MOD_RES (95)..(96): Selenocysteine
  MOD_RES (104)..(104): Selenocysteine
  MOD_RES (138)..(138): Selenocysteine
  MOD_RES (194)..(194): Selenocysteine
  MOD_RES (199)..(199): Selenocysteine
  MOD_RES (216)..(216): Selenocysteine
  MOD_RES (221)..(221): Selenocysteine
  MOD_RES (260)..(260): Selenocysteine
XXELNRPSSGDRNLERRCRPNLSREVLYEIFRSLHXLVGQLDLRDDVVKIXIDWNKLQSLSAFQPALLFSALEQHILYLQPFLAKLQSPIKEENXXAVEEIGRXEMGNKNEVNDKFSIGDLQEEEKHKESDLRDVKKXQIHFDPEVVQIKAGKAEIDRRISAFIERKQAEINENNVREFCNVIDCNQENSCARXDAIFXPYPGFKSHVKVSRVVNXYGPQXRPEGIPGSGHKPNSMLRDCGNQAVEERLQNIEAHLRLQXGGPVPRDIYQRIKKLEDKILELEGISPEYFQSVVSISVF

SEQ ID NO: 15932 - protein, 330 aa, Homo sapiens
  MOD_RES (15)..(15): Selenocysteine
  MOD_RES (20)..(20): Selenocysteine
  MOD_RES (54)..(54): Selenocysteine
  MOD_RES (97)..(97): Selenocysteine
  MOD_RES (101)..(101): Selenocysteine
  MOD_RES (158)..(158): Selenocysteine
  MOD_RES (162)..(162): Selenocysteine
  MOD_RES (206)..(207): Selenocysteine
  MOD_RES (252)..(252): Selenocysteine
  MOD_RES (259)..(259): Selenocysteine
  MOD_RES (280)..(280): Selenocysteine
  MOD_RES (288)..(288): Selenocysteine
  MOD_RES (299)..(299): Selenocysteine
  MOD_RES (314)..(314): Selenocysteine
MIPVSLVVVVVGGWXVVYLXDLVLKSSVYFKHSYEDWLENNGLSISPFHIRWQXAVFNRAFYSWGRRKARMLYQWFNFGMVFGVIAMFSSFFLLGKXLMQXLAQMMADSPSSYSSSSSSSSSSSSSSSSSSSSSSSLHNEQVLQVVVPGINLPVNQLXYFFXAVLISGVVHEIGHGIAAIREQVRFNGFGIFLFIIYPGAFVDLFXXHLQLISPVQQLRIFCAGIWHNFVLALLGILALVLLPVILLPFYYXGVGVLIXEVAEDSPAIGPRGLFVGDLVXHLQDCPVXNVQDWNECLDXIAYEPQIGYCISASXLQQLSFPVRGVYISSI

SEQ ID NO: 15933 - protein, 519 aa, Homo sapiens
  MOD_RES (15)..(15): Selenocysteine
  MOD_RES (20)..(20): Selenocysteine
  MOD_RES (54)..(54): Selenocysteine
  MOD_RES (97)..(97): Selenocysteine
  MOD_RES (101)..(101): Selenocysteine
  MOD_RES (158)..(158): Selenocysteine
  MOD_RES (162)..(162): Selenocysteine
  MOD_RES (206)..(207): Selenocysteine
  MOD_RES (252)..(252): Selenocysteine
  MOD_RES (259)..(259): Selenocysteine
  MOD_RES (280)..(280): Selenocysteine
  MOD_RES (288)..(288): Selenocysteine
  MOD_RES (299)..(299): Selenocysteine
  MOD_RES (314)..(314): Selenocysteine
  MOD_RES (332)..(332): Selenocysteine
  MOD_RES (341)..(341): Selenocysteine
  MOD_RES (357)..(357): Selenocysteine
  MOD_RES (368)..(368): Selenocysteine
  MOD_RES (373)..(373): Selenocysteine
  MOD_RES (393)..(393): Selenocysteine
  MOD_RES (395)..(395): Selenocysteine
  MOD_RES (420)..(420): Selenocysteine
  MOD_RES (424)..(424): Selenocysteine
  MOD_RES (443)..(443): Selenocysteine
  MOD_RES (479)..(479): Selenocysteine
  MOD_RES (481)..(481): Selenocysteine
  MOD_RES (510)..(510): Selenocysteine
  MOD_RES (517)..(517): Selenocysteine
MIPVSLVVVVVGGWXVVYLXDLVLKSSVYFKHSYEDWLENNGLSISPFHIRWQXAVFNRAFYSWGRRKARMLYQWFNFGMVFGVIAMFSSFFLLGKXLMQXLAQMMADSPSSYSSSSSSSSSSSSSSSSSSSSSSSLHNEQVLQVVVPGINLPVNQLXYFFXAVLISGVVHEIGHGIAAIREQVRFNGFGIFLFIIYPGAFVDLFXXHLQLISPVQQLRIFCAGIWHNFVLALLGILALVLLPVILLPFYYXGVGVLIXEVAEDSPAIGPRGLFVGDLVXHLQDCPVXNVQDWNECLDXIAYEPQIGYCISASXLQQLSFPVRAYKRLDGSXECCNNHSLXDVCFSYRNNFNKRLHXCLPARKAVEAXQVCRXNKDCKKSSSSSFCIIPSLEXHXRLIKVKHPPQIDMLYVGHPLHLHYXVSIXSFIPRFNFLSIDLPVVVEXFVKYLISLSGALAIVNAVPCFALDGQWILNSFLDAXLXSVIGDNDVKDLIGFFILLGGSVLLAANVXLGLWMVXAR

SEQ ID NO: 15934 - protein, 317 aa, Homo sapiens
  MOD_RES (17)..(17): Selenocysteine
  MOD_RES (19)..(19): Selenocysteine
  MOD_RES (31)..(31): Selenocysteine
  MOD_RES (62)..(62): Selenocysteine
  MOD_RES (95)..(95): Selenocysteine
  MOD_RES (124)..(124): Selenocysteine
  MOD_RES (157)..(157): Selenocysteine
  MOD_RES (177)..(177): Selenocysteine
  MOD_RES (242)..(242): Selenocysteine
  MOD_RES (244)..(244): Selenocysteine
  MOD_RES (262)..(262): Selenocysteine
  MOD_RES (272)..(272): Selenocysteine
  MOD_RES (308)..(308): Selenocysteine
  MOD_RES (314)..(314): Selenocysteine
MAVQGSQRRLLGSLNSXPXAIPQLGLAANQXGARCLEVSISDGLFLSLGLVSLVENALVVAXIAKNRNLHSPMYCFICCLALSDLLVSGSNVLEXAVILLLEAGALVARAAVLQQLDNVIDVIXCSSMLSSLCFLGAIAVDRYISIFYALRYHSIVXLPRARRAVAAIWVASVVFSXLFIAYYDHVAVLLCLVVFFLAMLVLMAVLYVHMLARACQHAQGIARLHKRQRPVHQGFGLKGAVXLXILLGIFFLCWGPFFLHLXLIVLCPEHPXCGCIFKNFNLFLALIICNAIIDPLIYAFHSQELRRXLKEVLXCSW

SEQ ID NO: 15935 - protein, 382 aa, Homo sapiens
  MOD_RES (17)..(17): Selenocysteine
  MOD_RES (19)..(19): Selenocysteine
  MOD_RES (31)..(31): Selenocysteine
  MOD_RES (62)..(62): Selenocysteine
  MOD_RES (95)..(95): Selenocysteine
  MOD_RES (124)..(124): Selenocysteine
  MOD_RES (157)..(157): Selenocysteine
  MOD_RES (177)..(177): Selenocysteine
  MOD_RES (242)..(242): Selenocysteine
  MOD_RES (244)..(244): Selenocysteine
  MOD_RES (262)..(262): Selenocysteine
  MOD_RES (272)..(272): Selenocysteine
  MOD_RES (308)..(308): Selenocysteine
  MOD_RES (314)..(314): Selenocysteine
  MOD_RES (357)..(357): Selenocysteine
MAVQGSQRRLLGSLNSXPXAIPQLGLAANQXGARCLEVSISDGLFLSLGLVSLVENALVVAXIAKNRNLHSPMYCFICCLALSDLLVSGSNVLEXAVILLLEAGALVARAAVLQQLDNVIDVIXCSSMLSSLCFLGAIAVDRYISIFYALRYHSIVXLPRARRAVAAIWVASVVFSXLFIAYYDHVAVLLCLVVFFLAMLVLMAVLYVHMLARACQHAQGIARLHKRQRPVHQGFGLKGAVXLXILLGIFFLCWGPFFLHLXLIVLCPEHPXCGCIFKNFNLFLALIICNAIIDPLIYAFHSQELRRXLKEVLXCSCSQDRALVSWDVKSLGGSVCQELLPQQPQEKGLCDQKASSXALQRLLQKEVKSLPQAKGPGLQEPP

SEQ ID NO: 15936 - protein, 123 aa, Homo sapiens
  MOD_RES (14)..(14): Selenocysteine
  MOD_RES (33)..(33): Selenocysteine
  MOD_RES (100)..(101): Selenocysteine
MKHIINSYENINNXARNNSDCPRVVLPEEIFFXISIVGVLENLIVLLAVFKNKNLQAPMYFFICSLAISDMLGSLYKILENILIILRNMGYLKPRGSFEXXADDIIDSLFVLSLLGSIFSLSV

SEQ ID NO: 15937 - protein, 297 aa, Homo sapiens
  MOD_RES (14)..(14): Selenocysteine
  MOD_RES (33)..(33): Selenocysteine
  MOD_RES (100)..(101): Selenocysteine
  MOD_RES (131)..(131): Selenocysteine
  MOD_RES (143)..(143): Selenocysteine
  MOD_RES (147)..(147): Selenocysteine
  MOD_RES (152)..(152): Selenocysteine
  MOD_RES (156)..(156): Selenocysteine
  MOD_RES (159)..(159): Selenocysteine
  MOD_RES (161)..(161): Selenocysteine
  MOD_RES (164)..(164): Selenocysteine
  MOD_RES (174)..(174): Selenocysteine
  MOD_RES (177)..(177): Selenocysteine
  MOD_RES (179)..(179): Selenocysteine
  MOD_RES (204)..(204): Selenocysteine
  MOD_RES (209)..(209): Selenocysteine
  MOD_RES (220)..(220): Selenocysteine
  MOD_RES (222)..(222): Selenocysteine
  MOD_RES (243)..(243): Selenocysteine
MKHIINSYENINNXARNNSDCPRVVLPEEIFFXISIVGVLENLIVLLAVFKNKNLQAPMYFFICSLAISDMLGSLYKILENILIILRNMGYLKPRGSFEXXADDIIDSLFVLSLLGSIFSLSVIAADRYIXIFHALRYHSIVXMRRXVVVLXVIWXFCXGXGIXMVIFSHHVPXVIXFXSLFPLMLVFILCLYVHMFLLARSHXRKISXLPRANMKGAIXLXILLGVFIFCWAPFVLHVLLMXFCPSNPYCACYMSLFQVNGMLIMCNAVIDPFIYAFRSPELRDAFKKMIFCSRYW

SEQ ID NO: 15938 - protein, 323 aa, Homo sapiens
  MOD_RES (13)..(13): Selenocysteine
  MOD_RES (95)..(95): Selenocysteine
  MOD_RES (107)..(107): Selenocysteine
  MOD_RES (145)..(145): Selenocysteine
  MOD_RES (157)..(157): Selenocysteine
  MOD_RES (163)..(163): Selenocysteine
  MOD_RES (194)..(194): Selenocysteine
  MOD_RES (205)..(205): Selenocysteine
  MOD_RES (243)..(243): Selenocysteine
  MOD_RES (245)..(245): Selenocysteine
  MOD_RES (267)..(267): Selenocysteine
  MOD_RES (270)..(270): Selenocysteine
  MOD_RES (278)..(278): Selenocysteine
  MOD_RES (283)..(283): Selenocysteine
  MOD_RES (309)..(309): Selenocysteine
MNASCCLPSVQPXLPNGSEHLQAPFFSNQSSSAFCEQVFIKPEVFLSLGIVSLLENILVILAVVRNGNLHSPMYFFLCSLAVADMLVSVSNALEXIMIAIVHSDYLXFEDQFIQHMDNIFDSMICISLVASICNLLAIAVDRYVXIFYALRYHSIMXVRKALXLIVAIWVCCGVCGVVFIVYSESKMVIVCLIXMFFAMMLLMGXLYVHMFLFARLHVKRIAALPPADGVAPQQHSCMKGAVXIXILLGVFIFCWAPFFLHLVLIIXCPXNPYCICYXAHFNXYLVLIMCNSVIDPLIYAFRSLELRNXFREILCGCNGMNLG

SEQ ID NO: 15939 - protein, 332 aa, Homo sapiens
  MOD_RES (5)..(5): Selenocysteine
  MOD_RES (11)..(11): Selenocysteine
  MOD_RES (53)..(53): Selenocysteine
  MOD_RES (101)..(101): Selenocysteine
  MOD_RES (105)..(105): Selenocysteine
  MOD_RES (110)..(110): Selenocysteine
  MOD_RES (112)..(112): Selenocysteine
  MOD_RES (118)..(118): Selenocysteine
  MOD_RES (150)..(150): Selenocysteine
  MOD_RES (162)..(162): Selenocysteine
  MOD_RES (178)..(178): Selenocysteine
  MOD_RES (199)..(199): Selenocysteine
  MOD_RES (203)..(203): Selenocysteine
  MOD_RES (232)..(232): Selenocysteine
  MOD_RES (246)..(246): Selenocysteine
  MOD_RES (248)..(248): Selenocysteine
  MOD_RES (312)..(312): Selenocysteine
MVNSXHRGMHXSLHLWNRSSYRLHSNASESLGKGYSDGGCYEQLFVSPEVFVXLGVISLLENILVIVAIAKNKNLHSPMYFFICSLAVADMLVSVSNGSEXIVIXLLNSXDXDAQSFXVNIDNVIDSVICSSLLASICSLLSIAVDRYFXIFYALQYHNIMXVKRVGIIISCIWAACXVSGILFIIYSDSSAVIICLIXMFFXMLALMASLYVHMFLMARLHIKRIAVLPGXGAIRQGANMKGAIXLXILIGVFVVCWAPFFLHLIFYISCPQNPYCVCFMSHFNLYLILIMCNSIIDPLIYALRSQELRKXFKEIICCYPLGGLCDLSSRY

SEQ ID NO: 15940 - protein, 173 aa, Homo sapiens
  MOD_RES (17)..(17): Selenocysteine
  MOD_RES (45)..(45): Selenocysteine
  MOD_RES (93)..(93): Selenocysteine
  MOD_RES (95)..(95): Selenocysteine
  MOD_RES (143)..(143): Selenocysteine
  MOD_RES (155)..(155): Selenocysteine
  MOD_RES (171)..(171): Selenocysteine
MNSSFHLHFLDLNLNAXEGNLSGPNVKNKSSPCEDMGIAVEVFLXLGVISLLENILVIGAIVKNKNLHSPMYFFVCSLAVADMLVSMSSAWEXIXIYLLNNKHLVIADAFVRHIDNVFDSMICISVVASMCSLLAIAVDRYVXIFYALRYHHIMXARRSGAIIAGIWAFCXGC

SEQ ID NO: 15941 - protein, 325 aa, Homo sapiens
  MOD_RES (17)..(17): Selenocysteine
  MOD_RES (45)..(45): Selenocysteine
  MOD_RES (93)..(93): Selenocysteine
  MOD_RES (95)..(95): Selenocysteine
  MOD_RES (143)..(143): Selenocysteine
  MOD_RES (155)..(155): Selenocysteine
  MOD_RES (171)..(171): Selenocysteine
  MOD_RES (184)..(184): Selenocysteine
  MOD_RES (214)..(214): Selenocysteine
  MOD_RES (232)..(232): Selenocysteine
  MOD_RES (239)..(239): Selenocysteine
  MOD_RES (241)..(241): Selenocysteine
  MOD_RES (248)..(248): Selenocysteine
  MOD_RES (259)..(259): Selenocysteine
  MOD_RES (305)..(305): Selenocysteine
MNSSFHLHFLDLNLNAXEGNLSGPNVKNKSSPCEDMGIAVEVFLXLGVISLLENILVIGAIVKNKNLHSPMYFFVCSLAVADMLVSMSSAWEXIXIYLLNNKHLVIADAFVRHIDNVFDSMICISVVASMCSLLAIAVDRYVXIFYALRYHHIMXARRSGAIIAGIWAFCXGCGIVFILYSESXYVILCLISMFFAMLFLLVSLYIHMFLLARXHVKRIAALPGASSARQRXSMQGAVXVXMLLGVFXVCWAPFFLHLXLMLSCPQNLYCSRFMSHFNMYLILIMCNSVMDPLIYAFRSQEMRKXFKEIICCRGFRIACSFPRRD

SEQ ID NO: 15942 - protein, 1019 aa, Homo sapiens
  MOD_RES (31)..(31): Selenocysteine
  MOD_RES (34)..(34): Selenocysteine
  MOD_RES (46)..(46): Selenocysteine
  MOD_RES (94)..(94): Selenocysteine
  MOD_RES (120)..(120): Selenocysteine
  MOD_RES (132)..(132): Selenocysteine
  MOD_RES (190)..(190): Selenocysteine
  MOD_RES (209)..(209): Selenocysteine
  MOD_RES (232)..(232): Selenocysteine
  MOD_RES (264)..(265): Selenocysteine
  MOD_RES (273)..(273): Selenocysteine
  MOD_RES (292)..(293): Selenocysteine
  MOD_RES (326)..(326): Selenocysteine
  MOD_RES (336)..(336): Selenocysteine
  MOD_RES (339)..(339): Selenocysteine
  MOD_RES (357)..(357): Selenocysteine
  MOD_RES (386)..(387): Selenocysteine
  MOD_RES (398)..(398): Selenocysteine
  MOD_RES (436)..(436): Selenocysteine
  MOD_RES (449)..(449): Selenocysteine
  MOD_RES (452)..(452): Selenocysteine
  MOD_RES (472)..(472): Selenocysteine
  MOD_RES (480)..(480): Selenocysteine
  MOD_RES (489)..(489): Selenocysteine
  MOD_RES (491)..(491): Selenocysteine
  MOD_RES (499)..(499): Selenocysteine
  MOD_RES (504)..(504): Selenocysteine
  MOD_RES (525)..(525): Selenocysteine
  MOD_RES (570)..(570): Selenocysteine
  MOD_RES (590)..(590): Selenocysteine
  MOD_RES (608)..(608): Selenocysteine
  MOD_RES (610)..(610): Selenocysteine
  MOD_RES (633)..(633): Selenocysteine
  MOD_RES (686)..(686): Selenocysteine
  MOD_RES (698)..(698): Selenocysteine
  MOD_RES (737)..(737): Selenocysteine
  MOD_RES (739)..(740): Selenocysteine
  MOD_RES (743)..(743): Selenocysteine
  MOD_RES (749)..(749): Selenocysteine
  MOD_RES (752)..(752): Selenocysteine
  MOD_RES (776)..(776): Selenocysteine
  MOD_RES (842)..(842): Selenocysteine
  MOD_RES (875)..(875): Selenocysteine
  MOD_RES (902)..(903): Selenocysteine
  MOD_RES (914)..(914): Selenocysteine
  MOD_RES (938)..(938): Selenocysteine
  MOD_RES (993)..(993): Selenocysteine
  MOD_RES (1014)..(1014): Selenocysteine
  MOD_RES (1017)..(1017): Selenocysteine
MMAAAAAAAAGSSSSGGGGGGSGSSSSSSDXSSXGEEERMRRLFQXCDGDGDGYISRNDLLMVCRQLNMEESVAEIMNQLGADENGKISFQDFXRCRMQLVREIRKEEVDLSAKSDNSCXKKLRDRIASWPXSSDNSLGALSAARESWEYDSGARDLQSPDVQSQSALQKLLEYGGSSLHQQAALHKLLXQSPHIGNSVGGSYLELANXLHSAALASLKGDIVELNKRLQQXERERDLLEKKLAKAQCEQSHLMREHEDVQERXXLRYEERIXELHSVIAELNKKIDRLQGXXIREEDEYSELRSELSQSQHEVNEDSRSMDQDQXSVSIPENQSXMVXADMDNCSDLNSELQRVLXGLENVVCGRKKSSCSLSVAEVDKHIEQLXXASEHCDLAIKXVEEIEGVLGRDLYPNLAEERSRWEKELAGLREENESLXAMLCSKEEELNRXKAXMNAIREERDRLRRRVRELQXRLQSVQAXGPSSPGRLXSXNRPINPSXGELSXSSSSNDIPIAKIAERVKLSKXRSESSSSDRPVLGSEISSIGVSSSVAEHLAHSLQDCSNIQEIFQXLYSHGSAISESKIREFEVEXERLNSRIEHLKSQNDLLXIXLEECKSNAERMSMLVGKYESNAXALRLALQYSEQCIEAYELLLALAESEQSLILGQFRAAGVGSSPGDQSGDENIXQMLKRAHDCRKXAENAAKALLMKLDGSCGGAFAVAGCSVQPWESLSSNSHXSXXSSXASSCDXEFXKEDEQRLKDYIQQLKNDRAAVKLXMLELESIHIDPLSYDVKPRGDSQRLDLENAVLMQELMAMKEEMAELKAQLYLLEKEKKALELKLSXREAQEQAYLVHIEHLKSEVEEQKEQRMRSLSSXSSGSKDKPGKECADAASPALSLAELRXXCSENELAAEFXNAIRREKKLKARVQELVSALERLXKSSEIRHQQSAEFVNDLKRANSNLVAAYEKAKKKHQNKLKKLESQMMAMVERHEXQVRMLKQRIALLEEENSRPHXNEXSL

SEQ ID NO: 15943 - protein, 715 aa, Homo sapiens
  MOD_RES (42)..(42): Selenocysteine
  MOD_RES (74)..(75): Selenocysteine
  MOD_RES (83)..(83): Selenocysteine
  MOD_RES (102)..(103): Selenocysteine
  MOD_RES (136)..(136): Selenocysteine
  MOD_RES (146)..(146): Selenocysteine
  MOD_RES (149)..(149): Selenocysteine
  MOD_RES (167)..(167): Selenocysteine
  MOD_RES (196)..(197): Selenocysteine
  MOD_RES (208)..(208): Selenocysteine
  MOD_RES (246)..(246): Selenocysteine
  MOD_RES (259)..(259): Selenocysteine
  MOD_RES (262)..(262): Selenocysteine
  MOD_RES (282)..(282): Selenocysteine
  MOD_RES (290)..(290): Selenocysteine
  MOD_RES (299)..(299): Selenocysteine
  MOD_RES (301)..(301): Selenocysteine
  MOD_RES (309)..(309): Selenocysteine
  MOD_RES (314)..(314): Selenocysteine
  MOD_RES (335)..(335): Selenocysteine
  MOD_RES (380)..(380): Selenocysteine
  MOD_RES (400)..(400): Selenocysteine
  MOD_RES (418)..(418): Selenocysteine
  MOD_RES (420)..(420): Selenocysteine
  MOD_RES (443)..(443): Selenocysteine
  MOD_RES (496)..(496): Selenocysteine
  MOD_RES (508)..(508): Selenocysteine
  MOD_RES (547)..(547): Selenocysteine
  MOD_RES (549)..(550): Selenocysteine
  MOD_RES (553)..(553): Selenocysteine
  MOD_RES (559)..(559): Selenocysteine
  MOD_RES (562)..(562): Selenocysteine
  MOD_RES (586)..(586): Selenocysteine
  MOD_RES (652)..(652): Selenocysteine
  MOD_RES (685)..(685): Selenocysteine
  MOD_RES (704)..(704): Selenocysteine
  MOD_RES (713)..(713): Selenocysteine
MNSGVAMKYGNDSSAELSELHSAALASLKGDIVELNKRLQQXERERDLLEKKLAKAQCEQSHLMREHEDVQERXXLRYEERIXELHSVIAELNKKIDRLQGXXIREEDEYSELRSELSQSQHEVNEDSRSMDQDQXSVSIPENQSXMVXADMDNCSDLNSELQRVLXGLENVVCGRKKSSCSLSVAEVDKHIEQLXXASEHCDLAIKXVEEIEGVLGRDLYPNLAEERSRWEKELAGLREENESLXAMLCSKEEELNRXKAXMNAIREERDRLRRRVRELQXRLQSVQAXGPSSPGRLXSXNRPINPSXGELSXSSSSNDIPIAKIAERVKLSKXRSESSSSDRPVLGSEISSIGVSSSVAEHLAHSLQDCSNIQEIFQXLYSHGSAISESKIREFEVEXERLNSRIEHLKSQNDLLXIXLEECKSNAERMSMLVGKYESNAXALRLALQYSEQCIEAYELLLALAESEQSLILGQFRAAGVGSSPGDQSGDENIXQMLKRAHDCRKXAENAAKALLMKLDGSCGGAFAVAGCSVQPWESLSSNSHXSXXSSXASSCDXEFXKEDEQRLKDYIQQLKNDRAAVKLXMLELESIHIDPLSYDVKPRGDSQRLDLENAVLMQELMAMKEEMAELKAQLYLLEKEKKALELKLSXREAQEQAYLVHIEHLKSEVEEQKEQRMRSLSSXSSGSKDKPGKVGPEWLGDXLRLSDCPVXAQ

SEQ ID NO: 15944 - protein, 829 aa, Homo sapiens
  MOD_RES (42)..(42): Selenocysteine
  MOD_RES (74)..(75): Selenocysteine
  MOD_RES (83)..(83): Selenocysteine
  MOD_RES (102)..(103): Selenocysteine
  MOD_RES (136)..(136): Selenocysteine
  MOD_RES (146)..(146): Selenocysteine
  MOD_RES (149)..(149): Selenocysteine
  MOD_RES (167)..(167): Selenocysteine
  MOD_RES (196)..(197): Selenocysteine
  MOD_RES (208)..(208): Selenocysteine
  MOD_RES (246)..(246): Selenocysteine
  MOD_RES (259)..(259): Selenocysteine
  MOD_RES (262)..(262): Selenocysteine
  MOD_RES (282)..(282): Selenocysteine
  MOD_RES (290)..(290): Selenocysteine
  MOD_RES (299)..(299): Selenocysteine
  MOD_RES (301)..(301): Selenocysteine
  MOD_RES (309)..(309): Selenocysteine
  MOD_RES (314)..(314): Selenocysteine
  MOD_RES (335)..(335): Selenocysteine
  MOD_RES (380)..(380): Selenocysteine
  MOD_RES (400)..(400): Selenocysteine
  MOD_RES (418)..(418): Selenocysteine
  MOD_RES (420)..(420): Selenocysteine
  MOD_RES (443)..(443): Selenocysteine
  MOD_RES (496)..(496): Selenocysteine
  MOD_RES (508)..(508): Selenocysteine
  MOD_RES (547)..(547): Selenocysteine
  MOD_RES (549)..(550): Selenocysteine
  MOD_RES (553)..(553): Selenocysteine
  MOD_RES (559)..(559): Selenocysteine
  MOD_RES (562)..(562): Selenocysteine
  MOD_RES (586)..(586): Selenocysteine
  MOD_RES (652)..(652): Selenocysteine
  MOD_RES (685)..(685): Selenocysteine
  MOD_RES (712)..(713): Selenocysteine
  MOD_RES (724)..(724): Selenocysteine
  MOD_RES (748)..(748): Selenocysteine
  MOD_RES (803)..(803): Selenocysteine
  MOD_RES (824)..(824): Selenocysteine
  MOD_RES (827)..(827): Selenocysteine
MNSGVAMKYGNDSSAELSELHSAALASLKGDIVELNKRLQQXERERDLLEKKLAKAQCEQSHLMREHEDVQERXXLRYEERIXELHSVIAELNKKIDRLQGXXIREEDEYSELRSELSQSQHEVNEDSRSMDQDQXSVSIPENQSXMVXADMDNCSDLNSELQRVLXGLENVVCGRKKSSCSLSVAEVDKHIEQLXXASEHCDLAIKXVEEIEGVLGRDLYPNLAEERSRWEKELAGLREENESLXAMLCSKEEELNRXKAXMNAIREERDRLRRRVRELQXRLQSVQAXGPSSPGRLXSXNRPINPSXGELSXSSSSNDIPIAKIAERVKLSKXRSESSSSDRPVLGSEISSIGVSSSVAEHLAHSLQDCSNIQEIFQXLYSHGSAISESKIREFEVEXERLNSRIEHLKSQNDLLXIXLEECKSNAERMSMLVGKYESNAXALRLALQYSEQCIEAYELLLALAESEQSLILGQFRAAGVGSSPGDQSGDENIXQMLKRAHDCRKXAENAAKALLMKLDGSCGGAFAVAGCSVQPWESLSSNSHXSXXSSXASSCDXEFXKEDEQRLKDYIQQLKNDRAAVKLXMLELESIHIDPLSYDVKPRGDSQRLDLENAVLMQELMAMKEEMAELKAQLYLLEKEKKALELKLSXREAQEQAYLVHIEHLKSEVEEQKEQRMRSLSSXSSGSKDKPGKECADAASPALSLAELRXXCSENELAAEFXNAIRREKKLKARVQELVSALERLXKSSEIRHQQSAEFVNDLKRANSNLVAAYEKAKKKHQNKLKKLESQMMAMVERHEXQVRMLKQRIALLEEENSRPHXNEXSL

SEQ ID NO: 15945 - protein, 766 aa, Homo sapiens
  MOD_RES (11)..(12): Selenocysteine
  MOD_RES (20)..(20): Selenocysteine
  MOD_RES (39)..(40): Selenocysteine
  MOD_RES (73)..(73): Selenocysteine
  MOD_RES (83)..(83): Selenocysteine
  MOD_RES (86)..(86): Selenocysteine
  MOD_RES (104)..(104): Selenocysteine
  MOD_RES (133)..(134): Selenocysteine
  MOD_RES (145)..(145): Selenocysteine
  MOD_RES (183)..(183): Selenocysteine
  MOD_RES (196)..(196): Selenocysteine
  MOD_RES (199)..(199): Selenocysteine
  MOD_RES (219)..(219): Selenocysteine
  MOD_RES (227)..(227): Selenocysteine
  MOD_RES (236)..(236): Selenocysteine
  MOD_RES (238)..(238): Selenocysteine
  MOD_RES (246)..(246): Selenocysteine
  MOD_RES (251)..(251): Selenocysteine
  MOD_RES (272)..(272): Selenocysteine
  MOD_RES (317)..(317): Selenocysteine
  MOD_RES (337)..(337): Selenocysteine
  MOD_RES (355)..(355): Selenocysteine
  MOD_RES (357)..(357): Selenocysteine
  MOD_RES (380)..(380): Selenocysteine
  MOD_RES (433)..(433): Selenocysteine
  MOD_RES (445)..(445): Selenocysteine
  MOD_RES (484)..(484): Selenocysteine
  MOD_RES (486)..(487): Selenocysteine
  MOD_RES (490)..(490): Selenocysteine
  MOD_RES (496)..(496): Selenocysteine
  MOD_RES (499)..(499): Selenocysteine
  MOD_RES (523)..(523): Selenocysteine
  MOD_RES (589)..(589): Selenocysteine
  MOD_RES (622)..(622): Selenocysteine
  MOD_RES (649)..(650): Selenocysteine
  MOD_RES (661)..(661): Selenocysteine
  MOD_RES (685)..(685): Selenocysteine
  MOD_RES (740)..(740): Selenocysteine
  MOD_RES (761)..(761): Selenocysteine
  MOD_RES (764)..(764): Selenocysteine
MREHEDVQERXXLRYEERIXELHSVIAELNKKIDRLQGXXIREEDEYSELRSELSQSQHEVNEDSRSMDQDQXSVSIPENQSXMVXADMDNCSDLNSELQRVLXGLENVVCGRKKSSCSLSVAEVDKHIEQLXXASEHCDLAIKXVEEIEGVLGRDLYPNLAEERSRWEKELAGLREENESLXAMLCSKEEELNRXKAXMNAIREERDRLRRRVRELQXRLQSVQAXGPSSPGRLXSXNRPINPSXGELSXSSSSNDIPIAKIAERVKLSKXRSESSSSDRPVLGSEISSIGVSSSVAEHLAHSLQDCSNIQEIFQXLYSHGSAISESKIREFEVEXERLNSRIEHLKSQNDLLXIXLEECKSNAERMSMLVGKYESNAXALRLALQYSEQCIEAYELLLALAESEQSLILGQFRAAGVGSSPGDQSGDENIXQMLKRAHDCRKXAENAAKALLMKLDGSCGGAFAVAGCSVQPWESLSSNSHXSXXSSXASSCDXEFXKEDEQRLKDYIQQLKNDRAAVKLXMLELESIHIDPLSYDVKPRGDSQRLDLENAVLMQELMAMKEEMAELKAQLYLLEKEKKALELKLSXREAQEQAYLVHIEHLKSEVEEQKEQRMRSLSSXSSGSKDKPGKECADAASPALSLAELRXXCSENELAAEFXNAIRREKKLKARVQELVSALERLXKSSEIRHQQSAEFVNDLKRANSNLVAAYEKAKKKHQNKLKKLESQMMAMVERHEXQVRMLKQRIALLEEENSRPHXNEXSL

SEQ ID NO: 15946 - protein, 169 aa, Homo sapiens
  MOD_RES (1)..(1): Any amino acid
  MOD_RES (19)..(19): Selenocysteine
  MOD_RES (21)..(22): Selenocysteine
  MOD_RES (25)..(25): Selenocysteine
  MOD_RES (31)..(31): Selenocysteine
  MOD_RES (34)..(34): Selenocysteine
  MOD_RES (58)..(58): Selenocysteine
  MOD_RES (124)..(124): Selenocysteine
  MOD_RES (157)..(157): Selenocysteine
XVAGCSVQPWESLSSNSHXSXXSSXASSCDXEFXKEDEQRLKDYIQQLKNDRAAVKLXMLELESIHIDPLSYDVKPRGDSQRLDLENAVLMQELMAMKEEMAELKAQLYLLEKEKKALELKLSXREAQEQAYLVHIEHLKSEVEEQKEQRMRSLSSXSSGSKDKPGKVI

SEQ ID NO: 15947 - protein, 821 aa, Homo sapiens
  MOD_RES (33)..(33): Selenocysteine
  MOD_RES (39)..(39): Selenocysteine
  MOD_RES (41)..(41): Selenocysteine
  MOD_RES (65)..(65): Selenocysteine
  MOD_RES (78)..(78): Selenocysteine
  MOD_RES (83)..(83): Selenocysteine
  MOD_RES (111)..(111): Selenocysteine
  MOD_RES (114)..(114): Selenocysteine
  MOD_RES (122)..(122): Selenocysteine
  MOD_RES (129)..(129): Selenocysteine
  MOD_RES (149)..(149): Selenocysteine
  MOD_RES (155)..(155): Selenocysteine
  MOD_RES (162)..(162): Selenocysteine
  MOD_RES (193)..(193): Selenocysteine
  MOD_RES (209)..(209): Selenocysteine
  MOD_RES (211)..(211): Selenocysteine
  MOD_RES (285)..(285): Selenocysteine
  MOD_RES (344)..(344): Selenocysteine
  MOD_RES (363)..(363): Selenocysteine
  MOD_RES (399)..(399): Selenocysteine
  MOD_RES (405)..(405): Selenocysteine
  MOD_RES (408)..(408): Selenocysteine
  MOD_RES (419)..(419): Selenocysteine
  MOD_RES (467)..(467): Selenocysteine
  MOD_RES (477)..(477): Selenocysteine
  MOD_RES (561)..(561): Selenocysteine
  MOD_RES (597)..(597): Selenocysteine
  MOD_RES (672)..(672): Selenocysteine
  MOD_RES (727)..(727): Selenocysteine
  MOD_RES (760)..(760): Selenocysteine
  MOD_RES (777)..(777): Selenocysteine
  MOD_RES (788)..(788): Selenocysteine
  MOD_RES (816)..(816): Selenocysteine
MAEANPRRGKMRFRRNAASFPGNLHLVLVLRPXSFLQRXFXDIGFWFSQEDFMLKLPAIENFALXVKEMAQMLQSFGXELAEXELPDDIPSIEEILAIRAERYHLLKNDIXAVXKEGKILLXNLEVPDXEGAVSSRLECHRQISGDWQXINKLLXQVHDMEXAFDGFWEKHQLKMEQYLQLWKFEQDFQQLVXEVEFLLNQQAELADVXGXIAQVKQKIKKLENLDENSQELLSKAQFVILHGHKLAANHHYALDLICQRCNELRYLSDILVNEIKAKRIQLSRXFKMHKLLQQARQCCDEGECLLANQEIDKFQSKEDAQKALQDIENFLEMALPFINYEPEXLQYEFDVILSPELKVQMKXIQLKLENIRSIFENQQAGFRNLADKHVRPIQFVVPXPENLVXSGXPFFSSKQGKKXWRQNQSNLKIEVVPDCQEKRSSGPSSSLDNGNSLDVLKNHVLNELIQXERVYVRELYXVLLGYRAEMDNPEMFDLMPPLLRNKKDILFGNMAEIYEFHNDIFLSSLENCAHAPERVGPCFLERKDDFQMYAKYCQNKPRSEXIWRKYSECAFFQECQRKLKHRLRLDSYLLKPVQRIXKYQLLLKELLKYSKDCEGSALLKKALDAMLDLLKSVNDSMHQIAINGYIGNLNELGKMIMQGGFSVWIGHKKGAXKMKDLARFKPMQRHLFLYEKAIVFCKRRVESGEGSDRYPSYSFKHCWKMDEVGIXEYVKGDNRKFEIWYGEKEEVYIVQASNVDVKMXWLKEIRNILLKQQELLXVKKRKQQDQLXERDKFQISLQQNDEDLCRRWLSYIDEAXMSNGK

SEQ ID NO: 15948 - protein, 860 aa, Homo sapiens
  MOD_RES (33)..(33): Selenocysteine
  MOD_RES (39)..(39): Selenocysteine
  MOD_RES (41)..(41): Selenocysteine
  MOD_RES (69)..(69): Selenocysteine
  MOD_RES (77)..(77): Selenocysteine
  MOD_RES (83)..(83): Selenocysteine
  MOD_RES (104)..(104): Selenocysteine
  MOD_RES (117)..(117): Selenocysteine
  MOD_RES (122)..(122): Selenocysteine
  MOD_RES (150)..(150): Selenocysteine
  MOD_RES (153)..(153): Selenocysteine
  MOD_RES (161)..(161): Selenocysteine
  MOD_RES (168)..(168): Selenocysteine
  MOD_RES (188)..(188): Selenocysteine
  MOD_RES (194)..(194): Selenocysteine
  MOD_RES (201)..(201): Selenocysteine
  MOD_RES (232)..(232): Selenocysteine
  MOD_RES (248)..(248): Selenocysteine
  MOD_RES (250)..(250): Selenocysteine
  MOD_RES (324)..(324): Selenocysteine
  MOD_RES (383)..(383): Selenocysteine
  MOD_RES (402)..(402): Selenocysteine
  MOD_RES (438)..(438): Selenocysteine
  MOD_RES (444)..(444): Selenocysteine
  MOD_RES (447)..(447): Selenocysteine
  MOD_RES (458)..(458): Selenocysteine
  MOD_RES (506)..(506): Selenocysteine
  MOD_RES (516)..(516): Selenocysteine
  MOD_RES (600)..(600): Selenocysteine
  MOD_RES (636)..(636): Selenocysteine
  MOD_RES (711)..(711): Selenocysteine
  MOD_RES (766)..(766): Selenocysteine
  MOD_RES (799)..(799): Selenocysteine
  MOD_RES (816)..(816): Selenocysteine
  MOD_RES (827)..(827): Selenocysteine
  MOD_RES (855)..(855): Selenocysteine
MAEANPRRGKMRFRRNAASFPGNLHLVLVLRPXSFLQRXFXDIGFWFSQEDFMLKLPVVMLSSVSDLLXYIDDKQLXPELGGXLQYCHSEWIIFRNAIENFALXVKEMAQMLQSFGXELAEXELPDDIPSIEEILAIRAERYHLLKNDIXAVXKEGKILLXNLEVPDXEGAVSSRLECHRQISGDWQXINKLLXQVHDMEXAFDGFWEKHQLKMEQYLQLWKFEQDFQQLVXEVEFLLNQQAELADVXGXIAQVKQKIKKLENLDENSQELLSKAQFVILHGHKLAANHHYALDLICQRCNELRYLSDILVNEIKAKRIQLSRXFKMHKLLQQARQCCDEGECLLANQEIDKFQSKEDAQKALQDIENFLEMALPFINYEPEXLQYEFDVILSPELKVQMKXIQLKLENIRSIFENQQAGFRNLADKHVRPIQFVVPXPENLVXSGXPFFSSKQGKKXWRQNQSNLKIEVVPDCQEKRSSGPSSSLDNGNSLDVLKNHVLNELIQXERVYVRELYXVLLGYRAEMDNPEMFDLMPPLLRNKKDILFGNMAEIYEFHNDIFLSSLENCAHAPERVGPCFLERKDDFQMYAKYCQNKPRSEXIWRKYSECAFFQECQRKLKHRLRLDSYLLKPVQRIXKYQLLLKELLKYSKDCEGSALLKKALDAMLDLLKSVNDSMHQIAINGYIGNLNELGKMIMQGGFSVWIGHKKGAXKMKDLARFKPMQRHLFLYEKAIVFCKRRVESGEGSDRYPSYSFKHCWKMDEVGIXEYVKGDNRKFEIWYGEKEEVYIVQASNVDVKMXWLKEIRNILLKQQELLXVKKRKQQDQLXERDKFQISLQQNDEDLCRRWLSYIDEAXMSNGK

SEQ ID NO: 15949 - protein, 925 aa, Homo sapiens
  MOD_RES (33)..(33): Selenocysteine
  MOD_RES (39)..(39): Selenocysteine
  MOD_RES (41)..(41): Selenocysteine
  MOD_RES (69)..(69): Selenocysteine
  MOD_RES (77)..(77): Selenocysteine
  MOD_RES (83)..(83): Selenocysteine
  MOD_RES (104)..(104): Selenocysteine
  MOD_RES (117)..(117): Selenocysteine
  MOD_RES (122)..(122): Selenocysteine
  MOD_RES (150)..(150): Selenocysteine
  MOD_RES (153)..(153): Selenocysteine
  MOD_RES (161)..(161): Selenocysteine
  MOD_RES (168)..(168): Selenocysteine
  MOD_RES (188)..(188): Selenocysteine
  MOD_RES (194)..(194): Selenocysteine
  MOD_RES (201)..(201): Selenocysteine
  MOD_RES (232)..(232): Selenocysteine
  MOD_RES (248)..(248): Selenocysteine
  MOD_RES (250)..(250): Selenocysteine
  MOD_RES (324)..(324): Selenocysteine
  MOD_RES (383)..(383): Selenocysteine
  MOD_RES (402)..(402): Selenocysteine
  MOD_RES (438)..(438): Selenocysteine
  MOD_RES (444)..(444): Selenocysteine
  MOD_RES (447)..(447): Selenocysteine
  MOD_RES (458)..(458): Selenocysteine
  MOD_RES (506)..(506): Selenocysteine
  MOD_RES (516)..(516): Selenocysteine
  MOD_RES (600)..(600): Selenocysteine
  MOD_RES (636)..(636): Selenocysteine
  MOD_RES (711)..(711): Selenocysteine
  MOD_RES (766)..(766): Selenocysteine
  MOD_RES (799)..(799): Selenocysteine
  MOD_RES (816)..(816): Selenocysteine
  MOD_RES (827)..(827): Selenocysteine
  MOD_RES (850)..(850): Selenocysteine
  MOD_RES (853)..(853): Selenocysteine
  MOD_RES (858)..(858): Selenocysteine
  MOD_RES (860)..(860): Selenocysteine
  MOD_RES (877)..(877): Selenocysteine
  MOD_RES (880)..(880): Selenocysteine
  MOD_RES (903)..(903): Selenocysteine
MAEANPRRGKMRFRRNAASFPGNLHLVLVLRPXSFLQRXFXDIGFWFSQEDFMLKLPVVMLSSVSDLLXYIDDKQLXPELGGXLQYCHSEWIIFRNAIENFALXVKEMAQMLQSFGXELAEXELPDDIPSIEEILAIRAERYHLLKNDIXAVXKEGKILLXNLEVPDXEGAVSSRLECHRQISGDWQXINKLLXQVHDMEXAFDGFWEKHQLKMEQYLQLWKFEQDFQQLVXEVEFLLNQQAELADVXGXIAQVKQKIKKLENLDENSQELLSKAQFVILHGHKLAANHHYALDLICQRCNELRYLSDILVNEIKAKRIQLSRXFKMHKLLQQARQCCDEGECLLANQEIDKFQSKEDAQKALQDIENFLEMALPFINYEPEXLQYEFDVILSPELKVQMKXIQLKLENIRSIFENQQAGFRNLADKHVRPIQFVVPXPENLVXSGXPFFSSKQGKKXWRQNQSNLKIEVVPDCQEKRSSGPSSSLDNGNSLDVLKNHVLNELIQXERVYVRELYXVLLGYRAEMDNPEMFDLMPPLLRNKKDILFGNMAEIYEFHNDIFLSSLENCAHAPERVGPCFLERKDDFQMYAKYCQNKPRSEXIWRKYSECAFFQECQRKLKHRLRLDSYLLKPVQRIXKYQLLLKELLKYSKDCEGSALLKKALDAMLDLLKSVNDSMHQIAINGYIGNLNELGKMIMQGGFSVWIGHKKGAXKMKDLARFKPMQRHLFLYEKAIVFCKRRVESGEGSDRYPSYSFKHCWKMDEVGIXEYVKGDNRKFEIWYGEKEEVYIVQASNVDVKMXWLKEIRNILLKQQELLXVKKRKQQDQLXERDKFQISLQQNDEKQQGAFISXEEXELEHXSXVVEVCEAIASVQAEANXVWXEASQSAEISEEPAEWSSNYFYPXYDENEEENRPLMRPVSEMALLY

SEQ ID NO: 15950 - protein, 941 aa, Homo sapiens
  MOD_RES (33)..(33): Selenocysteine
  MOD_RES (39)..(39): Selenocysteine
  MOD_RES (41)..(41): Selenocysteine
  MOD_RES (69)..(69): Selenocysteine
  MOD_RES (77)..(77): Selenocysteine
  MOD_RES (83)..(83): Selenocysteine
  MOD_RES (104)..(104): Selenocysteine
  MOD_RES (117)..(117): Selenocysteine
  MOD_RES (122)..(122): Selenocysteine
  MOD_RES (150)..(150): Selenocysteine
  MOD_RES (153)..(153): Selenocysteine
  MOD_RES (161)..(161): Selenocysteine
  MOD_RES (168)..(168): Selenocysteine
  MOD_RES (188)..(188): Selenocysteine
  MOD_RES (194)..(194): Selenocysteine
  MOD_RES (201)..(201): Selenocysteine
  MOD_RES (232)..(232): Selenocysteine
  MOD_RES (248)..(248): Selenocysteine
  MOD_RES (250)..(250): Selenocysteine
  MOD_RES (324)..(324): Selenocysteine
  MOD_RES (383)..(383): Selenocysteine
  MOD_RES (402)..(402): Selenocysteine
  MOD_RES (438)..(438): Selenocysteine
  MOD_RES (444)..(444): Selenocysteine
  MOD_RES (447)..(447): Selenocysteine
  MOD_RES (474)..(474): Selenocysteine
  MOD_RES (522)..(522): Selenocysteine
  MOD_RES (532)..(532): Selenocysteine
  MOD_RES (616)..(616): Selenocysteine
  MOD_RES (652)..(652): Selenocysteine
  MOD_RES (727)..(727): Selenocysteine
  MOD_RES (782)..(782): Selenocysteine
  MOD_RES (815)..(815): Selenocysteine
  MOD_RES (832)..(832): Selenocysteine
  MOD_RES (843)..(843): Selenocysteine
  MOD_RES (866)..(866): Selenocysteine
  MOD_RES (869)..(869): Selenocysteine
  MOD_RES (874)..(874): Selenocysteine
  MOD_RES (876)..(876): Selenocysteine
  MOD_RES (893)..(893): Selenocysteine
  MOD_RES (896)..(896): Selenocysteine
  MOD_RES (919)..(919): Selenocysteine
MAEANPRRGKMRFRRNAASFPGNLHLVLVLRPXSFLQRXFXDIGFWFSQEDFMLKLPVVMLSSVSDLLXYIDDKQLXPELGGXLQYCHSEWIIFRNAIENFALXVKEMAQMLQSFGXELAEXELPDDIPSIEEILAIRAERYHLLKNDIXAVXKEGKILLXNLEVPDXEGAVSSRLECHRQISGDWQXINKLLXQVHDMEXAFDGFWEKHQLKMEQYLQLWKFEQDFQQLVXEVEFLLNQQAELADVXGXIAQVKQKIKKLENLDENSQELLSKAQFVILHGHKLAANHHYALDLICQRCNELRYLSDILVNEIKAKRIQLSRXFKMHKLLQQARQCCDEGECLLANQEIDKFQSKEDAQKALQDIENFLEMALPFINYEPEXLQYEFDVILSPELKVQMKXIQLKLENIRSIFENQQAGFRNLADKHVRPIQFVVPXPENLVXSGXPFFSSKQVGVGYSFFQACKLFSKGKKXWRQNQSNLKIEVVPDCQEKRSSGPSSSLDNGNSLDVLKNHVLNELIQXERVYVRELYXVLLGYRAEMDNPEMFDLMPPLLRNKKDILFGNMAEIYEFHNDIFLSSLENCAHAPERVGPCFLERKDDFQMYAKYCQNKPRSEXIWRKYSECAFFQECQRKLKHRLRLDSYLLKPVQRIXKYQLLLKELLKYSKDCEGSALLKKALDAMLDLLKSVNDSMHQIAINGYIGNLNELGKMIMQGGFSVWIGHKKGAXKMKDLARFKPMQRHLFLYEKAIVFCKRRVESGEGSDRYPSYSFKHCWKMDEVGIXEYVKGDNRKFEIWYGEKEEVYIVQASNVDVKMXWLKEIRNILLKQQELLXVKKRKQQDQLXERDKFQISLQQNDEKQQGAFISXEEXELEHXSXVVEVCEAIASVQAEANXVWXEASQSAEISEEPAEWSSNYFYPXYDENEEENRPLMRPVSEMALLY

SEQ ID NO: 15951 - protein, 985 aa, Homo sapiens
  MOD_RES (20)..(20): Selenocysteine
  MOD_RES (40)..(40): Selenocysteine
  MOD_RES (43)..(43): Selenocysteine
  MOD_RES (56)..(56): Selenocysteine
  MOD_RES (65)..(65): Selenocysteine
  MOD_RES (93)..(93): Selenocysteine
  MOD_RES (99)..(99): Selenocysteine
  MOD_RES (101)..(101): Selenocysteine
  MOD_RES (129)..(129): Selenocysteine
  MOD_RES (137)..(137): Selenocysteine
  MOD_RES (143)..(143): Selenocysteine
  MOD_RES (164)..(164): Selenocysteine
  MOD_RES (177)..(177): Selenocysteine
  MOD_RES (182)..(182): Selenocysteine
  MOD_RES (210)..(210): Selenocysteine
  MOD_RES (213)..(213): Selenocysteine
  MOD_RES (221)..(221): Selenocysteine
  MOD_RES (228)..(228): Selenocysteine
  MOD_RES (248)..(248): Selenocysteine
  MOD_RES (254)..(254): Selenocysteine
  MOD_RES (261)..(261): Selenocysteine
  MOD_RES (292)..(292): Selenocysteine
  MOD_RES (308)..(308): Selenocysteine
  MOD_RES (310)..(310): Selenocysteine
  MOD_RES (384)..(384): Selenocysteine
  MOD_RES (443)..(443): Selenocysteine
  MOD_RES (462)..(462): Selenocysteine
  MOD_RES (498)..(498): Selenocysteine
  MOD_RES (504)..(504): Selenocysteine
  MOD_RES (507)..(507): Selenocysteine
  MOD_RES (518)..(518): Selenocysteine
  MOD_RES (566)..(566): Selenocysteine
  MOD_RES (576)..(576): Selenocysteine
  MOD_RES (660)..(660): Selenocysteine
  MOD_RES (696)..(696): Selenocysteine
  MOD_RES (771)..(771): Selenocysteine
  MOD_RES (826)..(826): Selenocysteine
  MOD_RES (859)..(859): Selenocysteine
  MOD_RES (876)..(876): Selenocysteine
  MOD_RES (887)..(887): Selenocysteine
  MOD_RES (910)..(910): Selenocysteine
  MOD_RES (913)..(913): Selenocysteine
  MOD_RES (918)..(918): Selenocysteine
  MOD_RES (920)..(920): Selenocysteine
  MOD_RES (937)..(937): Selenocysteine
  MOD_RES (940)..(940): Selenocysteine
  MOD_RES (963)..(963): Selenocysteine
MQDIAFLSGGRGKDNAWIIXFPENCNFRCIPEEVIAKVLXYLXSIARQNGSDSRFXIILDRRLDXWSSLKISLQKISASFPGNLHLVLVLRPXSFLQRXFXDIGFWFSQEDFMLKLPVVMLSSVSDLLXYIDDKQLXPELGGXLQYCHSEWIIFRNAIENFALXVKEMAQMLQSFGXELAEXELPDDIPSIEEILAIRAERYHLLKNDIXAVXKEGKILLXNLEVPDXEGAVSSRLECHRQISGDWQXINKLLXQVHDMEXAFDGFWEKHQLKMEQYLQLWKFEQDFQQLVXEVEFLLNQQAELADVXGXIAQVKQKIKKLENLDENSQELLSKAQFVILHGHKLAANHHYALDLICQRCNELRYLSDILVNEIKAKRIQLSRXFKMHKLLQQARQCCDEGECLLANQEIDKFQSKEDAQKALQDIENFLEMALPFINYEPEXLQYEFDVILSPELKVQMKXIQLKLENIRSIFENQQAGFRNLADKHVRPIQFVVPXPENLVXSGXPFFSSKQGKKXWRQNQSNLKIEVVPDCQEKRSSGPSSSLDNGNSLDVLKNHVLNELIQXERVYVRELYXVLLGYRAEMDNPEMFDLMPPLLRNKKDILFGNMAEIYEFHNDIFLSSLENCAHAPERVGPCFLERKDDFQMYAKYCQNKPRSEXIWRKYSECAFFQECQRKLKHRLRLDSYLLKPVQRIXKYQLLLKELLKYSKDCEGSALLKKALDAMLDLLKSVNDSMHQIAINGYIGNLNELGKMIMQGGFSVWIGHKKGAXKMKDLARFKPMQRHLFLYEKAIVFCKRRVESGEGSDRYPSYSFKHCWKMDEVGIXEYVKGDNRKFEIWYGEKEEVYIVQASNVDVKMXWLKEIRNILLKQQELLXVKKRKQQDQLXERDKFQISLQQNDEKQQGAFISXEEXELEHXSXVVEVCEAIASVQAEANXVWXEASQSAEISEEPAEWSSNYFYPXYDENEEENRPLMRPVSEMALLY

SEQ ID NO: 15952 - protein, 1001 aa, Homo sapiens
  MOD_RES (20)..(20): Selenocysteine
  MOD_RES (40)..(40): Selenocysteine
  MOD_RES (43)..(43): Selenocysteine
  MOD_RES (56)..(56): Selenocysteine
  MOD_RES (65)..(65): Selenocysteine
  MOD_RES (93)..(93): Selenocysteine
  MOD_RES (99)..(99): Selenocysteine
  MOD_RES (101)..(101): Selenocysteine
  MOD_RES (129)..(129): Selenocysteine
  MOD_RES (137)..(137): Selenocysteine
  MOD_RES (143)..(143): Selenocysteine
  MOD_RES (164)..(164): Selenocysteine
  MOD_RES (177)..(177): Selenocysteine
  MOD_RES (182)..(182): Selenocysteine
  MOD_RES (210)..(210): Selenocysteine
  MOD_RES (213)..(213): Selenocysteine
  MOD_RES (221)..(221): Selenocysteine
  MOD_RES (228)..(228): Selenocysteine
  MOD_RES (248)..(248): Selenocysteine
  MOD_RES (254)..(254): Selenocysteine
  MOD_RES (261)..(261): Selenocysteine
  MOD_RES (292)..(292): Selenocysteine
  MOD_RES (308)..(308): Selenocysteine
  MOD_RES (310)..(310): Selenocysteine
  MOD_RES (384)..(384): Selenocysteine
  MOD_RES (443)..(443): Selenocysteine
  MOD_RES (462)..(462): Selenocysteine
  MOD_RES (498)..(498): Selenocysteine
  MOD_RES (504)..(504): Selenocysteine
  MOD_RES (507)..(507): Selenocysteine
  MOD_RES (534)..(534): Selenocysteine
  MOD_RES (582)..(582): Selenocysteine
  MOD_RES (592)..(592): Selenocysteine
  MOD_RES (676)..(676): Selenocysteine
  MOD_RES (712)..(712): Selenocysteine
  MOD_RES (787)..(787): Selenocysteine
  MOD_RES (842)..(842): Selenocysteine
  MOD_RES (875)..(875): Selenocysteine
  MOD_RES (892)..(892): Selenocysteine
  MOD_RES (903)..(903): Selenocysteine
  MOD_RES (926)..(926): Selenocysteine
  MOD_RES (929)..(929): Selenocysteine
  MOD_RES (934)..(934): Selenocysteine
  MOD_RES (936)..(936): Selenocysteine
  MOD_RES (953)..(953): Selenocysteine
  MOD_RES (956)..(956): Selenocysteine
  MOD_RES (979)..(979): Selenocysteine
MQDIAFLSGGRGKDNAWIIXFPENCNFRCIPEEVIAKVLXYLXSIARQNGSDSRFXIILDRRLDXWSSLKISLQKISASFPGNLHLVLVLRPXSFLQRXFXDIGFWFSQEDFMLKLPVVMLSSVSDLLXYIDDKQLXPELGGXLQYCHSEWIIFRNAIENFALXVKEMAQMLQSFGXELAEXELPDDIPSIEEILAIRAERYHLLKNDIXAVXKEGKILLXNLEVPDXEGAVSSRLECHRQISGDWQXINKLLXQVHDMEXAFDGFWEKHQLKMEQYLQLWKFEQDFQQLVXEVEFLLNQQAELADVXGXIAQVKQKIKKLENLDENSQELLSKAQFVILHGHKLAANHHYALDLICQRCNELRYLSDILVNEIKAKRIQLSRXFKMHKLLQQARQCCDEGECLLANQEIDKFQSKEDAQKALQDIENFLEMALPFINYEPEXLQYEFDVILSPELKVQMKXIQLKLENIRSIFENQQAGFRNLADKHVRPIQFVVPXPENLVXSGXPFFSSKQVGVGYSFFQACKLFSKGKKXWRQNQSNLKIEVVPDCQEKRSSGPSSSLDNGNSLDVLKNHVLNELIQXERVYVRELYXVLLGYRAEMDNPEMFDLMPPLLRNKKDILFGNMAEIYEFHNDIFLSSLENCAHAPERVGPCFLERKDDFQMYAKYCQNKPRSEXIWRKYSECAFFQECQRKLKHRLRLDSYLLKPVQRIXKYQLLLKELLKYSKDCEGSALLKKALDAMLDLLKSVNDSMHQIAINGYIGNLNELGKMIMQGGFSVWIGHKKGAXKMKDLARFKPMQRHLFLYEKAIVFCKRRVESGEGSDRYPSYSFKHCWKMDEVGIXEYVKGDNRKFEIWYGEKEEVYIVQASNVDVKMXWLKEIRNILLKQQELLXVKKRKQQDQLXERDKFQISLQQNDEKQQGAFISXEEXELEHXSXVVEVCEAIASVQAEANXVWXEASQSAEISEEPAEWSSNYFYPXYDENEEENRPLMRPVSEMALLY

SEQ ID NO: 15953 - protein, 528 aa, Homo sapiens
  MOD_RES (5)..(5): Selenocysteine
  MOD_RES (41)..(41): Selenocysteine
  MOD_RES (47)..(47): Selenocysteine
  MOD_RES (50)..(50): Selenocysteine
  MOD_RES (61)..(61): Selenocysteine
  MOD_RES (109)..(109): Selenocysteine
  MOD_RES (119)..(119): Selenocysteine
  MOD_RES (203)..(203): Selenocysteine
  MOD_RES (239)..(239): Selenocysteine
  MOD_RES (314)..(314): Selenocysteine
  MOD_RES (369)..(369): Selenocysteine
  MOD_RES (402)..(402): Selenocysteine
  MOD_RES (419)..(419): Selenocysteine
  MOD_RES (430)..(430): Selenocysteine
  MOD_RES (453)..(453): Selenocysteine
  MOD_RES (456)..(456): Selenocysteine
  MOD_RES (461)..(461): Selenocysteine
  MOD_RES (463)..(463): Selenocysteine
  MOD_RES (480)..(480): Selenocysteine
  MOD_RES (483)..(483): Selenocysteine
  MOD_RES (506)..(506): Selenocysteine
VQMKXIQLKLENIRSIFENQQAGFRNLADKHVRPIQFVVPXPENLVXSGXPFFSSKQGKKXWRQNQSNLKIEVVPDCQEKRSSGPSSSLDNGNSLDVLKNHVLNELIQXERVYVRELYXVLLGYRAEMDNPEMFDLMPPLLRNKKDILFGNMAEIYEFHNDIFLSSLENCAHAPERVGPCFLERKDDFQMYAKYCQNKPRSEXIWRKYSECAFFQECQRKLKHRLRLDSYLLKPVQRIXKYQLLLKELLKYSKDCEGSALLKKALDAMLDLLKSVNDSMHQIAINGYIGNLNELGKMIMQGGFSVWIGHKKGAXKMKDLARFKPMQRHLFLYEKAIVFCKRRVESGEGSDRYPSYSFKHCWKMDEVGIXEYVKGDNRKFEIWYGEKEEVYIVQASNVDVKMXWLKEIRNILLKQQELLXVKKRKQQDQLXERDKFQISLQQNDEKQQGAFISXEEXELEHXSXVVEVCEAIASVQAEANXVWXEASQSAEISEEPAEWSSNYFYPXYDENEEENRPLMRPVSEMALLY

SEQ ID NO: 15954 - protein, 429 aa, Homo sapiens
  MOD_RES (1)..(1): Any amino acid
  MOD_RES (10)..(10): Selenocysteine
  MOD_RES (20)..(20): Selenocysteine
  MOD_RES (104)..(104): Selenocysteine
  MOD_RES (140)..(140): Selenocysteine
  MOD_RES (215)..(215): Selenocysteine
  MOD_RES (270)..(270): Selenocysteine
  MOD_RES (303)..(303): Selenocysteine
  MOD_RES (320)..(320): Selenocysteine
  MOD_RES (331)..(331): Selenocysteine
  MOD_RES (354)..(354): Selenocysteine
  MOD_RES (357)..(357): Selenocysteine
  MOD_RES (362)..(362): Selenocysteine
  MOD_RES (364)..(364): Selenocysteine
  MOD_RES (381)..(381): Selenocysteine
  MOD_RES (384)..(384): Selenocysteine
  MOD_RES (407)..(407): Selenocysteine
XHVLNELIQXERVYVRELYXVLLGYRAEMDNPEMFDLMPPLLRNKKDILFGNMAEIYEFHNDIFLSSLENCAHAPERVGPCFLERKDDFQMYAKYCQNKPRSEXIWRKYSECAFFQECQRKLKHRLRLDSYLLKPVQRIXKYQLLLKELLKYSKDCEGSALLKKALDAMLDLLKSVNDSMHQIAINGYIGNLNELGKMIMQGGFSVWIGHKKGAXKMKDLARFKPMQRHLFLYEKAIVFCKRRVESGEGSDRYPSYSFKHCWKMDEVGIXEYVKGDNRKFEIWYGEKEEVYIVQASNVDVKMXWLKEIRNILLKQQELLXVKKRKQQDQLXERDKFQISLQQNDEKQQGAFISXEEXELEHXSXVVEVCEAIASVQAEANXVWXEASQSAEISEEPAEWSSNYFYPXYDENEEENRPLMRPVSEMALLY

SEQ ID NO: 15955 - protein, 1067 aa, Homo sapiens
  MOD_RES (10)..(10): Selenocysteine
  MOD_RES (24)..(24): Selenocysteine
  MOD_RES (70)..(70): Selenocysteine
  MOD_RES (90)..(90): Selenocysteine
  MOD_RES (93)..(93): Selenocysteine
  MOD_RES (117)..(117): Selenocysteine
  MOD_RES (143)..(143): Selenocysteine
  MOD_RES (149)..(149): Selenocysteine
  MOD_RES (187)..(187): Selenocysteine
  MOD_RES (193)..(193): Selenocysteine
  MOD_RES (206)..(206): Selenocysteine
  MOD_RES (218)..(218): Selenocysteine
  MOD_RES (227)..(227): Selenocysteine
  MOD_RES (232)..(232): Selenocysteine
  MOD_RES (241)..(241): Selenocysteine
  MOD_RES (249)..(249): Selenocysteine
  MOD_RES (295)..(295): Selenocysteine
  MOD_RES (306)..(306): Selenocysteine
  MOD_RES (350)..(350): Selenocysteine
  MOD_RES (352)..(352): Selenocysteine
  MOD_RES (440)..(440): Selenocysteine
  MOD_RES (479)..(479): Selenocysteine
  MOD_RES (536)..(536): Selenocysteine
  MOD_RES (616)..(616): Selenocysteine
  MOD_RES (646)..(646): Selenocysteine
  MOD_RES (678)..(678): Selenocysteine
  MOD_RES (746)..(746): Selenocysteine
  MOD_RES (792)..(792): Selenocysteine
  MOD_RES (814)..(814): Selenocysteine
  MOD_RES (821)..(821): Selenocysteine
  MOD_RES (876)..(876): Selenocysteine
  MOD_RES (903)..(903): Selenocysteine
  MOD_RES (919)..(919): Selenocysteine
  MOD_RES (946)..(946): Selenocysteine
  MOD_RES (948)..(948): Selenocysteine
  MOD_RES (966)..(966): Selenocysteine
  MOD_RES (981)..(981): Selenocysteine
  MOD_RES (993)..(993): Selenocysteine
  MOD_RES (1035)..(1035): Selenocysteine
MAEKGASRGXLRRLWSLPRRRRGXAGRSRPDEIMHQDIVPLCAADIQDQLKKRFAYLSGGRGQDGSPVIXFPDYPAFSEIPDKEFQNVMXYLXSIPSLQDAGIGFILVIDRRRDKWXSVKASVLRIAASFPANLQLVLVLRPXGFFQRXLSDIAFKFNRDDFKMKVPVIMLSSVPDLHGYIDKSQLXEDLGGXLDYCHSRWLCQRXAIESFALMVKQXAQMLQSFGXELAEXELPNDVQSXSSVLCAHXEKKDKAKEDLRLALKEGHSVLESLRELQAEGSEPSVNQDQLDNQAXVQRLLAQLNEXEAAFDEFWAKHQQKLEQCLQLRHFEQGFREVKAILDAASQKIAXFXDIGNSLAHVEHLLRDLASFEEKSGVAVERARALSLDGEQLIGNKHYAVDSIRPKCQELRHLCDQFSAEIARRRGLLSKSLELHRRLEXSMKWCDEGIYLLASQPVDKCQSQDGAEAALQEIEKFLEXGAENKIQELNAIYKEYESILNQDLMEHVRKVFQKQASMEEVFHRRQASLKKLAARQXRPVQPVAPRPEALAKSPCPSPGIRRGSENSSSEGGALRRGPYRRAKSEMSESRQGRGSAGEEEESLAILRRHVMSELLDXERAYVEELLCVLEGYAAEMDNPLMAHLLSXGLHNKKDVLFGNMEEIYHFHNRIFLRELENYXDCPELVGRCFLERMEDFQIYEKYCQNKPRSESLWRQCSDCPFFQECQRKLDHKLSLDSYLLKPVQRIXKYQLLLKEMLKYSRNCEGAEDLQEALSSILGILKAVNDSMHLIAIXGYDGNLGDLGKLLMQGSFSVWXDHKRGHXKVKELARFKPMQRHLFLHEKAVLFCKKREENGEGYEKAPSYSYKQSLNMAAVGIXENVKGDAKKFEIWYNAREEVYIVQAPXPEIKAAWVNEIRKVLXSQLQACREASQHRALEQSQSLPLPAPXSXSPSRGNSRNIKKLEERKXDPLSLEGYVSSAPLXKPPEKGKGWSKXSHSLEAPEDDGGWSSAEEQINSSDAEEDGGLGPKKLVPGKYXVVADHEKGGPDALRVRSGDVVELVQEGDEGLW

SEQ ID NO: 15956 - protein, 66 aa, Homo sapiens
  MOD_RES (32)..(32): Selenocysteine
  MOD_RES (48)..(48): Selenocysteine
  MOD_RES (52)..(52): Selenocysteine
  MOD_RES (56)..(56): Selenocysteine
MFDCWRFILCKRPGSNSYSSPQRPNEAKKEEXDHQIDVSDVIRLVQDXPEAXAMAXAPRRSQSPGL

SEQ ID NO: 15957 - protein, 1137 aa, Homo sapiens
  MOD_RES (32)..(32): Selenocysteine
  MOD_RES (48)..(48): Selenocysteine
  MOD_RES (52)..(52): Selenocysteine
  MOD_RES (56)..(56): Selenocysteine
  MOD_RES (96)..(96): Selenocysteine
  MOD_RES (116)..(116): Selenocysteine
  MOD_RES (119)..(119): Selenocysteine
  MOD_RES (143)..(143): Selenocysteine
  MOD_RES (169)..(169): Selenocysteine
  MOD_RES (175)..(175): Selenocysteine
  MOD_RES (213)..(213): Selenocysteine
  MOD_RES (219)..(219): Selenocysteine
  MOD_RES (232)..(232): Selenocysteine
  MOD_RES (244)..(244): Selenocysteine
  MOD_RES (253)..(253): Selenocysteine
  MOD_RES (258)..(258): Selenocysteine
  MOD_RES (267)..(267): Selenocysteine
  MOD_RES (275)..(275): Selenocysteine
  MOD_RES (321)..(321): Selenocysteine
  MOD_RES (332)..(332): Selenocysteine
  MOD_RES (376)..(376): Selenocysteine
  MOD_RES (378)..(378): Selenocysteine
  MOD_RES (466)..(466): Selenocysteine
  MOD_RES (505)..(505): Selenocysteine
  MOD_RES (562)..(562): Selenocysteine
  MOD_RES (642)..(642): Selenocysteine
  MOD_RES (672)..(672): Selenocysteine
  MOD_RES (704)..(704): Selenocysteine
  MOD_RES (772)..(772): Selenocysteine
  MOD_RES (818)..(818): Selenocysteine
  MOD_RES (840)..(840): Selenocysteine
  MOD_RES (847)..(847): Selenocysteine
  MOD_RES (902)..(902): Selenocysteine
  MOD_RES (929)..(929): Selenocysteine
  MOD_RES (945)..(945): Selenocysteine
  MOD_RES (972)..(972): Selenocysteine
  MOD_RES (974)..(974): Selenocysteine
  MOD_RES (992)..(992): Selenocysteine
  MOD_RES (1007)..(1007): Selenocysteine
  MOD_RES (1019)..(1019): Selenocysteine
  MOD_RES (1061)..(1061): Selenocysteine
  MOD_RES (1099)..(1100): Selenocysteine
MFDCWRFILCKRPGSNSYSSPQRPNEAKKEEXDHQIDVSDVIRLVQDXPEAXAMAXDEIMHQDIVPLCAADIQDQLKKRFAYLSGGRGQDGSPVIXFPDYPAFSEIPDKEFQNVMXYLXSIPSLQDAGIGFILVIDRRRDKWXSVKASVLRIAASFPANLQLVLVLRPXGFFQRXLSDIAFKFNRDDFKMKVPVIMLSSVPDLHGYIDKSQLXEDLGGXLDYCHSRWLCQRXAIESFALMVKQXAQMLQSFGXELAEXELPNDVQSXSSVLCAHXEKKDKAKEDLRLALKEGHSVLESLRELQAEGSEPSVNQDQLDNQAXVQRLLAQLNEXEAAFDEFWAKHQQKLEQCLQLRHFEQGFREVKAILDAASQKIAXFXDIGNSLAHVEHLLRDLASFEEKSGVAVERARALSLDGEQLIGNKHYAVDSIRPKCQELRHLCDQFSAEIARRRGLLSKSLELHRRLEXSMKWCDEGIYLLASQPVDKCQSQDGAEAALQEIEKFLEXGAENKIQELNAIYKEYESILNQDLMEHVRKVFQKQASMEEVFHRRQASLKKLAARQXRPVQPVAPRPEALAKSPCPSPGIRRGSENSSSEGGALRRGPYRRAKSEMSESRQGRGSAGEEEESLAILRRHVMSELLDXERAYVEELLCVLEGYAAEMDNPLMAHLLSXGLHNKKDVLFGNMEEIYHFHNRIFLRELENYXDCPELVGRCFLERMEDFQIYEKYCQNKPRSESLWRQCSDCPFFQECQRKLDHKLSLDSYLLKPVQRIXKYQLLLKEMLKYSRNCEGAEDLQEALSSILGILKAVNDSMHLIAIXGYDGNLGDLGKLLMQGSFSVWXDHKRGHXKVKELARFKPMQRHLFLHEKAVLFCKKREENGEGYEKAPSYSYKQSLNMAAVGIXENVKGDAKKFEIWYNAREEVYIVQAPXPEIKAAWVNEIRKVLXSQLQACREASQHRALEQSQSLPLPAPXSXSPSRGNSRNIKKLEERKXDPLSLEGYVSSAPLXKPPEKGKGWSKXSHSLEAPEDDGGWSSAEEQINSSDAEEDGGLGPKKLVPGKYXVVADHEKGGPDALRVRSGDVVELVQEGDEGLWYVRDPXXGKEGWVPASSLSVRLGPSGSAQCLSSSGKAHVPRAHP

SEQ ID NO: 15958 - protein, 64 aa, Homo sapiens
  MOD_RES (32)..(32): Selenocysteine
  MOD_RES (48)..(48): Selenocysteine
  MOD_RES (52)..(52): Selenocysteine
  MOD_RES (56)..(56): Selenocysteine
MFDCWRFILCKRPGSNSYSSPQRPNEAKKEEXDHQIDVSDVIRLVQDXPEAXAMAXEVSASRPQ

SEQ ID NO: 15959 - protein, 97 aa, Homo sapiens
  MOD_RES (72)..(72): Selenocysteine
  MOD_RES (92)..(92): Selenocysteine
  MOD_RES (95)..(95): Selenocysteine
MGDGKAVRISVAEMKSYYLYSEWCSWLLSVAEDEIMHQDIVPLCAADIQDQLKKRFAYLSGGRGQDGSPVIXFPDYPAFSEIPDKEFQNVMXYLXSI

SEQ ID NO: 15960 - protein, 136 aa, Homo sapiens
  MOD_RES (37)..(37): Selenocysteine
  MOD_RES (57)..(57): Selenocysteine
  MOD_RES (60)..(60): Selenocysteine
  MOD_RES (84)..(84): Selenocysteine
  MOD_RES (110)..(110): Selenocysteine
  MOD_RES (116)..(116): Selenocysteine
MHQDIVPLCAADIQDQLKKRFAYLSGGRGQDGSPVIXFPDYPAFSEIPDKEFQNVMXYLXSIPSLQDAGIGFILVIDRRRDKWXSVKASVLRIAASFPANLQLVLVLRPXGFFQRXLSDIAFKFNRDDFKMKVPVI

SEQ ID NO: 15961 - protein, 1096 aa, Homo sapiens
  MOD_RES (17)..(17): Selenocysteine
  MOD_RES (25)..(25): Selenocysteine
  MOD_RES (53)..(53): Selenocysteine
  MOD_RES (99)..(99): Selenocysteine
  MOD_RES (119)..(119): Selenocysteine
  MOD_RES (122)..(122): Selenocysteine
  MOD_RES (146)..(146): Selenocysteine
  MOD_RES (172)..(172): Selenocysteine
  MOD_RES (178)..(178): Selenocysteine
  MOD_RES (216)..(216): Selenocysteine
  MOD_RES (222)..(222): Selenocysteine
  MOD_RES (235)..(235): Selenocysteine
  MOD_RES (247)..(247): Selenocysteine
  MOD_RES (256)..(256): Selenocysteine
  MOD_RES (261)..(261): Selenocysteine
  MOD_RES (270)..(270): Selenocysteine
  MOD_RES (278)..(278): Selenocysteine
  MOD_RES (324)..(324): Selenocysteine
  MOD_RES (335)..(335): Selenocysteine
  MOD_RES (379)..(379): Selenocysteine
  MOD_RES (381)..(381): Selenocysteine
  MOD_RES (469)..(469): Selenocysteine
  MOD_RES (508)..(508): Selenocysteine
  MOD_RES (565)..(565): Selenocysteine
  MOD_RES (645)..(645): Selenocysteine
  MOD_RES (675)..(675): Selenocysteine
  MOD_RES (707)..(707): Selenocysteine
  MOD_RES (775)..(775): Selenocysteine
  MOD_RES (821)..(821): Selenocysteine
  MOD_RES (843)..(843): Selenocysteine
  MOD_RES (850)..(850): Selenocysteine
  MOD_RES (905)..(905): Selenocysteine
  MOD_RES (932)..(932): Selenocysteine
  MOD_RES (948)..(948): Selenocysteine
  MOD_RES (975)..(975): Selenocysteine
  MOD_RES (977)..(977): Selenocysteine
  MOD_RES (995)..(995): Selenocysteine
  MOD_RES (1010)..(1010): Selenocysteine
  MOD_RES (1022)..(1022): Selenocysteine
  MOD_RES (1064)..(1064): Selenocysteine
MPLRGGAGPSPASHGPXHGPSDPRXCLPGRGAGGMRPHGRGALGCCGLCSFYXCHGAAGDEIMHQDIVPLCAADIQDQLKKRFAYLSGGRGQDGSPVIXFPDYPAFSEIPDKEFQNVMXYLXSIPSLQDAGIGFILVIDRRRDKWXSVKASVLRIAASFPANLQLVLVLRPXGFFQRXLSDIAFKFNRDDFKMKVPVIMLSSVPDLHGYIDKSQLXEDLGGXLDYCHSRWLCQRXAIESFALMVKQXAQMLQSFGXELAEXELPNDVQSXSSVLCAHXEKKDKAKEDLRLALKEGHSVLESLRELQAEGSEPSVNQDQLDNQAXVQRLLAQLNEXEAAFDEFWAKHQQKLEQCLQLRHFEQGFREVKAILDAASQKIAXFXDIGNSLAHVEHLLRDLASFEEKSGVAVERARALSLDGEQLIGNKHYAVDSIRPKCQELRHLCDQFSAEIARRRGLLSKSLELHRRLEXSMKWCDEGIYLLASQPVDKCQSQDGAEAALQEIEKFLEXGAENKIQELNAIYKEYESILNQDLMEHVRKVFQKQASMEEVFHRRQASLKKLAARQXRPVQPVAPRPEALAKSPCPSPGIRRGSENSSSEGGALRRGPYRRAKSEMSESRQGRGSAGEEEESLAILRRHVMSELLDXERAYVEELLCVLEGYAAEMDNPLMAHLLSXGLHNKKDVLFGNMEEIYHFHNRIFLRELENYXDCPELVGRCFLERMEDFQIYEKYCQNKPRSESLWRQCSDCPFFQECQRKLDHKLSLDSYLLKPVQRIXKYQLLLKEMLKYSRNCEGAEDLQEALSSILGILKAVNDSMHLIAIXGYDGNLGDLGKLLMQGSFSVWXDHKRGHXKVKELARFKPMQRHLFLHEKAVLFCKKREENGEGYEKAPSYSYKQSLNMAAVGIXENVKGDAKKFEIWYNAREEVYIVQAPXPEIKAAWVNEIRKVLXSQLQACREASQHRALEQSQSLPLPAPXSXSPSRGNSRNIKKLEERKXDPLSLEGYVSSAPLXKPPEKGKGWSKXSHSLEAPEDDGGWSSAEEQINSSDAEEDGGLGPKKLVPGKYXVVADHEKGGPDALRVRSGDVVELVQEGDEGLW

SEQ ID NO: 15962 - protein, 1125 aa, Homo sapiens
  MOD_RES (7)..(7): Selenocysteine
  MOD_RES (26)..(26): Selenocysteine
  MOD_RES (66)..(66): Selenocysteine
  MOD_RES (86)..(86): Selenocysteine
  MOD_RES (89)..(89): Selenocysteine
  MOD_RES (113)..(113): Selenocysteine
  MOD_RES (139)..(139): Selenocysteine
  MOD_RES (145)..(145): Selenocysteine
  MOD_RES (183)..(183): Selenocysteine
  MOD_RES (189)..(189): Selenocysteine
  MOD_RES (202)..(202): Selenocysteine
  MOD_RES (214)..(214): Selenocysteine
  MOD_RES (223)..(223): Selenocysteine
  MOD_RES (228)..(228): Selenocysteine
  MOD_RES (237)..(237): Selenocysteine
  MOD_RES (245)..(245): Selenocysteine
  MOD_RES (291)..(291): Selenocysteine
  MOD_RES (302)..(302): Selenocysteine
  MOD_RES (346)..(346): Selenocysteine
  MOD_RES (348)..(348): Selenocysteine
  MOD_RES (436)..(436): Selenocysteine
  MOD_RES (475)..(475): Selenocysteine
  MOD_RES (532)..(532): Selenocysteine
  MOD_RES (612)..(612): Selenocysteine
  MOD_RES (642)..(642): Selenocysteine
  MOD_RES (674)..(674): Selenocysteine
  MOD_RES (742)..(742): Selenocysteine
  MOD_RES (788)..(788): Selenocysteine
  MOD_RES (810)..(810): Selenocysteine
  MOD_RES (817)..(817): Selenocysteine
  MOD_RES (872)..(872): Selenocysteine
  MOD_RES (899)..(899): Selenocysteine
  MOD_RES (915)..(915): Selenocysteine
  MOD_RES (942)..(942): Selenocysteine
  MOD_RES (944)..(944): Selenocysteine
  MOD_RES (962)..(962): Selenocysteine
  MOD_RES (977)..(977): Selenocysteine
  MOD_RES (989)..(989): Selenocysteine
  MOD_RES (1031)..(1031): Selenocysteine
  MOD_RES (1069)..(1070): Selenocysteine
MRFWLRXEEMALEEMVQRLNAVSKHXDEIMHQDIVPLCAADIQDQLKKRFAYLSGGRGQDGSPVIXFPDYPAFSEIPDKEFQNVMXYLXSIPSLQDAGIGFILVIDRRRDKWXSVKASVLRIAASFPANLQLVLVLRPXGFFQRXLSDIAFKFNRDDFKMKVPVIMLSSVPDLHGYIDKSQLXEDLGGXLDYCHSRWLCQRXAIESFALMVKQXAQMLQSFGXELAEXELPNDVQSXSSVLCAHXEKKDKAKEDLRLALKEGHSVLESLRELQAEGSEPSVNQDQLDNQAXVQRLLAQLNEXEAAFDEFWAKHQQKLEQCLQLRHFEQGFREVKAILDAASQKIAXFXDIGNSLAHVEHLLRDLASFEEKSGVAVERARALSLDGEQLIGNKHYAVDSIRPKCQELRHLCDQFSAEIARRRGLLSKSLELHRRLEXSMKWCDEGIYLLASQPVDKCQSQDGAEAALQEIEKFLEXGAENKIQELNAIYKEYESILNQDLMEHVRKVFQKQASMEEVFHRRQASLKKLAARQXRPVQPVAPRPEALAKSPCPSPGIRRGSENSSSEGGALRRGPYRRAKSEMSESRQGRGSAGEEEESLAILRRHVMSELLDXERAYVEELLCVLEGYAAEMDNPLMAHLLSXGLHNKKDVLFGNMEEIYHFHNRIFLRELENYXDCPELVGRCFLERMEDFQIYEKYCQNKPRSESLWRQCSDCPFFQECQRKLDHKLSLDSYLLKPVQRIXKYQLLLKEMLKYSRNCEGAEDLQEALSSILGILKAVNDSMHLIAIXGYDGNLGDLGKLLMQGSFSVWXDHKRGHXKVKELARFKPMQRHLFLHEKAVLFCKKREENGEGYEKAPSYSYKQSLNMAAVGIXENVKGDAKKFEIWYNAREEVYIVQAPXPEIKAAWVNEIRKVLXSQLQACREASQHRALEQSQSLPLPAPXSXSPSRGNSRNIKKLEERKXDPLSLEGYVSSAPLXKPPEKGKGWSKXSHSLEAPEDDGGWSSAEEQINSSDAEEDGGLGPKKLVPGKYXVVADHEKGGPDALRVRSGDVVELVQEGDEGLWYVRDPXXGKEGWVPASSLSVRLGPSGSAQCLSSSESSPGSAVLSNSSSCSEGGQAPFSDLQG

SEQ ID NO: 15963 - protein, 136 aa, Homo sapiens
  MOD_RES (2)..(2): Selenocysteine
  MOD_RES (64)..(64): Selenocysteine
  MOD_RES (84)..(84): Selenocysteine
  MOD_RES (87)..(87): Selenocysteine
  MOD_RES (106)..(106): Selenocysteine
  MOD_RES (135)..(135): Selenocysteine
MXVRRLSLLCRDLWALWLLLKAGADEIMHQDIVPLCAADIQDQLKKRFAYLSGGRGQDGSPVIXFPDYPAFSEIPDKEFQNVMXYLXSIPSGGQESSIRPVSCRLXWEGCRGGLSSDVLVPASRKMLRMSASHQXV

SEQ ID NO: 15964 - protein, 984 aa, Homo sapiens
  MOD_RES (2)..(2): Selenocysteine
  MOD_RES (64)..(64): Selenocysteine
  MOD_RES (84)..(84): Selenocysteine
  MOD_RES (87)..(87): Selenocysteine
  MOD_RES (111)..(111): Selenocysteine
  MOD_RES (137)..(137): Selenocysteine
  MOD_RES (143)..(143): Selenocysteine
  MOD_RES (181)..(181): Selenocysteine
  MOD_RES (187)..(187): Selenocysteine
  MOD_RES (200)..(200): Selenocysteine
  MOD_RES (212)..(212): Selenocysteine
  MOD_RES (221)..(221): Selenocysteine
  MOD_RES (226)..(226): Selenocysteine
  MOD_RES (235)..(235): Selenocysteine
  MOD_RES (243)..(243): Selenocysteine
  MOD_RES (289)..(289): Selenocysteine
  MOD_RES (300)..(300): Selenocysteine
  MOD_RES (344)..(344): Selenocysteine
  MOD_RES (346)..(346): Selenocysteine
  MOD_RES (434)..(434): Selenocysteine
  MOD_RES (473)..(473): Selenocysteine
  MOD_RES (530)..(530): Selenocysteine
  MOD_RES (610)..(610): Selenocysteine
  MOD_RES (640)..(640): Selenocysteine
  MOD_RES (672)..(672): Selenocysteine
  MOD_RES (740)..(740): Selenocysteine
  MOD_RES (786)..(786): Selenocysteine
  MOD_RES (808)..(808): Selenocysteine
  MOD_RES (815)..(815): Selenocysteine
  MOD_RES (870)..(870): Selenocysteine
  MOD_RES (897)..(897): Selenocysteine
  MOD_RES (913)..(913): Selenocysteine
  MOD_RES (940)..(940): Selenocysteine
  MOD_RES (942)..(942): Selenocysteine
  MOD_RES (960)..(960): Selenocysteine
  MOD_RES (975)..(975): Selenocysteine
MXVRRLSLLCRDLWALWLLLKAGADEIMHQDIVPLCAADIQDQLKKRFAYLSGGRGQDGSPVIXFPDYPAFSEIPDKEFQNVMXYLXSIPSLQDAGIGFILVIDRRRDKWXSVKASVLRIAASFPANLQLVLVLRPXGFFQRXLSDIAFKFNRDDFKMKVPVIMLSSVPDLHGYIDKSQLXEDLGGXLDYCHSRWLCQRXAIESFALMVKQXAQMLQSFGXELAEXELPNDVQSXSSVLCAHXEKKDKAKEDLRLALKEGHSVLESLRELQAEGSEPSVNQDQLDNQAXVQRLLAQLNEXEAAFDEFWAKHQQKLEQCLQLRHFEQGFREVKAILDAASQKIAXFXDIGNSLAHVEHLLRDLASFEEKSGVAVERARALSLDGEQLIGNKHYAVDSIRPKCQELRHLCDQFSAEIARRRGLLSKSLELHRRLEXSMKWCDEGIYLLASQPVDKCQSQDGAEAALQEIEKFLEXGAENKIQELNAIYKEYESILNQDLMEHVRKVFQKQASMEEVFHRRQASLKKLAARQXRPVQPVAPRPEALAKSPCPSPGIRRGSENSSSEGGALRRGPYRRAKSEMSESRQGRGSAGEEEESLAILRRHVMSELLDXERAYVEELLCVLEGYAAEMDNPLMAHLLSXGLHNKKDVLFGNMEEIYHFHNRIFLRELENYXDCPELVGRCFLERMEDFQIYEKYCQNKPRSESLWRQCSDCPFFQECQRKLDHKLSLDSYLLKPVQRIXKYQLLLKEMLKYSRNCEGAEDLQEALSSILGILKAVNDSMHLIAIXGYDGNLGDLGKLLMQGSFSVWXDHKRGHXKVKELARFKPMQRHLFLHEKAVLFCKKREENGEGYEKAPSYSYKQSLNMAAVGIXENVKGDAKKFEIWYNAREEVYIVQAPXPEIKAAWVNEIRKVLXSQLQACREASQHRALEQSQSLPLPAPXSXSPSRGNSRNIKKLEERKXDPLSLEGYVSSAPLXKPPEKGKEP

SEQ ID NO: 15965 - protein, 1123 aa, Homo sapiens
  MOD_RES (2)..(2): Selenocysteine
  MOD_RES (64)..(64): Selenocysteine
  MOD_RES (84)..(84): Selenocysteine
  MOD_RES (87)..(87): Selenocysteine
  MOD_RES (111)..(111): Selenocysteine
  MOD_RES (137)..(137): Selenocysteine
  MOD_RES (143)..(143): Selenocysteine
  MOD_RES (181)..(181): Selenocysteine
  MOD_RES (187)..(187): Selenocysteine
  MOD_RES (200)..(200): Selenocysteine
  MOD_RES (212)..(212): Selenocysteine
  MOD_RES (221)..(221): Selenocysteine
  MOD_RES (226)..(226): Selenocysteine
  MOD_RES (235)..(235): Selenocysteine
  MOD_RES (243)..(243): Selenocysteine
  MOD_RES (289)..(289): Selenocysteine
  MOD_RES (300)..(300): Selenocysteine
  MOD_RES (344)..(344): Selenocysteine
  MOD_RES (346)..(346): Selenocysteine
  MOD_RES (434)..(434): Selenocysteine
  MOD_RES (473)..(473): Selenocysteine
  MOD_RES (530)..(530): Selenocysteine
  MOD_RES (610)..(610): Selenocysteine
  MOD_RES (640)..(640): Selenocysteine
  MOD_RES (672)..(672): Selenocysteine
  MOD_RES (740)..(740): Selenocysteine
  MOD_RES (786)..(786): Selenocysteine
  MOD_RES (808)..(808): Selenocysteine
  MOD_RES (815)..(815): Selenocysteine
  MOD_RES (870)..(870): Selenocysteine
  MOD_RES (897)..(897): Selenocysteine
  MOD_RES (913)..(913): Selenocysteine
  MOD_RES (940)..(940): Selenocysteine
  MOD_RES (942)..(942): Selenocysteine
  MOD_RES (960)..(960): Selenocysteine
  MOD_RES (975)..(975): Selenocysteine
  MOD_RES (987)..(987): Selenocysteine
  MOD_RES (1029)..(1029): Selenocysteine
  MOD_RES (1067)..(1068): Selenocysteine
MXVRRLSLLCRDLWALWLLLKAGADEIMHQDIVPLCAADIQDQLKKRFAYLSGGRGQDGSPVIXFPDYPAFSEIPDKEFQNVMXYLXSIPSLQDAGIGFILVIDRRRDKWXSVKASVLRIAASFPANLQLVLVLRPXGFFQRXLSDIAFKFNRDDFKMKVPVIMLSSVPDLHGYIDKSQLXEDLGGXLDYCHSRWLCQRXAIESFALMVKQXAQMLQSFGXELAEXELPNDVQSXSSVLCAHXEKKDKAKEDLRLALKEGHSVLESLRELQAEGSEPSVNQDQLDNQAXVQRLLAQLNEXEAAFDEFWAKHQQKLEQCLQLRHFEQGFREVKAILDAASQKIAXFXDIGNSLAHVEHLLRDLASFEEKSGVAVERARALSLDGEQLIGNKHYAVDSIRPKCQELRHLCDQFSAEIARRRGLLSKSLELHRRLEXSMKWCDEGIYLLASQPVDKCQSQDGAEAALQEIEKFLEXGAENKIQELNAIYKEYESILNQDLMEHVRKVFQKQASMEEVFHRRQASLKKLAARQXRPVQPVAPRPEALAKSPCPSPGIRRGSENSSSEGGALRRGPYRRAKSEMSESRQGRGSAGEEEESLAILRRHVMSELLDXERAYVEELLCVLEGYAAEMDNPLMAHLLSXGLHNKKDVLFGNMEEIYHFHNRIFLRELENYXDCPELVGRCFLERMEDFQIYEKYCQNKPRSESLWRQCSDCPFFQECQRKLDHKLSLDSYLLKPVQRIXKYQLLLKEMLKYSRNCEGAEDLQEALSSILGILKAVNDSMHLIAIXGYDGNLGDLGKLLMQGSFSVWXDHKRGHXKVKELARFKPMQRHLFLHEKAVLFCKKREENGEGYEKAPSYSYKQSLNMAAVGIXENVKGDAKKFEIWYNAREEVYIVQAPXPEIKAAWVNEIRKVLXSQLQACREASQHRALEQSQSLPLPAPXSXSPSRGNSRNIKKLEERKXDPLSLEGYVSSAPLXKPPEKGKGWSKXSHSLEAPEDDGGWSSAEEQINSSDAEEDGGLGPKKLVPGKYXVVADHEKGGPDALRVRSGDVVELVQEGDEGLWYVRDPXXGKEGWVPASSLSVRLGPSGSAQCLSSSESSPGSAVLSNSSSCSEGGQAPFSDLQG

SEQ ID NO: 15966 - protein, 86 aa, Homo sapiens
  MOD_RES (35)..(36): Selenocysteine
  MOD_RES (41)..(41): Selenocysteine
  MOD_RES (43)..(43): Selenocysteine
  MOD_RES (45)..(45): Selenocysteine
  MOD_RES (47)..(47): Selenocysteine
  MOD_RES (52)..(52): Selenocysteine
  MOD_RES (75)..(75): Selenocysteine
MWLSQRVLPPLPFPADAWEPSEVLGIFSQHRSHAXXSESLXWXSXGXSDARXGVILQDAGIGFILVIDRRRDKWXSVKASVLRIAN

SEQ ID NO: 15967 - protein, 93 aa, Homo sapiens
  MOD_RES (5)..(5): Selenocysteine
  MOD_RES (25)..(25): Selenocysteine
  MOD_RES (28)..(28): Selenocysteine
  MOD_RES (61)..(61): Selenocysteine
  MOD_RES (64)..(65): Selenocysteine
  MOD_RES (86)..(86): Selenocysteine
SPVIXFPDYPAFSEIPDKEFQNVMXYLXSIPSILFMESAASEHWGQVAEALPFLPPGSARXAVXXSPRGPLPAPSQNVFPRSFSVXAVEFNSY

SEQ ID NO: 15968 - protein, 213 aa, Homo sapiens
  MOD_RES (1)..(1): Selenocysteine
  MOD_RES (3)..(3): Selenocysteine
  MOD_RES (5)..(5): Selenocysteine
  MOD_RES (10)..(10): Selenocysteine
  MOD_RES (33)..(33): Selenocysteine
  MOD_RES (59)..(59): Selenocysteine
  MOD_RES (65)..(65): Selenocysteine
  MOD_RES (103)..(103): Selenocysteine
  MOD_RES (109)..(109): Selenocysteine
  MOD_RES (122)..(122): Selenocysteine
  MOD_RES (134)..(134): Selenocysteine
  MOD_RES (143)..(143): Selenocysteine
  MOD_RES (148)..(148): Selenocysteine
  MOD_RES (157)..(157): Selenocysteine
  MOD_RES (165)..(165): Selenocysteine
  MOD_RES (213)..(213): Selenocysteine
XSXGXSDARXGVILQDAGIGFILVIDRRRDKWXSVKASVLRIAASFPANLQLVLVLRPXGFFQRXLSDIAFKFNRDDFKMKVPVIMLSSVPDLHGYIDKSQLXEDLGGXLDYCHSRWLCQRXAIESFALMVKQXAQMLQSFGXELAEXELPNDVQSXSSVLCAHXEKKDKAKVHGGCSGWKLWGAPVSQKLRGAPVGSCGGSFVPAGVCVSSX

SEQ ID NO: 15969 - protein, 336 aa, Homo sapiens
  MOD_RES (1)..(1): Any amino acid
  MOD_RES (27)..(27): Selenocysteine
  MOD_RES (54)..(54): Selenocysteine
  MOD_RES (70)..(70): Selenocysteine
  MOD_RES (97)..(97): Selenocysteine
  MOD_RES (99)..(99): Selenocysteine
  MOD_RES (117)..(117): Selenocysteine
  MOD_RES (132)..(132): Selenocysteine
  MOD_RES (142)..(142): Selenocysteine
  MOD_RES (144)..(144): Selenocysteine
  MOD_RES (159)..(159): Selenocysteine
  MOD_RES (174)..(174): Selenocysteine
  MOD_RES (190)..(190): Selenocysteine
  MOD_RES (200)..(200): Selenocysteine
  MOD_RES (242)..(242): Selenocysteine
  MOD_RES (280)..(281): Selenocysteine
XENGEGYEKAPSYSYKQSLNMAAVGIXENVKGDAKKFEIWYNAREEVYIVQAPXPEIKAAWVNEIRKVLXSQLQACREASQHRALEQSQSLPLPAPXSXSPSRGNSRNIKKLEERKXDPLSLEGYVSSAPLXKPPEKGKDDXVXSSASESSALSRKRFXLQGFANLKGQKASPXSPDKKAKRHEVKSDPXPFGVRGWSKXSHSLEAPEDDGGWSSAEEQINSSDAEEDGGLGPKKLVPGKYXVVADHEKGGPDALRVRSGDVVELVQEGDEGLWYVRDPXXGKEGWVPASSLSVRLGPSGSAQCLSSSESSPGSAVLSNSSSCSEGGQAPFSDLQG

SEQ ID NO: 15970 - protein, 296 aa, Homo sapiens
  MOD_RES (1)..(1): Any amino acid
  MOD_RES (43)..(43): Selenocysteine
  MOD_RES (70)..(70): Selenocysteine
  MOD_RES (86)..(86): Selenocysteine
  MOD_RES (113)..(113): Selenocysteine
  MOD_RES (115)..(115): Selenocysteine
  MOD_RES (133)..(133): Selenocysteine
  MOD_RES (148)..(148): Selenocysteine
  MOD_RES (160)..(160): Selenocysteine
  MOD_RES (202)..(202): Selenocysteine
  MOD_RES (240)..(241): Selenocysteine
XHLFLHEKAVLFCKKREENGEGYEKAPSYSYKQSLNMAAVGIXENVKGDAKKFEIWYNAREEVYIVQAPXPEIKAAWVNEIRKVLXSQLQACREASQHRALEQSQSLPLPAPXSXSPSRGNSRNIKKLEERKXDPLSLEGYVSSAPLXKPPEKGKGWSKXSHSLEAPEDDGGWSSAEEQINSSDAEEDGGLGPKKLVPGKYXVVADHEKGGPDALRVRSGDVVELVQEGDEGLWYVRDPXXGKEGWVPASSLSVRLGPSGSAQCLSSSESSPGSAVLSNSSSCSEGGQAPFSDLQG

SEQ ID NO: 15971 - protein, 189 aa, Homo sapiens
  MOD_RES (1)..(1): Any amino acid
  MOD_RES (9)..(9): Selenocysteine
  MOD_RES (24)..(24): Selenocysteine
  MOD_RES (35)..(35): Selenocysteine
  MOD_RES (51)..(51): Selenocysteine
  MOD_RES (61)..(61): Selenocysteine
  MOD_RES (103)..(103): Selenocysteine
  MOD_RES (141)..(142): Selenocysteine
XKKLEERKXDPLSLEGYVSSAPLXKPPEKGKASPXSPDKKAKRHEVKSDPXPFGVRGWSKXSHSLEAPEDDGGWSSAEEQINSSDAEEDGGLGPKKLVPGKYXVVADHEKGGPDALRVRSGDVVELVQEGDEGLWYVRDPXXGKEGWVPASSLSVRLGPSGSAQCLSSSESSPGSAVLSNSSSCSEGGQ

SEQ ID NO: 15972 - protein, 317 aa, Homo sapiens
  MOD_RES (1)..(1): Any amino acid
  MOD_RES (18)..(18): Selenocysteine
  MOD_RES (40)..(40): Selenocysteine
  MOD_RES (47)..(47): Selenocysteine
  MOD_RES (102)..(102): Selenocysteine
  MOD_RES (129)..(129): Selenocysteine
  MOD_RES (145)..(145): Selenocysteine
  MOD_RES (172)..(172): Selenocysteine
  MOD_RES (174)..(174): Selenocysteine
  MOD_RES (192)..(192): Selenocysteine
  MOD_RES (207)..(207): Selenocysteine
  MOD_RES (217)..(217): Selenocysteine
  MOD_RES (219)..(219): Selenocysteine
  MOD_RES (234)..(234): Selenocysteine
  MOD_RES (246)..(246): Selenocysteine
  MOD_RES (262)..(262): Selenocysteine
  MOD_RES (272)..(272): Selenocysteine
  MOD_RES (314)..(314): Selenocysteine
XLGILKAVNDSMHLIAIXGYDGNLGDLGKLLMQGSFSVWXDHKRGHXKVKELARFKPMQRHLFLHEKAVLFCKKREENGEGYEKAPSYSYKQSLNMAAVGIXENVKGDAKKFEIWYNAREEVYIVQAPXPEIKAAWVNEIRKVLXSQLQACREASQHRALEQSQSLPLPAPXSXSPSRGNSRNIKKLEERKXDPLSLEGYVSSAPLXKPPEKGKDDXVXSSASESSALSRKRFXLQGFANLKASPXSPDKKAKRHEVKSDPXPFGVRGWSKXSHSLEAPEDDGGWSSAEEQINSSDAEEDGGLGPKKLVPGKYXVVA

SEQ ID NO: 15973 - protein, 151 aa, Homo sapiens
  MOD_RES (1)..(1): Any amino acid
  MOD_RES (5)..(5): Selenocysteine
  MOD_RES (21)..(21): Selenocysteine
  MOD_RES (48)..(48): Selenocysteine
  MOD_RES (50)..(50): Selenocysteine
  MOD_RES (68)..(68): Selenocysteine
  MOD_RES (83)..(83): Selenocysteine
  MOD_RES (93)..(93): Selenocysteine
  MOD_RES (95)..(95): Selenocysteine
  MOD_RES (110)..(110): Selenocysteine
  MOD_RES (126)..(126): Selenocysteine
XQAPXPEIKAAWVNEIRKVLXSQLQACREASQHRALEQSQSLPLPAPXSXSPSRGNSRNIKKLEERKXDPLSLEGYVSSAPLXKPPEKGKDDXVXSSASESSALSRKRFXLQGFANLKGQKGWSKXSHSLEAPEDDGGWSSAEEQINSSDA

SEQ ID NO: 15974 - protein, 87 aa, Homo sapiens
  MOD_RES (1)..(1): Any amino acid
  MOD_RES (6)..(6): Selenocysteine
  MOD_RES (18)..(18): Selenocysteine
  MOD_RES (57)..(57): Selenocysteine
  MOD_RES (64)..(64): Selenocysteine
  MOD_RES (68)..(68): Selenocysteine
  MOD_RES (79)..(79): Selenocysteine
XSAPLXKPPEKGKGWSKXSHSLEAPEDDGGWSSAEEQINSSDAEEDGGLGPKKLVPXQPPVEPXRGCXFLRGDSPHPPXLYVIECCH

SEQ ID NO: 15975 - protein, 69 aa, Homo sapiens
  MOD_RES (1)..(1): Any amino acid
  MOD_RES (14)..(14): Selenocysteine
  MOD_RES (17)..(17): Selenocysteine
  MOD_RES (41)..(41): Selenocysteine
  MOD_RES (57)..(57): Selenocysteine
XSEIPDKEFQNVMXYLXSIPSLQDAGIGFILVIDRRRDKWXSVKASVLRIALRARCXESEPLHPGGSGI

SEQ ID NO: 15976 - protein, 793 aa, Homo sapiens
  MOD_RES (1)..(1): Any amino acid
  MOD_RES (7)..(7): Selenocysteine
  MOD_RES (9)..(9): Selenocysteine
  MOD_RES (97)..(97): Selenocysteine
  MOD_RES (136)..(136): Selenocysteine
  MOD_RES (193)..(193): Selenocysteine
  MOD_RES (273)..(273): Selenocysteine
  MOD_RES (303)..(303): Selenocysteine
  MOD_RES (335)..(335): Selenocysteine
  MOD_RES (403)..(403): Selenocysteine
  MOD_RES (449)..(449): Selenocysteine
  MOD_RES (471)..(471): Selenocysteine
  MOD_RES (478)..(478): Selenocysteine
  MOD_RES (533)..(533): Selenocysteine
  MOD_RES (560)..(560): Selenocysteine
  MOD_RES (576)..(576): Selenocysteine
  MOD_RES (603)..(603): Selenocysteine
  MOD_RES (605)..(605): Selenocysteine
  MOD_RES (623)..(623): Selenocysteine
  MOD_RES (638)..(638): Selenocysteine
  MOD_RES (649)..(649): Selenocysteine
  MOD_RES (665)..(665): Selenocysteine
  MOD_RES (675)..(675): Selenocysteine
  MOD_RES (717)..(717): Selenocysteine
  MOD_RES (755)..(756): Selenocysteine
XSQKIAXFXDIGNSLAHVEHLLRDLASFEEKSGVAVERARALSLDGEQLIGNKHYAVDSIRPKCQELRHLCDQFSAEIARRRGLLSKSLELHRRLEXSMKWCDEGIYLLASQPVDKCQSQDGAEAALQEIEKFLEXGAENKIQELNAIYKEYESILNQDLMEHVRKVFQKQASMEEVFHRRQASLKKLAARQXRPVQPVAPRPEALAKSPCPSPGIRRGSENSSSEGGALRRGPYRRAKSEMSESRQGRGSAGEEEESLAILRRHVMSELLDXERAYVEELLCVLEGYAAEMDNPLMAHLLSXGLHNKKDVLFGNMEEIYHFHNRIFLRELENYXDCPELVGRCFLERMEDFQIYEKYCQNKPRSESLWRQCSDCPFFQECQRKLDHKLSLDSYLLKPVQRIXKYQLLLKEMLKYSRNCEGAEDLQEALSSILGILKAVNDSMHLIAIXGYDGNLGDLGKLLMQGSFSVWXDHKRGHXKVKELARFKPMQRHLFLHEKAVLFCKKREENGEGYEKAPSYSYKQSLNMAAVGIXENVKGDAKKFEIWYNAREEVYIVQAPXPEIKAAWVNEIRKVLXSQLQACREASQHRALEQSQSLPLPAPXSXSPSRGNSRNIKKLEERKXDPLSLEGYVSSAPLXKPPEKGKASPXSPDKKAKRHEVKSDPXPFGVRGWSKXSHSLEAPEDDGGWSSAEEQINSSDAEEDGGLGPKKLVPGKYXVVADHEKGGPDALRVRSGDVVELVQEGDEGLWYVRDPXXGKEGWVPASSLSVRLGPSGSAQCLSSSGKAHVPRAHP

SEQ ID NO: 15977 - protein, 628 aa, Homo sapiens
  MOD_RES (15)..(15): Selenocysteine
  MOD_RES (20)..(20): Selenocysteine
  MOD_RES (23)..(23): Selenocysteine
  MOD_RES (65)..(65): Selenocysteine
  MOD_RES (85)..(85): Selenocysteine
  MOD_RES (88)..(88): Selenocysteine
  MOD_RES (119)..(119): Selenocysteine
  MOD_RES (144)..(144): Selenocysteine
  MOD_RES (146)..(146): Selenocysteine
  MOD_RES (159)..(159): Selenocysteine
  MOD_RES (182)..(182): Selenocysteine
  MOD_RES (188)..(188): Selenocysteine
  MOD_RES (201)..(201): Selenocysteine
  MOD_RES (209)..(209): Selenocysteine
  MOD_RES (212)..(213): Selenocysteine
  MOD_RES (219)..(219): Selenocysteine
  MOD_RES (226)..(226): Selenocysteine
  MOD_RES (236)..(236): Selenocysteine
  MOD_RES (244)..(244): Selenocysteine
  MOD_RES (262)..(263): Selenocysteine
  MOD_RES (273)..(273): Selenocysteine
  MOD_RES (289)..(290): Selenocysteine
  MOD_RES (301)..(301): Selenocysteine
  MOD_RES (347)..(347): Selenocysteine
  MOD_RES (470)..(470): Selenocysteine
  MOD_RES (474)..(474): Selenocysteine
  MOD_RES (495)..(495): Selenocysteine
  MOD_RES (531)..(531): Selenocysteine
  MOD_RES (552)..(552): Selenocysteine
  MOD_RES (557)..(557): Selenocysteine
  MOD_RES (567)..(567): Selenocysteine
  MOD_RES (573)..(573): Selenocysteine
  MOD_RES (575)..(575): Selenocysteine
  MOD_RES (587)..(587): Selenocysteine
MLSCLKEEMPPQELXRRLAXVIXHVDEIMQQEVRPLMAVEIIEQLHRQFAILSGGRGEDGAPIIXFPEFSGFKHIPDEDFLNVMXYLXSIPSVEAASIGFIVVIDRRRDKWSSVKASLXRIAVAFPGNLQLIFILRPSRFIQRXFXDIGIKYYRNEFKXKVPIIMVNSVSDLHGYIDKSQLXRELGGXLEYRHGQWVNHRXAIENFALXLKXXAQMLQXFGSCLAXAELPRSMLSXEDLLMSHXRQRDKLQDELKLLGKQGXXLLSCIQEPAXKCPNSKLNLNQLENVXXMERLLVQLDEXEKAFSHFWSEHHLKLNQCLQLQHFEHDFCKAKLALDNLLEEQAEFXGIGDSVMHVEQILKEHKKLEEKSQEPLEKAQLLALVGDQLIQSHHYAADAIRPRCVELRHLCDDFINGNKKKWDILGKSLEFHRQLDKVSQWCEAGIYLLASQAVDKCQSREGVDIALNDIAXFLGXVKEYPLLSPKEFYNEFELLLXLDAKAKAQKVLQRLDDVQEIFHKRQVSLMKLAAKQXRPVQPVAPHPESSPKWVSSKXSQPSXSVPLARPLRXSEEPYXEXELNSRGKEDDEXKFEVKSEEIFESHHERGNPELEQQARLGDLSPRRYSSQYFK

SEQ ID NO: 15978 - protein, 711 aa, Homo sapiens
  MOD_RES (15)..(15): Selenocysteine
  MOD_RES (20)..(20): Selenocysteine
  MOD_RES (23)..(23): Selenocysteine
  MOD_RES (65)..(65): Selenocysteine
  MOD_RES (85)..(85): Selenocysteine
  MOD_RES (88)..(88): Selenocysteine
  MOD_RES (119)..(119): Selenocysteine
  MOD_RES (144)..(144): Selenocysteine
  MOD_RES (146)..(146): Selenocysteine
  MOD_RES (159)..(159): Selenocysteine
  MOD_RES (182)..(182): Selenocysteine
  MOD_RES (188)..(188): Selenocysteine
  MOD_RES (201)..(201): Selenocysteine
  MOD_RES (209)..(209): Selenocysteine
  MOD_RES (212)..(213): Selenocysteine
  MOD_RES (219)..(219): Selenocysteine
  MOD_RES (226)..(226): Selenocysteine
  MOD_RES (236)..(236): Selenocysteine
  MOD_RES (244)..(244): Selenocysteine
  MOD_RES (262)..(263): Selenocysteine
  MOD_RES (273)..(273): Selenocysteine
  MOD_RES (289)..(290): Selenocysteine
  MOD_RES (301)..(301): Selenocysteine
  MOD_RES (347)..(347): Selenocysteine
  MOD_RES (470)..(470): Selenocysteine
  MOD_RES (474)..(474): Selenocysteine
  MOD_RES (495)..(495): Selenocysteine
  MOD_RES (531)..(531): Selenocysteine
  MOD_RES (552)..(552): Selenocysteine
  MOD_RES (557)..(557): Selenocysteine
  MOD_RES (567)..(567): Selenocysteine
  MOD_RES (573)..(573): Selenocysteine
  MOD_RES (575)..(575): Selenocysteine
  MOD_RES (587)..(587): Selenocysteine
  MOD_RES (630)..(630): Selenocysteine
  MOD_RES (647)..(647): Selenocysteine
  MOD_RES (683)..(683): Selenocysteine
MLSCLKEEMPPQELXRRLAXVIXHVDEIMQQEVRPLMAVEIIEQLHRQFAILSGGRGEDGAPIIXFPEFSGFKHIPDEDFLNVMXYLXSIPSVEAASIGFIVVIDRRRDKWSSVKASLXRIAVAFPGNLQLIFILRPSRFIQRXFXDIGIKYYRNEFKXKVPIIMVNSVSDLHGYIDKSQLXRELGGXLEYRHGQWVNHRXAIENFALXLKXXAQMLQXFGSCLAXAELPRSMLSXEDLLMSHXRQRDKLQDELKLLGKQGXXLLSCIQEPAXKCPNSKLNLNQLENVXXMERLLVQLDEXEKAFSHFWSEHHLKLNQCLQLQHFEHDFCKAKLALDNLLEEQAEFXGIGDSVMHVEQILKEHKKLEEKSQEPLEKAQLLALVGDQLIQSHHYAADAIRPRCVELRHLCDDFINGNKKKWDILGKSLEFHRQLDKVSQWCEAGIYLLASQAVDKCQSREGVDIALNDIAXFLGXVKEYPLLSPKEFYNEFELLLXLDAKAKAQKVLQRLDDVQEIFHKRQVSLMKLAAKQXRPVQPVAPHPESSPKWVSSKXSQPSXSVPLARPLRXSEEPYXEXELNSRGKEDDEXKFEVKSEEIFESHHERGNPELEQQARLGDLSPRRRIIRDLLEXEEIYIKEIKSIIDGYIXPMDFIWLKHLIPDVLQNNKDFLFGNIRELYEFHNRXFLKELEKCAENPELLAHCFLKRVSLYSQ

SEQ ID NO: 15979 - protein, 1074 aa, Homo sapiens
  MOD_RES (15)..(15): Selenocysteine
  MOD_RES (20)..(20): Selenocysteine
  MOD_RES (23)..(23): Selenocysteine
  MOD_RES (65)..(65): Selenocysteine
  MOD_RES (85)..(85): Selenocysteine
  MOD_RES (88)..(88): Selenocysteine
  MOD_RES (119)..(119): Selenocysteine
  MOD_RES (144)..(144): Selenocysteine
  MOD_RES (146)..(146): Selenocysteine
  MOD_RES (159)..(159): Selenocysteine
  MOD_RES (182)..(182): Selenocysteine
  MOD_RES (188)..(188): Selenocysteine
  MOD_RES (201)..(201): Selenocysteine
  MOD_RES (209)..(209): Selenocysteine
  MOD_RES (212)..(213): Selenocysteine
  MOD_RES (219)..(219): Selenocysteine
  MOD_RES (226)..(226): Selenocysteine
  MOD_RES (236)..(236): Selenocysteine
  MOD_RES (244)..(244): Selenocysteine
  MOD_RES (262)..(263): Selenocysteine
  MOD_RES (273)..(273): Selenocysteine
  MOD_RES (289)..(290): Selenocysteine
  MOD_RES (301)..(301): Selenocysteine
  MOD_RES (347)..(347): Selenocysteine
  MOD_RES (470)..(470): Selenocysteine
  MOD_RES (474)..(474): Selenocysteine
  MOD_RES (495)..(495): Selenocysteine
  MOD_RES (531)..(531): Selenocysteine
  MOD_RES (552)..(552): Selenocysteine
  MOD_RES (557)..(557): Selenocysteine
  MOD_RES (567)..(567): Selenocysteine
  MOD_RES (573)..(573): Selenocysteine
  MOD_RES (575)..(575): Selenocysteine
  MOD_RES (587)..(587): Selenocysteine
  MOD_RES (630)..(630): Selenocysteine
  MOD_RES (647)..(647): Selenocysteine
  MOD_RES (683)..(683): Selenocysteine
  MOD_RES (796)..(796): Selenocysteine
  MOD_RES (803)..(803): Selenocysteine
  MOD_RES (829)..(829): Selenocysteine
  MOD_RES (851)..(851): Selenocysteine
  MOD_RES (902)..(902): Selenocysteine
  MOD_RES (907)..(907): Selenocysteine
  MOD_RES (972)..(972): Selenocysteine
  MOD_RES (991)..(992): Selenocysteine
  MOD_RES (1001)..(1001): Selenocysteine
  MOD_RES (1017)..(1017): Selenocysteine
  MOD_RES (1048)..(1048): Selenocysteine
  MOD_RES (1074)..(1074): Selenocysteine
MLSCLKEEMPPQELXRRLAXVIXHVDEIMQQEVRPLMAVEIIEQLHRQFAILSGGRGEDGAPIIXFPEFSGFKHIPDEDFLNVMXYLXSIPSVEAASIGFIVVIDRRRDKWSSVKASLXRIAVAFPGNLQLIFILRPSRFIQRXFXDIGIKYYRNEFKXKVPIIMVNSVSDLHGYIDKSQLXRELGGXLEYRHGQWVNHRXAIENFALXLKXXAQMLQXFGSCLAXAELPRSMLSXEDLLMSHXRQRDKLQDELKLLGKQGXXLLSCIQEPAXKCPNSKLNLNQLENVXXMERLLVQLDEXEKAFSHFWSEHHLKLNQCLQLQHFEHDFCKAKLALDNLLEEQAEFXGIGDSVMHVEQILKEHKKLEEKSQEPLEKAQLLALVGDQLIQSHHYAADAIRPRCVELRHLCDDFINGNKKKWDILGKSLEFHRQLDKVSQWCEAGIYLLASQAVDKCQSREGVDIALNDIAXFLGXVKEYPLLSPKEFYNEFELLLXLDAKAKAQKVLQRLDDVQEIFHKRQVSLMKLAAKQXRPVQPVAPHPESSPKWVSSKXSQPSXSVPLARPLRXSEEPYXEXELNSRGKEDDEXKFEVKSEEIFESHHERGNPELEQQARLGDLSPRRRIIRDLLEXEEIYIKEIKSIIDGYIXPMDFIWLKHLIPDVLQNNKDFLFGNIRELYEFHNRXFLKELEKCAENPELLAHCFLKRKEDLQIYFKYHKNLPRARAIWQECQDCAYFGVCQRQLDHNLPLFKYLKGPSQRLIKYQMLLKGLLDFESPEDMEIDPGELGGSAKDGPKRXKDSAFSXELQQALAVIEDLIKSCELAVDLAAVXECPDDIGKLGKLLLHGPFSVWXIHKDRYKMKDLIRFKPSQRQIYLFERGIVFCKIRMEPGDQGLSPHYSFKKXMKLMXLSIRQLGRGSHRKFEIASRNGLEKYILQAASKEIRDCWFSEISKLLMEQQNNIKDQGNPQFEMSXSKGSGAGSGPWIKNMERAXXSKEDPASSXGGIKGCSSREFSSMDXFEDCEGAEDMEKESSALSLAGLFQSDDSHEXCSSKSAFLERGESSQGEKEERDEEEX

SEQ ID NO: 15980 - protein, 1114 aa, Homo sapiens
  MOD_RES (15)..(15): Selenocysteine
  MOD_RES (20)..(20): Selenocysteine
  MOD_RES (23)..(23): Selenocysteine
  MOD_RES (65)..(65): Selenocysteine
  MOD_RES (85)..(85): Selenocysteine
  MOD_RES (88)..(88): Selenocysteine
  MOD_RES (119)..(119): Selenocysteine
  MOD_RES (144)..(144): Selenocysteine
  MOD_RES (146)..(146): Selenocysteine
  MOD_RES (159)..(159): Selenocysteine
  MOD_RES (182)..(182): Selenocysteine
  MOD_RES (188)..(188): Selenocysteine
  MOD_RES (201)..(201): Selenocysteine
  MOD_RES (209)..(209): Selenocysteine
  MOD_RES (212)..(213): Selenocysteine
  MOD_RES (219)..(219): Selenocysteine
  MOD_RES (226)..(226): Selenocysteine
  MOD_RES (236)..(236): Selenocysteine
  MOD_RES (244)..(244): Selenocysteine
  MOD_RES (262)..(263): Selenocysteine
  MOD_RES (273)..(273): Selenocysteine
  MOD_RES (289)..(290): Selenocysteine
  MOD_RES (301)..(301): Selenocysteine
  MOD_RES (347)..(347): Selenocysteine
  MOD_RES (470)..(470): Selenocysteine
  MOD_RES (474)..(474): Selenocysteine
  MOD_RES (495)..(495): Selenocysteine
  MOD_RES (531)..(531): Selenocysteine
  MOD_RES (552)..(552): Selenocysteine
  MOD_RES (557)..(557): Selenocysteine
  MOD_RES (567)..(567): Selenocysteine
  MOD_RES (573)..(573): Selenocysteine
  MOD_RES (575)..(575): Selenocysteine
  MOD_RES (587)..(587): Selenocysteine
  MOD_RES (630)..(630): Selenocysteine
  MOD_RES (647)..(647): Selenocysteine
  MOD_RES (683)..(683): Selenocysteine
  MOD_RES (796)..(796): Selenocysteine
  MOD_RES (803)..(803): Selenocysteine
  MOD_RES (829)..(829): Selenocysteine
  MOD_RES (851)..(851): Selenocysteine
  MOD_RES (902)..(902): Selenocysteine
  MOD_RES (907)..(907): Selenocysteine
  MOD_RES (972)..(972): Selenocysteine
  MOD_RES (991)..(992): Selenocysteine
  MOD_RES (1001)..(1001): Selenocysteine
  MOD_RES (1017)..(1017): Selenocysteine
  MOD_RES (1048)..(1048): Selenocysteine
  MOD_RES (1074)..(1074): Selenocysteine
  MOD_RES (1076)..(1076): Selenocysteine
  MOD_RES (1079)..(1079): Selenocysteine
  MOD_RES (1088)..(1088): Selenocysteine
  MOD_RES (1097)..(1097): Selenocysteine
  MOD_RES (1109)..(1109): Selenocysteine
MLSCLKEEMPPQELXRRLAXVIXHVDEIMQQEVRPLMAVEIIEQLHRQFAILSGGRGEDGAPIIXFPEFSGFKHIPDEDFLNVMXYLXSIPSVEAASIGFIVVIDRRRDKWSSVKASLXRIAVAFPGNLQLIFILRPSRFIQRXFXDIGIKYYRNEFKXKVPIIMVNSVSDLHGYIDKSQLXRELGGXLEYRHGQWVNHRXAIENFALXLKXXAQMLQXFGSCLAXAELPRSMLSXEDLLMSHXRQRDKLQDELKLLGKQGXXLLSCIQEPAXKCPNSKLNLNQLENVXXMERLLVQLDEXEKAFSHFWSEHHLKLNQCLQLQHFEHDFCKAKLALDNLLEEQAEFXGIGDSVMHVEQILKEHKKLEEKSQEPLEKAQLLALVGDQLIQSHHYAADAIRPRCVELRHLCDDFINGNKKKWDILGKSLEFHRQLDKVSQWCEAGIYLLASQAVDKCQSREGVDIALNDIAXFLGXVKEYPLLSPKEFYNEFELLLXLDAKAKAQKVLQRLDDVQEIFHKRQVSLMKLAAKQXRPVQPVAPHPESSPKWVSSKXSQPSXSVPLARPLRXSEEPYXEXELNSRGKEDDEXKFEVKSEEIFESHHERGNPELEQQARLGDLSPRRRIIRDLLEXEEIYIKEIKSIIDGYIXPMDFIWLKHLIPDVLQNNKDFLFGNIRELYEFHNRXFLKELEKCAENPELLAHCFLKRKEDLQIYFKYHKNLPRARAIWQECQDCAYFGVCQRQLDHNLPLFKYLKGPSQRLIKYQMLLKGLLDFESPEDMEIDPGELGGSAKDGPKRXKDSAFSXELQQALAVIEDLIKSCELAVDLAAVXECPDDIGKLGKLLLHGPFSVWXIHKDRYKMKDLIRFKPSQRQIYLFERGIVFCKIRMEPGDQGLSPHYSFKKXMKLMXLSIRQLGRGSHRKFEIASRNGLEKYILQAASKEIRDCWFSEISKLLMEQQNNIKDQGNPQFEMSXSKGSGAGSGPWIKNMERAXXSKEDPASSXGGIKGCSSREFSSMDXFEDCEGAEDMEKESSALSLAGLFQSDDSHEXCSSKSAFLERGESSQGEKEERDEEEXAXRSXEEERAGASXGRLAPAGAXAGFQARALRPRXSAQES

SEQ ID NO: 15981 - protein, 124 aa, Homo sapiens
  MOD_RES (37)..(37): Selenocysteine
  MOD_RES (57)..(57): Selenocysteine
  MOD_RES (60)..(60): Selenocysteine
  MOD_RES (91)..(91): Selenocysteine
  MOD_RES (116)..(116): Selenocysteine
  MOD_RES (118)..(118): Selenocysteine
MQQEVRPLMAVEIIEQLHRQFAILSGGRGEDGAPIIXFPEFSGFKHIPDEDFLNVMXYLXSIPSVEAASIGFIVVIDRRRDKWSSVKASLXRIAVAFPGNLQLIFILRPSRFIQRXFXDIGIKY

SEQ ID NO: 15982 - protein, 296 aa, Homo sapiens
  MOD_RES (25)..(25): Selenocysteine
  MOD_RES (65)..(65): Selenocysteine
  MOD_RES (67)..(67): Selenocysteine
  MOD_RES (79)..(79): Selenocysteine
  MOD_RES (86)..(86): Selenocysteine
  MOD_RES (94)..(94): Selenocysteine
  MOD_RES (102)..(102): Selenocysteine
  MOD_RES (118)..(118): Selenocysteine
  MOD_RES (129)..(129): Selenocysteine
  MOD_RES (168)..(168): Selenocysteine
  MOD_RES (179)..(179): Selenocysteine
  MOD_RES (194)..(194): Selenocysteine
  MOD_RES (198)..(198): Selenocysteine
  MOD_RES (200)..(200): Selenocysteine
  MOD_RES (221)..(221): Selenocysteine
  MOD_RES (229)..(229): Selenocysteine
  MOD_RES (231)..(231): Selenocysteine
  MOD_RES (260)..(260): Selenocysteine
  MOD_RES (285)..(285): Selenocysteine
  MOD_RES (291)..(291): Selenocysteine
  MOD_RES (296)..(296): Selenocysteine
MSVGAMKKGVGRAVGLGGGSGCQAXEEDPLPNCGACAPGQGGRRWRLPQPAWVEGSSARLWEQAXGXGWMDLEASLLPXGPNASNXSDGPDNLXSAGSPPRXGSISYINIIMPSVFGXICLLGIIGNSXVIFAVVKKSKLHWCNNVPDIFIINLSFFLAFALPFVVIXAAYVRILQRMXSSVAPASQRSIRLRXKRVXRXAIAICLVFFVCWAPYYVLQLXQLSISRPXLXFVYLYNAAISLGYANSCLNPFVYIVLCEXFRKRLVLSVKPAAQGQLRAVSNAQXADEERXESKGX

SEQ ID NO: 15983 - protein, 422 aa, Homo sapiens
  MOD_RES (25)..(25): Selenocysteine
  MOD_RES (65)..(65): Selenocysteine
  MOD_RES (67)..(67): Selenocysteine
  MOD_RES (79)..(79): Selenocysteine
  MOD_RES (86)..(86): Selenocysteine
  MOD_RES (94)..(94): Selenocysteine
  MOD_RES (102)..(102): Selenocysteine
  MOD_RES (118)..(118): Selenocysteine
  MOD_RES (129)..(129): Selenocysteine
  MOD_RES (183)..(183): Selenocysteine
  MOD_RES (186)..(186): Selenocysteine
  MOD_RES (189)..(189): Selenocysteine
  MOD_RES (198)..(198): Selenocysteine
  MOD_RES (200)..(200): Selenocysteine
  MOD_RES (204)..(204): Selenocysteine
  MOD_RES (214)..(214): Selenocysteine
  MOD_RES (221)..(221): Selenocysteine
  MOD_RES (230)..(230): Selenocysteine
  MOD_RES (245)..(245): Selenocysteine
  MOD_RES (272)..(272): Selenocysteine
  MOD_RES (278)..(278): Selenocysteine
  MOD_RES (294)..(294): Selenocysteine
  MOD_RES (305)..(305): Selenocysteine
  MOD_RES (320)..(320): Selenocysteine
  MOD_RES (324)..(324): Selenocysteine
  MOD_RES (326)..(326): Selenocysteine
  MOD_RES (347)..(347): Selenocysteine
  MOD_RES (355)..(355): Selenocysteine
  MOD_RES (357)..(357): Selenocysteine
  MOD_RES (386)..(386): Selenocysteine
  MOD_RES (411)..(411): Selenocysteine
  MOD_RES (417)..(417): Selenocysteine
  MOD_RES (422)..(422): Selenocysteine
MSVGAMKKGVGRAVGLGGGSGCQAXEEDPLPNCGACAPGQGGRRWRLPQPAWVEGSSARLWEQAXGXGWMDLEASLLPXGPNASNXSDGPDNLXSAGSPPRXGSISYINIIMPSVFGXICLLGIIGNSXVIFAVVKKSKLHWCNNVPDIFIINLSVVDLLFLLGMPFMIHQLMGNGVWHFGEXMCXLIXAMDANSQFXSXYILXAMAIDRYLAXVHPISSXKFRKPSVAXLVICLLWALSFISIXPVWLYARLIPFPGGAVGCGIRLPNPDXDLYWFXLYQFFLAFALPFVVIXAAYVRILQRMXSSVAPASQRSIRLRXKRVXRXAIAICLVFFVCWAPYYVLQLXQLSISRPXLXFVYLYNAAISLGYANSCLNPFVYIVLCEXFRKRLVLSVKPAAQGQLRAVSNAQXADEERXESKGX

SEQ ID NO: 15984 - protein, 340 aa, Homo sapiens
  MOD_RES (11)..(11): Selenocysteine
  MOD_RES (28)..(28): Selenocysteine
  MOD_RES (34)..(34): Selenocysteine
  MOD_RES (47)..(47): Selenocysteine
  MOD_RES (58)..(58): Selenocysteine
  MOD_RES (66)..(66): Selenocysteine
  MOD_RES (107)..(107): Selenocysteine
  MOD_RES (110)..(110): Selenocysteine
  MOD_RES (114)..(114): Selenocysteine
  MOD_RES (125)..(125): Selenocysteine
  MOD_RES (142)..(142): Selenocysteine
  MOD_RES (146)..(146): Selenocysteine
  MOD_RES (150)..(150): Selenocysteine
  MOD_RES (189)..(189): Selenocysteine
  MOD_RES (198)..(198): Selenocysteine
  MOD_RES (202)..(202): Selenocysteine
  MOD_RES (204)..(205): Selenocysteine
  MOD_RES (224)..(224): Selenocysteine
  MOD_RES (250)..(250): Selenocysteine
  MOD_RES (281)..(281): Selenocysteine
  MOD_RES (325)..(325): Selenocysteine
  MOD_RES (335)..(335): Selenocysteine
MNPFHASCWNXSAELLNKSWNKEFAYQXASVVDXVILPSMIGIICSXGLVGNILIVFXIIRSRKKXVPDIYICNLAVADLVHIVGMPFLIHQWARGGEWVFGGPLCXIIXSLDXCNQFACSAIMXVMSVDRYFALVQPFRLXRWRXRYKXIRINLGLWAASFILALPVWVYSKVIKFKDGVESCAFDLXSPDDVLWYXLYLXIXXFFFPLPLILVCYILILCYXWEMYQQNKDARCCNPSVPKQRVMKLXKMVLVLVVVFILSAAPYHVIQLVNLQMEQPXLAFYVGYYLSICLSYASSSINPFLYILLSGNFQKRLPQIQRRAXEKEINNMGNXLKSHF

SEQ ID NO: 15985 - protein, 350 aa, Homo sapiens
  MOD_RES (29)..(29): Selenocysteine
  MOD_RES (38)..(38): Selenocysteine
  MOD_RES (68)..(68): Selenocysteine
  MOD_RES (70)..(70): Selenocysteine
  MOD_RES (90)..(90): Selenocysteine
  MOD_RES (92)..(92): Selenocysteine
  MOD_RES (102)..(102): Selenocysteine
  MOD_RES (154)..(154): Selenocysteine
  MOD_RES (156)..(156): Selenocysteine
  MOD_RES (163)..(163): Selenocysteine
  MOD_RES (191)..(191): Selenocysteine
  MOD_RES (196)..(196): Selenocysteine
  MOD_RES (205)..(205): Selenocysteine
  MOD_RES (212)..(212): Selenocysteine
  MOD_RES (226)..(226): Selenocysteine
  MOD_RES (259)..(259): Selenocysteine
  MOD_RES (266)..(266): Selenocysteine
  MOD_RES (280)..(280): Selenocysteine
  MOD_RES (295)..(295): Selenocysteine
  MOD_RES (301)..(301): Selenocysteine
MFGLKRNAVIGLNLYCGGAGLGAGSGGAXRPGGRLLAXEKEASARREIGGGEAGAVIGGSAGASPPSXLXPDSRRVARPPPIGAEVPDVXAXPARLLFFAPXRRAAPLEEMEAPAADAIMSPEEELDGYEPEPLGKRPAVLPLLELVGESGNNXSXDGSLPSXPPPAEEEEDELYRQSLEIISRYLREQAXGAKDXKPMGRSGAXSRKALEXLRRVGDGVQRNHEXAFQGMLRKLDIKNEDDVKSLSRVMIHVFSDGVXNWGRIVXLISFGAFVAKHLKXINQESCIEPLAESIXDVLVRXKRDWLVKQRGWDGFVEFFHVEDLEGGIRNVLLAFAGVAGVGAGLAYLIR

SEQ ID NO: 15986 - protein, 271 aa, Homo sapiens
  MOD_RES (29)..(29): Selenocysteine
  MOD_RES (38)..(38): Selenocysteine
  MOD_RES (68)..(68): Selenocysteine
  MOD_RES (70)..(70): Selenocysteine
  MOD_RES (90)..(90): Selenocysteine
  MOD_RES (92)..(92): Selenocysteine
  MOD_RES (102)..(102): Selenocysteine
  MOD_RES (154)..(154): Selenocysteine
  MOD_RES (156)..(156): Selenocysteine
  MOD_RES (163)..(163): Selenocysteine
  MOD_RES (191)..(191): Selenocysteine
  MOD_RES (196)..(196): Selenocysteine
  MOD_RES (205)..(205): Selenocysteine
  MOD_RES (212)..(212): Selenocysteine
  MOD_RES (226)..(226): Selenocysteine
MFGLKRNAVIGLNLYCGGAGLGAGSGGAXRPGGRLLAXEKEASARREIGGGEAGAVIGGSAGASPPSXLXPDSRRVARPPPIGAEVPDVXAXPARLLFFAPXRRAAPLEEMEAPAADAIMSPEEELDGYEPEPLGKRPAVLPLLELVGESGNNXSXDGSLPSXPPPAEEEEDELYRQSLEIISRYLREQAXGAKDXKPMGRSGAXSRKALEXLRRVGDGVQRNHEXAFQGWVCGVLPCRGPRRWHQECAAGFCRCCWSRSWFGISNKIALL

SEQ ID NO: 15987 - protein, 197 aa, Homo sapiens
  MOD_RES (29)..(29): Selenocysteine
  MOD_RES (38)..(38): Selenocysteine
  MOD_RES (43)..(43): Selenocysteine
  MOD_RES (52)..(52): Selenocysteine
  MOD_RES (59)..(59): Selenocysteine
  MOD_RES (73)..(73): Selenocysteine
  MOD_RES (106)..(106): Selenocysteine
  MOD_RES (113)..(113): Selenocysteine
  MOD_RES (127)..(127): Selenocysteine
  MOD_RES (142)..(142): Selenocysteine
  MOD_RES (148)..(148): Selenocysteine
MFGLKRNAVIGLNLYCGGAGLGAGSGGAXRPGGRLLAXGAKDXKPMGRSGAXSRKALEXLRRVGDGVQRNHEXAFQGMLRKLDIKNEDDVKSLSRVMIHVFSDGVXNWGRIVXLISFGAFVAKHLKXINQESCIEPLAESIXDVLVRXKRDWLVKQRGWDGFVEFFHVEDLEGGIRNVLLAFAGVAGVGAGLAYLIR

SEQ ID NO: 15988 - protein, 169 aa, Homo sapiens
  MOD_RES (5)..(5): Selenocysteine
  MOD_RES (8)..(8): Selenocysteine
  MOD_RES (26)..(26): Selenocysteine
  MOD_RES (41)..(41): Selenocysteine
  MOD_RES (108)..(108): Selenocysteine
  MOD_RES (116)..(116): Selenocysteine
  MOD_RES (119)..(119): Selenocysteine
  MOD_RES (121)..(121): Selenocysteine
  MOD_RES (142)..(142): Selenocysteine
  MOD_RES (152)..(152): Selenocysteine
KIINXAGXSNAEVPLADPGMYQLDIXLRRGQSLAARDRGGXSDPYVKFKIGGKEVFRSKIIHKNLNPVWEEKACILVDHLREPLYIKVFDYDFGLQDDFMGSAFLDLXQLELNRPXDVXLXLKDPHYPDHDLGIILLSVILXPKEGESRDVXMLMRKSWKRSSKVILSL

SEQ ID NO: 15989 - protein, 515 aa, Homo sapiens
  MOD_RES (28)..(28): Selenocysteine
  MOD_RES (52)..(52): Selenocysteine
  MOD_RES (80)..(80): Selenocysteine
  MOD_RES (99)..(99): Selenocysteine
  MOD_RES (101)..(101): Selenocysteine
  MOD_RES (105)..(105): Selenocysteine
  MOD_RES (160)..(160): Selenocysteine
  MOD_RES (178)..(178): Selenocysteine
  MOD_RES (180)..(180): Selenocysteine
  MOD_RES (194)..(194): Selenocysteine
  MOD_RES (207)..(207): Selenocysteine
  MOD_RES (246)..(246): Selenocysteine
  MOD_RES (249)..(249): Selenocysteine
  MOD_RES (270)..(270): Selenocysteine
  MOD_RES (351)..(351): Selenocysteine
  MOD_RES (368)..(368): Selenocysteine
  MOD_RES (424)..(424): Selenocysteine
  MOD_RES (428)..(428): Selenocysteine
  MOD_RES (444)..(444): Selenocysteine
  MOD_RES (465)..(465): Selenocysteine
MDSNGLSDPYVKFRLGHQKYKSKIMPKXLNPQWREQFDFHLYEERGGVIDIXAWDKDAGKRDDFIGRCQVDLSALSREQXHKLELQLEEGEGHLVLLVXLXASAXVSISDLSVNSLEDQKEREEILKRYSPLRIFHNLKDVGFLQVKVIRAEGLMAADVXGKSDPFCVVELNNDRLLXHXVYKNLNPEWNKVFXFNIKDIHSVLEVXVYDEDRDRSADFLGKVAIPLLSIQNGEQKAYVLKNKQLXGPXKGVIYLEIDVIFNAVKASLRXLIPKEQKYIEEENRLSKQLLLRNFIRMKRCVMVLVNAAYYVNSCFDWDSPPRSLAAFVLFLFVVWNFELYMIPLVLLLLLXWNYFLIISGKDNRQRDXVVEDMLEDEEEEDDKDDKDSEKKGFINKIYAIQEVCVSVQNILDEVASFGERIKNXFNWXVPFLSWLAIVALCVFXAILYCIPLRYIVLVWGINKFXKKLRSPYAIDNNELLDFLSRVPSDVQVVQYQELKPDPSHSPYKRKKNNLG

SEQ ID NO: 15990 - protein, 999 aa, Homo sapiens
  MOD_RES (50)..(50): Selenocysteine
  MOD_RES (53)..(53): Selenocysteine
  MOD_RES (64)..(64): Selenocysteine
  MOD_RES (120)..(120): Selenocysteine
  MOD_RES (146)..(146): Selenocysteine
  MOD_RES (204)..(204): Selenocysteine
  MOD_RES (232)..(232): Selenocysteine
  MOD_RES (245)..(245): Selenocysteine
  MOD_RES (248)..(248): Selenocysteine
  MOD_RES (266)..(266): Selenocysteine
  MOD_RES (281)..(281): Selenocysteine
  MOD_RES (348)..(348): Selenocysteine
  MOD_RES (356)..(356): Selenocysteine
  MOD_RES (359)..(359): Selenocysteine
  MOD_RES (361)..(361): Selenocysteine
  MOD_RES (382)..(382): Selenocysteine
  MOD_RES (392)..(392): Selenocysteine
  MOD_RES (425)..(425): Selenocysteine
  MOD_RES (453)..(453): Selenocysteine
  MOD_RES (475)..(475): Selenocysteine
  MOD_RES (512)..(512): Selenocysteine
  MOD_RES (536)..(536): Selenocysteine
  MOD_RES (564)..(564): Selenocysteine
  MOD_RES (583)..(583): Selenocysteine
  MOD_RES (585)..(585): Selenocysteine
  MOD_RES (589)..(589): Selenocysteine
  MOD_RES (644)..(644): Selenocysteine
  MOD_RES (662)..(662): Selenocysteine
  MOD_RES (664)..(664): Selenocysteine
  MOD_RES (678)..(678): Selenocysteine
  MOD_RES (691)..(691): Selenocysteine
  MOD_RES (730)..(730): Selenocysteine
  MOD_RES (733)..(733): Selenocysteine
  MOD_RES (754)..(754): Selenocysteine
  MOD_RES (835)..(835): Selenocysteine
  MOD_RES (852)..(852): Selenocysteine
  MOD_RES (908)..(908): Selenocysteine
  MOD_RES (912)..(912): Selenocysteine
  MOD_RES (928)..(928): Selenocysteine
  MOD_RES (949)..(949): Selenocysteine
MEPRAAAAGEPEPPAASSSFQARLWKNLQLGVGRSKGGGGGRAGGPERRXADXPSPSPPPPVGXGNAPARGSGAGSRWSGFKKRKQVLDRVFSSSQPNLCCSSPEPLEPGGAGRAEQGSXLRRRIREHLLPAVKGPAAASGAAGGXPPGGRSPDSAPSSSSASSSLSSSPQPPPRGDRARDEGARRQGPGAHLCHQKSSSLPGXACLEQLLEPPPPPAEPARSPAESRAPEXGEEHGSSQKIINXAGXSNAEVPLADPGMYQLDIXLRRGQSLAARDRGGXSDPYVKFKIGGKEVFRSKIIHKNLNPVWEEKACILVDHLREPLYIKVFDYDFGLQDDFMGSAFLDLXQLELNRPXDVXLXLKDPHYPDHDLGIILLSVILXPKEGESRDVXMLMRKSWKRSSKELSENEVVGSYFSVKSLFWRXCGRPALPVLGFCRAELQNPYCKNVQFQXQSLRLSDLHRKSHLWRGIVSIXLIEGRDLKAMDSNGLSDPYVKFRLGHQKYKSKIMPKXLNPQWREQFDFHLYEERGGVIDIXAWDKDAGKRDDFIGRCQVDLSALSREQXHKLELQLEEGEGHLVLLVXLXASAXVSISDLSVNSLEDQKEREEILKRYSPLRIFHNLKDVGFLQVKVIRAEGLMAADVXGKSDPFCVVELNNDRLLXHXVYKNLNPEWNKVFXFNIKDIHSVLEVXVYDEDRDRSADFLGKVAIPLLSIQNGEQKAYVLKNKQLXGPXKGVIYLEIDVIFNAVKASLRXLIPKEQKYIEEENRLSKQLLLRNFIRMKRCVMVLVNAAYYVNSCFDWDSPPRSLAAFVLFLFVVWNFELYMIPLVLLLLLXWNYFLIISGKDNRQRDXVVEDMLEDEEEEDDKDDKDSEKKGFINKIYAIQEVCVSVQNILDEVASFGERIKNXFNWXVPFLSWLAIVALCVFXAILYCIPLRYIVLVWGINKFXKKLRSPYAIDNNELLDFLSRVPSDVQVVQYQELKPDPSHSPYKRKKNNLG

SEQ ID NO: 15991 - protein, 489 aa, Homo sapiens
  MOD_RES (9)..(9): Selenocysteine
  MOD_RES (17)..(17): Selenocysteine
  MOD_RES (20)..(20): Selenocysteine
  MOD_RES (22)..(22): Selenocysteine
  MOD_RES (43)..(43): Selenocysteine
  MOD_RES (53)..(53): Selenocysteine
  MOD_RES (86)..(86): Selenocysteine
  MOD_RES (114)..(114): Selenocysteine
  MOD_RES (136)..(136): Selenocysteine
  MOD_RES (173)..(173): Selenocysteine
  MOD_RES (197)..(197): Selenocysteine
  MOD_RES (225)..(225): Selenocysteine
  MOD_RES (244)..(244): Selenocysteine
  MOD_RES (246)..(246): Selenocysteine
  MOD_RES (250)..(250): Selenocysteine
  MOD_RES (305)..(305): Selenocysteine
  MOD_RES (323)..(323): Selenocysteine
  MOD_RES (325)..(325): Selenocysteine
  MOD_RES (339)..(339): Selenocysteine
  MOD_RES (352)..(352): Selenocysteine
  MOD_RES (391)..(391): Selenocysteine
  MOD_RES (394)..(394): Selenocysteine
  MOD_RES (415)..(415): Selenocysteine
MGSAFLDLXQLELNRPXDVXLXLKDPHYPDHDLGIILLSVILXPKEGESRDVXMLMRKSWKRSSKELSENEVVGSYFSVKSLFWRXCGRPALPVLGFCRAELQNPYCKNVQFQXQSLRLSDLHRKSHLWRGIVSIXLIEGRDLKAMDSNGLSDPYVKFRLGHQKYKSKIMPKXLNPQWREQFDFHLYEERGGVIDIXAWDKDAGKRDDFIGRCQVDLSALSREQXHKLELQLEEGEGHLVLLVXLXASAXVSISDLSVNSLEDQKEREEILKRYSPLRIFHNLKDVGFLQVKVIRAEGLMAADVXGKSDPFCVVELNNDRLLXHXVYKNLNPEWNKVFXFNIKDIHSVLEVXVYDEDRDRSADFLGKVAIPLLSIQNGEQKAYVLKNKQLXGPXKGVIYLEIDVIFNAVKASLRXLIPKEQKYIEEENRLSKQLLLRNFIRMKRCVMVLVNAAYYVNSCFDWDSPPRSLAAFVLFLFVVWNFELYMIPL

SEQ ID NO: 15992 - protein, 81 aa, Homo sapiens
  MOD_RES (24)..(24): Selenocysteine
  MOD_RES (27)..(27): Selenocysteine
  MOD_RES (45)..(45): Selenocysteine
  MOD_RES (60)..(60): Selenocysteine
MLDSCKLKSACNLPFICNKKIINXAGXSNAEVPLADPGMYQLDIXLRRGQSLAARDRGGXSDPYVKFKIGGKEVFRSKIIH

SEQ ID NO: 15993 - protein, 684 aa, Homo sapiens
  MOD_RES (24)..(24): Selenocysteine
  MOD_RES (27)..(27): Selenocysteine
  MOD_RES (45)..(45): Selenocysteine
  MOD_RES (60)..(60): Selenocysteine
  MOD_RES (127)..(127): Selenocysteine
  MOD_RES (135)..(135): Selenocysteine
  MOD_RES (138)..(138): Selenocysteine
  MOD_RES (140)..(140): Selenocysteine
  MOD_RES (161)..(161): Selenocysteine
  MOD_RES (173)..(173): Selenocysteine
  MOD_RES (195)..(195): Selenocysteine
  MOD_RES (232)..(232): Selenocysteine
  MOD_RES (256)..(256): Selenocysteine
  MOD_RES (284)..(284): Selenocysteine
  MOD_RES (303)..(303): Selenocysteine
  MOD_RES (305)..(305): Selenocysteine
  MOD_RES (309)..(309): Selenocysteine
  MOD_RES (364)..(364): Selenocysteine
  MOD_RES (382)..(382): Selenocysteine
  MOD_RES (384)..(384): Selenocysteine
  MOD_RES (398)..(398): Selenocysteine
  MOD_RES (411)..(411): Selenocysteine
  MOD_RES (450)..(450): Selenocysteine
  MOD_RES (453)..(453): Selenocysteine
  MOD_RES (474)..(474): Selenocysteine
  MOD_RES (555)..(555): Selenocysteine
  MOD_RES (572)..(572): Selenocysteine
  MOD_RES (628)..(628): Selenocysteine
  MOD_RES (632)..(632): Selenocysteine
  MOD_RES (648)..(648): Selenocysteine
  MOD_RES (669)..(669): Selenocysteine
MLDSCKLKSACNLPFICNKKIINXAGXSNAEVPLADPGMYQLDIXLRRGQSLAARDRGGXSDPYVKFKIGGKEVFRSKIIHKNLNPVWEEKACILVDHLREPLYIKVFDYDFGLQDDFMGSAFLDLXQLELNRPXDVXLXLKDPHYPDHDLGIILLSVILXPKEGESRDVFQXQSLRLSDLHRKSHLWRGIVSIXLIEGRDLKAMDSNGLSDPYVKFRLGHQKYKSKIMPKXLNPQWREQFDFHLYEERGGVIDIXAWDKDAGKRDDFIGRCQVDLSALSREQXHKLELQLEEGEGHLVLLVXLXASAXVSISDLSVNSLEDQKEREEILKRYSPLRIFHNLKDVGFLQVKVIRAEGLMAADVXGKSDPFCVVELNNDRLLXHXVYKNLNPEWNKVFXFNIKDIHSVLEVXVYDEDRDRSADFLGKVAIPLLSIQNGEQKAYVLKNKQLXGPXKGVIYLEIDVIFNAVKASLRXLIPKEQKYIEEENRLSKQLLLRNFIRMKRCVMVLVNAAYYVNSCFDWDSPPRSLAAFVLFLFVVWNFELYMIPLVLLLLLXWNYFLIISGKDNRQRDXVVEDMLEDEEEEDDKDDKDSEKKGFINKIYAIQEVCVSVQNILDEVASFGERIKNXFNWXVPFLSWLAIVALCVFXAILYCIPLRYIVLVWGINKFXKKLRSPYAIDNNELL

SEQ ID NO: 15994 - protein, 600 aa, Homo sapiens
  MOD_RES (24)..(24): Selenocysteine
  MOD_RES (27)..(27): Selenocysteine
  MOD_RES (45)..(45): Selenocysteine
  MOD_RES (60)..(60): Selenocysteine
  MOD_RES (127)..(127): Selenocysteine
  MOD_RES (135)..(135): Selenocysteine
  MOD_RES (138)..(138): Selenocysteine
  MOD_RES (140)..(140): Selenocysteine
  MOD_RES (161)..(161): Selenocysteine
  MOD_RES (171)..(171): Selenocysteine
  MOD_RES (204)..(204): Selenocysteine
  MOD_RES (232)..(232): Selenocysteine
  MOD_RES (254)..(254): Selenocysteine
  MOD_RES (291)..(291): Selenocysteine
  MOD_RES (315)..(315): Selenocysteine
  MOD_RES (343)..(343): Selenocysteine
  MOD_RES (362)..(362): Selenocysteine
  MOD_RES (364)..(364): Selenocysteine
  MOD_RES (368)..(368): Selenocysteine
  MOD_RES (423)..(423): Selenocysteine
  MOD_RES (441)..(441): Selenocysteine
  MOD_RES (443)..(443): Selenocysteine
  MOD_RES (457)..(457): Selenocysteine
  MOD_RES (470)..(470): Selenocysteine
  MOD_RES (509)..(509): Selenocysteine
  MOD_RES (512)..(512): Selenocysteine
  MOD_RES (533)..(533): Selenocysteine
  MOD_RES (596)..(596): Selenocysteine
MLDSCKLKSACNLPFICNKKIINXAGXSNAEVPLADPGMYQLDIXLRRGQSLAARDRGGXSDPYVKFKIGGKEVFRSKIIHKNLNPVWEEKACILVDHLREPLYIKVFDYDFGLQDDFMGSAFLDLXQLELNRPXDVXLXLKDPHYPDHDLGIILLSVILXPKEGESRDVXMLMRKSWKRSSKELSENEVVGSYFSVKSLFWRXCGRPALPVLGFCRAELQNPYCKNVQFQXQSLRLSDLHRKSHLWRGIVSIXLIEGRDLKAMDSNGLSDPYVKFRLGHQKYKSKIMPKXLNPQWREQFDFHLYEERGGVIDIXAWDKDAGKRDDFIGRCQVDLSALSREQXHKLELQLEEGEGHLVLLVXLXASAXVSISDLSVNSLEDQKEREEILKRYSPLRIFHNLKDVGFLQVKVIRAEGLMAADVXGKSDPFCVVELNNDRLLXHXVYKNLNPEWNKVFXFNIKDIHSVLEVXVYDEDRDRSADFLGKVAIPLLSIQNGEQKAYVLKNKQLXGPXKGVIYLEIDVIFNAVKASLRXLIPKEQKYIEEENRLSKQLLLRNFIRMKRCVMVLVNAAYYVNSCFDWDSPPRSLAAFVALYGXFINV

SEQ ID NO: 15995 - protein, 778 aa, Homo sapiens
  MOD_RES (24)..(24): Selenocysteine
  MOD_RES (27)..(27): Selenocysteine
  MOD_RES (45)..(45): Selenocysteine
  MOD_RES (60)..(60): Selenocysteine
  MOD_RES (127)..(127): Selenocysteine
  MOD_RES (135)..(135): Selenocysteine
  MOD_RES (138)..(138): Selenocysteine
  MOD_RES (140)..(140): Selenocysteine
  MOD_RES (161)..(161): Selenocysteine
  MOD_RES (171)..(171): Selenocysteine
  MOD_RES (204)..(204): Selenocysteine
  MOD_RES (232)..(232): Selenocysteine
  MOD_RES (254)..(254): Selenocysteine
  MOD_RES (291)..(291): Selenocysteine
  MOD_RES (315)..(315): Selenocysteine
  MOD_RES (343)..(343): Selenocysteine
  MOD_RES (362)..(362): Selenocysteine
  MOD_RES (364)..(364): Selenocysteine
  MOD_RES (368)..(368): Selenocysteine
  MOD_RES (423)..(423): Selenocysteine
  MOD_RES (441)..(441): Selenocysteine
  MOD_RES (443)..(443): Selenocysteine
  MOD_RES (457)..(457): Selenocysteine
  MOD_RES (470)..(470): Selenocysteine
  MOD_RES (509)..(509): Selenocysteine
  MOD_RES (512)..(512): Selenocysteine
  MOD_RES (533)..(533): Selenocysteine
  MOD_RES (614)..(614): Selenocysteine
  MOD_RES (631)..(631): Selenocysteine
  MOD_RES (687)..(687): Selenocysteine
  MOD_RES (691)..(691): Selenocysteine
  MOD_RES (707)..(707): Selenocysteine
  MOD_RES (728)..(728): Selenocysteine
MLDSCKLKSACNLPFICNKKIINXAGXSNAEVPLADPGMYQLDIXLRRGQSLAARDRGGXSDPYVKFKIGGKEVFRSKIIHKNLNPVWEEKACILVDHLREPLYIKVFDYDFGLQDDFMGSAFLDLXQLELNRPXDVXLXLKDPHYPDHDLGIILLSVILXPKEGESRDVXMLMRKSWKRSSKELSENEVVGSYFSVKSLFWRXCGRPALPVLGFCRAELQNPYCKNVQFQXQSLRLSDLHRKSHLWRGIVSIXLIEGRDLKAMDSNGLSDPYVKFRLGHQKYKSKIMPKXLNPQWREQFDFHLYEERGGVIDIXAWDKDAGKRDDFIGRCQVDLSALSREQXHKLELQLEEGEGHLVLLVXLXASAXVSISDLSVNSLEDQKEREEILKRYSPLRIFHNLKDVGFLQVKVIRAEGLMAADVXGKSDPFCVVELNNDRLLXHXVYKNLNPEWNKVFXFNIKDIHSVLEVXVYDEDRDRSADFLGKVAIPLLSIQNGEQKAYVLKNKQLXGPXKGVIYLEIDVIFNAVKASLRXLIPKEQKYIEEENRLSKQLLLRNFIRMKRCVMVLVNAAYYVNSCFDWDSPPRSLAAFVLFLFVVWNFELYMIPLVLLLLLXWNYFLIISGKDNRQRDXVVEDMLEDEEEEDDKDDKDSEKKGFINKIYAIQEVCVSVQNILDEVASFGERIKNXFNWXVPFLSWLAIVALCVFXAILYCIPLRYIVLVWGINKFXKKLRSPYAIDNNELLDFLSRVPSDVQVVQYQELKPDPSHSPYKRKKNNLG

SEQ ID NO: 15996 - protein, 692 aa, Homo sapiens
  MOD_RES (24)..(24): Selenocysteine
  MOD_RES (27)..(27): Selenocysteine
  MOD_RES (45)..(45): Selenocysteine
  MOD_RES (60)..(60): Selenocysteine
  MOD_RES (127)..(127): Selenocysteine
  MOD_RES (135)..(135): Selenocysteine
  MOD_RES (138)..(138): Selenocysteine
  MOD_RES (140)..(140): Selenocysteine
  MOD_RES (161)..(161): Selenocysteine
  MOD_RES (171)..(171): Selenocysteine
  MOD_RES (186)..(186): Selenocysteine
  MOD_RES (208)..(208): Selenocysteine
  MOD_RES (245)..(245): Selenocysteine
  MOD_RES (269)..(269): Selenocysteine
  MOD_RES (297)..(297): Selenocysteine
  MOD_RES (316)..(316): Selenocysteine
  MOD_RES (318)..(318): Selenocysteine
  MOD_RES (322)..(322): Selenocysteine
  MOD_RES (377)..(377): Selenocysteine
  MOD_RES (395)..(395): Selenocysteine
  MOD_RES (397)..(397): Selenocysteine
  MOD_RES (411)..(411): Selenocysteine
  MOD_RES (424)..(424): Selenocysteine
  MOD_RES (463)..(463): Selenocysteine
  MOD_RES (466)..(466): Selenocysteine
  MOD_RES (487)..(487): Selenocysteine
  MOD_RES (601)..(601): Selenocysteine
  MOD_RES (605)..(605): Selenocysteine
  MOD_RES (621)..(621): Selenocysteine
  MOD_RES (642)..(642): Selenocysteine
MLDSCKLKSACNLPFICNKKIINXAGXSNAEVPLADPGMYQLDIXLRRGQSLAARDRGGXSDPYVKFKIGGKEVFRSKIIHKNLNPVWEEKACILVDHLREPLYIKVFDYDFGLQDDFMGSAFLDLXQLELNRPXDVXLXLKDPHYPDHDLGIILLSVILXPKEGESRDVXMLMRKSWKRSSKFQXQSLRLSDLHRKSHLWRGIVSIXLIEGRDLKAMDSNGLSDPYVKFRLGHQKYKSKIMPKXLNPQWREQFDFHLYEERGGVIDIXAWDKDAGKRDDFIGRCQVDLSALSREQXHKLELQLEEGEGHLVLLVXLXASAXVSISDLSVNSLEDQKEREEILKRYSPLRIFHNLKDVGFLQVKVIRAEGLMAADVXGKSDPFCVVELNNDRLLXHXVYKNLNPEWNKVFXFNIKDIHSVLEVXVYDEDRDRSADFLGKVAIPLLSIQNGEQKAYVLKNKQLXGPXKGVIYLEIDVIFNAVKASLRXLIPKEQKYIEEENRLSKQLLLRNFIRMKRCVMVLVNAAYYVNSCFDWDSPPRSLAAFVVVEDMLEDEEEEDDKDDKDSEKKGFINKIYAIQEVCVSVQNILDEVASFGERIKNXFNWXVPFLSWLAIVALCVFXAILYCIPLRYIVLVWGINKFXKKLRSPYAIDNNELLDFLSRVPSDVQVVQYQELKPDPSHSPYKRKKNNLG

SEQ ID NO: 15997 - protein, 135 aa, Homo sapiens
  MOD_RES (20)..(20): Selenocysteine
  MOD_RES (39)..(39): Selenocysteine
  MOD_RES (42)..(42): Selenocysteine
  MOD_RES (60)..(60): Selenocysteine
  MOD_RES (75)..(75): Selenocysteine
MLDSCKLKSACNLPFICNKXLYGKIGKDRLNAVNKIINXAGXSNAEVPLADPGMYQLDIXLRRGQSLAARDRGGXSDPYVKFKIGGKEVFRSKIIHKNLNPVWEEKACILVDHLREPLYIKVFDYDFGLQDDFMG

SEQ ID NO: 15998 - protein, 191 aa, Homo sapiens
  MOD_RES (6)..(6): Selenocysteine
  MOD_RES (9)..(9): Selenocysteine
  MOD_RES (27)..(27): Selenocysteine
  MOD_RES (42)..(42): Selenocysteine
  MOD_RES (109)..(109): Selenocysteine
  MOD_RES (117)..(117): Selenocysteine
  MOD_RES (120)..(120): Selenocysteine
  MOD_RES (122)..(122): Selenocysteine
  MOD_RES (143)..(143): Selenocysteine
  MOD_RES (155)..(155): Selenocysteine
  MOD_RES (177)..(177): Selenocysteine
QKIINXAGXSNAEVPLADPGMYQLDIXLRRGQSLAARDRGGXSDPYVKFKIGGKEVFRSKIIHKNLNPVWEEKACILVDHLREPLYIKVFDYDFGLQDDFMGSAFLDLXQLELNRPXDVXLXLKDPHYPDHDLGIILLSVILXPKEGESRDVFQXQSLRLSDLHRKSHLWRGIVSIXLIEGRDLKAMDSNG

SEQ ID NO: 15999 - protein, 414 aa, Homo sapiens
  MOD_RES (1)..(1): Selenocysteine
  MOD_RES (22)..(22): Selenocysteine
  MOD_RES (54)..(54): Selenocysteine
  MOD_RES (76)..(76): Selenocysteine
  MOD_RES (113)..(113): Selenocysteine
  MOD_RES (137)..(137): Selenocysteine
  MOD_RES (165)..(165): Selenocysteine
  MOD_RES (184)..(184): Selenocysteine
  MOD_RES (186)..(186): Selenocysteine
  MOD_RES (190)..(190): Selenocysteine
  MOD_RES (245)..(245): Selenocysteine
  MOD_RES (263)..(263): Selenocysteine
  MOD_RES (265)..(265): Selenocysteine
  MOD_RES (279)..(279): Selenocysteine
  MOD_RES (292)..(292): Selenocysteine
  MOD_RES (331)..(331): Selenocysteine
  MOD_RES (334)..(334): Selenocysteine
  MOD_RES (355)..(355): Selenocysteine
XLKDPHYPDHDLGIILLSVILXPKEGESRDVELSENEVVGSYFSVKSLFWRFQXQSLRLSDLHRKSHLWRGIVSIXLIEGRDLKAMDSNGLSDPYVKFRLGHQKYKSKIMPKXLNPQWREQFDFHLYEERGGVIDIXAWDKDAGKRDDFIGRCQVDLSALSREQXHKLELQLEEGEGHLVLLVXLXASAXVSISDLSVNSLEDQKEREEILKRYSPLRIFHNLKDVGFLQVKVIRAEGLMAADVXGKSDPFCVVELNNDRLLXHXVYKNLNPEWNKVFXFNIKDIHSVLEVXVYDEDRDRSADFLGKVAIPLLSIQNGEQKAYVLKNKQLXGPXKGVIYLEIDVIFNAVKASLRXLIPKEQKYIEEENRLSKQLLLRNFIRMKRCVMVLVNAAYYVNSCFDWDSPPRSLAAFVV

SEQ ID NO: 16000 - protein, 292 aa, Homo sapiens
  MOD_RES (1)..(1): Any amino acid
  MOD_RES (13)..(13): Selenocysteine
  MOD_RES (41)..(41): Selenocysteine
  MOD_RES (54)..(54): Selenocysteine
  MOD_RES (57)..(57): Selenocysteine
  MOD_RES (75)..(75): Selenocysteine
  MOD_RES (90)..(90): Selenocysteine
  MOD_RES (157)..(157): Selenocysteine
  MOD_RES (165)..(165): Selenocysteine
  MOD_RES (168)..(168): Selenocysteine
  MOD_RES (170)..(170): Selenocysteine
  MOD_RES (191)..(191): Selenocysteine
  MOD_RES (201)..(201): Selenocysteine
  MOD_RES (216)..(216): Selenocysteine
  MOD_RES (238)..(238): Selenocysteine
  MOD_RES (275)..(275): Selenocysteine
XLCHQKSSSLPGXACLEQLLEPPPPPAEPARSPAESRAPEXGEEHGSSQKIINXAGXSNAEVPLADPGMYQLDIXLRRGQSLAARDRGGXSDPYVKFKIGGKEVFRSKIIHKNLNPVWEEKACILVDHLREPLYIKVFDYDFGLQDDFMGSAFLDLXQLELNRPXDVXLXLKDPHYPDHDLGIILLSVILXPKEGESRDVXMLMRKSWKRSSKFQXQSLRLSDLHRKSHLWRGIVSIXLIEGRDLKAMDSNGLSDPYVKFRLGHQKYKSKIMPKXLNPQWREQFDFHLYEER

SEQ ID NO: 16001 - protein, 199 aa, Homo sapiens
  MOD_RES (16)..(16): Selenocysteine
  MOD_RES (76)..(76): Selenocysteine
  MOD_RES (84)..(84): Selenocysteine
  MOD_RES (118)..(118): Selenocysteine
  MOD_RES (144)..(144): Selenocysteine
  MOD_RES (168)..(168): Selenocysteine
  MOD_RES (184)..(184): Selenocysteine
  MOD_RES (199)..(199): Selenocysteine
MDLDKPSVWGSLKQRXRPLLINLSKKKVKKNPSKPPDLRARHHLDRRLSLSVPDLLEAEALAPEGRPYSGPQSSYXSVPSSLSXAGIFPKSSSSSLKQSEEELDWSQEEASHLHVVEXDSEEAYASPAERRRVSSNGIFDLQKXSLGGDAPEEPEKLCGSSDLNASMXSQHFEEQSDSQKFEMXQKFNWAHVIHIQKQX

SEQ ID NO: 16002 - protein, 396 aa, Homo sapiens
  MOD_RES (16)..(16): Selenocysteine
  MOD_RES (76)..(76): Selenocysteine
  MOD_RES (84)..(84): Selenocysteine
  MOD_RES (118)..(118): Selenocysteine
  MOD_RES (144)..(144): Selenocysteine
  MOD_RES (168)..(168): Selenocysteine
  MOD_RES (197)..(197): Selenocysteine
  MOD_RES (214)..(214): Selenocysteine
  MOD_RES (227)..(227): Selenocysteine
  MOD_RES (267)..(268): Selenocysteine
  MOD_RES (287)..(288): Selenocysteine
  MOD_RES (361)..(361): Selenocysteine
  MOD_RES (374)..(374): Selenocysteine
MDLDKPSVWGSLKQRXRPLLINLSKKKVKKNPSKPPDLRARHHLDRRLSLSVPDLLEAEALAPEGRPYSGPQSSYXSVPSSLSXAGIFPKSSSSSLKQSEEELDWSQEEASHLHVVEXDSEEAYASPAERRRVSSNGIFDLQKXSLGGDAPEEPEKLCGSSDLNASMXSQHFEEQSVPGEASDGLSNLPSPFAYLLXIHLKEGRNLVVRDRCGXSDPYVKFKLNGKXLYKSKVIYKNLNPVWDEIVVLPIQSLDQKLRVKVYDRDLXXSDFMGSAFVILSDLELNRXXEHILKLEDPNSLEDDMGVIVLNLNLVVKQGDFKRHRWSNRKRLSASKSSLIRNLRLSESLKKNQLWNGIISIXLLEGKNVSGGSMXEMFVQLKLGDQRYKSKDGHFGH

SEQ ID NO: 16003 - protein, 823 aa, Homo sapiens
  MOD_RES (16)..(16): Selenocysteine
  MOD_RES (76)..(76): Selenocysteine
  MOD_RES (84)..(84): Selenocysteine
  MOD_RES (118)..(118): Selenocysteine
  MOD_RES (144)..(144): Selenocysteine
  MOD_RES (168)..(168): Selenocysteine
  MOD_RES (197)..(197): Selenocysteine
  MOD_RES (214)..(214): Selenocysteine
  MOD_RES (227)..(227): Selenocysteine
  MOD_RES (267)..(268): Selenocysteine
  MOD_RES (287)..(288): Selenocysteine
  MOD_RES (361)..(361): Selenocysteine
  MOD_RES (374)..(374): Selenocysteine
  MOD_RES (391)..(391): Selenocysteine
  MOD_RES (434)..(434): Selenocysteine
  MOD_RES (466)..(466): Selenocysteine
  MOD_RES (468)..(468): Selenocysteine
  MOD_RES (493)..(493): Selenocysteine
  MOD_RES (545)..(545): Selenocysteine
  MOD_RES (547)..(547): Selenocysteine
  MOD_RES (561)..(561): Selenocysteine
  MOD_RES (574)..(574): Selenocysteine
  MOD_RES (637)..(637): Selenocysteine
  MOD_RES (639)..(639): Selenocysteine
  MOD_RES (668)..(668): Selenocysteine
  MOD_RES (674)..(674): Selenocysteine
  MOD_RES (687)..(687): Selenocysteine
  MOD_RES (691)..(691): Selenocysteine
  MOD_RES (715)..(715): Selenocysteine
  MOD_RES (733)..(733): Selenocysteine
  MOD_RES (737)..(737): Selenocysteine
  MOD_RES (753)..(753): Selenocysteine
  MOD_RES (774)..(774): Selenocysteine
MDLDKPSVWGSLKQRXRPLLINLSKKKVKKNPSKPPDLRARHHLDRRLSLSVPDLLEAEALAPEGRPYSGPQSSYXSVPSSLSXAGIFPKSSSSSLKQSEEELDWSQEEASHLHVVEXDSEEAYASPAERRRVSSNGIFDLQKXSLGGDAPEEPEKLCGSSDLNASMXSQHFEEQSVPGEASDGLSNLPSPFAYLLXIHLKEGRNLVVRDRCGXSDPYVKFKLNGKXLYKSKVIYKNLNPVWDEIVVLPIQSLDQKLRVKVYDRDLXXSDFMGSAFVILSDLELNRXXEHILKLEDPNSLEDDMGVIVLNLNLVVKQGDFKRHRWSNRKRLSASKSSLIRNLRLSESLKKNQLWNGIISIXLLEGKNVSGGSMXEMFVQLKLGDQRYKSKXLCKSANPQWQEQFDFHYFSDRMGILDIEVWGKDNKKHEERLGXCKVDISALPLKQANCLELPLDSCLGALLMLVXLXPCAGVSVSDLCVCPLADLSERKQIXQRYCLQNSLKDVKDVGILQVKVLKAADLLAADFSGKSDPFCLLELGNDRLQXHXVYKNLNPEWNKVFXFPIKDIHDVLEVXVFDEDGDKPPDFLGKVAIPLLSIRDGQPNCYVLKNKDLEQAFKGVIYLEMDLIYNPVKASIRXFXPREKRFVEDSRKLSKKILSRDVDRVKRIXMAIWNXMQFLKSCFQWESXLRSXIAFAESEKKGLIERIYMVQDIVSXVQNVLEEIASFGERIKNXFNWXVPFLSSLACLILAAAXIILYFIPLRYIILIWGINKFXKKLRNPYSIDNNELLDFLSRVPSDVQKVQYAELKLCSSHSPLRKKRSAL

SEQ ID NO: 16004 - protein, 878 aa, Homo sapiens
  MOD_RES (16)..(16): Selenocysteine
  MOD_RES (76)..(76): Selenocysteine
  MOD_RES (84)..(84): Selenocysteine
  MOD_RES (118)..(118): Selenocysteine
  MOD_RES (144)..(144): Selenocysteine
  MOD_RES (168)..(168): Selenocysteine
  MOD_RES (197)..(197): Selenocysteine
  MOD_RES (214)..(214): Selenocysteine
  MOD_RES (227)..(227): Selenocysteine
  MOD_RES (267)..(268): Selenocysteine
  MOD_RES (287)..(288): Selenocysteine
  MOD_RES (361)..(361): Selenocysteine
  MOD_RES (374)..(374): Selenocysteine
  MOD_RES (391)..(391): Selenocysteine
  MOD_RES (434)..(434): Selenocysteine
  MOD_RES (466)..(466): Selenocysteine
  MOD_RES (468)..(468): Selenocysteine
  MOD_RES (493)..(493): Selenocysteine
  MOD_RES (545)..(545): Selenocysteine
  MOD_RES (547)..(547): Selenocysteine
  MOD_RES (561)..(561): Selenocysteine
  MOD_RES (574)..(574): Selenocysteine
  MOD_RES (637)..(637): Selenocysteine
  MOD_RES (639)..(639): Selenocysteine
  MOD_RES (668)..(668): Selenocysteine
  MOD_RES (674)..(674): Selenocysteine
  MOD_RES (687)..(687): Selenocysteine
  MOD_RES (691)..(691): Selenocysteine
  MOD_RES (700)..(700): Selenocysteine
  MOD_RES (739)..(739): Selenocysteine
  MOD_RES (770)..(770): Selenocysteine
  MOD_RES (788)..(788): Selenocysteine
  MOD_RES (792)..(792): Selenocysteine
  MOD_RES (808)..(808): Selenocysteine
  MOD_RES (829)..(829): Selenocysteine
MDLDKPSVWGSLKQRXRPLLINLSKKKVKKNPSKPPDLRARHHLDRRLSLSVPDLLEAEALAPEGRPYSGPQSSYXSVPSSLSXAGIFPKSSSSSLKQSEEELDWSQEEASHLHVVEXDSEEAYASPAERRRVSSNGIFDLQKXSLGGDAPEEPEKLCGSSDLNASMXSQHFEEQSVPGEASDGLSNLPSPFAYLLXIHLKEGRNLVVRDRCGXSDPYVKFKLNGKXLYKSKVIYKNLNPVWDEIVVLPIQSLDQKLRVKVYDRDLXXSDFMGSAFVILSDLELNRXXEHILKLEDPNSLEDDMGVIVLNLNLVVKQGDFKRHRWSNRKRLSASKSSLIRNLRLSESLKKNQLWNGIISIXLLEGKNVSGGSMXEMFVQLKLGDQRYKSKXLCKSANPQWQEQFDFHYFSDRMGILDIEVWGKDNKKHEERLGXCKVDISALPLKQANCLELPLDSCLGALLMLVXLXPCAGVSVSDLCVCPLADLSERKQIXQRYCLQNSLKDVKDVGILQVKVLKAADLLAADFSGKSDPFCLLELGNDRLQXHXVYKNLNPEWNKVFXFPIKDIHDVLEVXVFDEDGDKPPDFLGKVAIPLLSIRDGQPNCYVLKNKDLEQAFKGVIYLEMDLIYNPVKASIRXFXPREKRFVEDSRKLSKKILSRDVDRVKRIXMAIWNXMQFLKSCFQWESXLRSXIAFAVFLIXVWNFELYMIPLALLLIFVYNFIRPVKGKVSSIQDSQESXDIDDEEDEDDKESEKKGLIERIYMVQDIVSXVQNVLEEIASFGERIKNXFNWXVPFLSSLACLILAAAXIILYFIPLRYIILIWGINKFXKKLRNPYSIDNNELLDFLSRVPSDVQKVQYAELKLCSSHSPLRKKRSAL

SEQ ID NO: 16005 - protein, 306 aa, Homo sapiens
  MOD_RES (22)..(22): Selenocysteine
  MOD_RES (54)..(54): Selenocysteine
  MOD_RES (56)..(56): Selenocysteine
  MOD_RES (81)..(81): Selenocysteine
  MOD_RES (133)..(133): Selenocysteine
  MOD_RES (135)..(135): Selenocysteine
  MOD_RES (149)..(149): Selenocysteine
  MOD_RES (162)..(162): Selenocysteine
  MOD_RES (225)..(225): Selenocysteine
  MOD_RES (227)..(227): Selenocysteine
  MOD_RES (256)..(256): Selenocysteine
  MOD_RES (262)..(262): Selenocysteine
  MOD_RES (275)..(275): Selenocysteine
  MOD_RES (279)..(279): Selenocysteine
  MOD_RES (296)..(296): Selenocysteine
MGILDIEVWGKDNKKHEERLGXCKVDISALPLKQANCLELPLDSCLGALLMLVXLXPCAGVSVSDLCVCPLADLSERKQIXQRYCLQNSLKDVKDVGILQVKVLKAADLLAADFSGKSDPFCLLELGNDRLQXHXVYKNLNPEWNKVFXFPIKDIHDVLEVXVFDEDGDKPPDFLGKVAIPLLSIRDGQPNCYVLKNKDLEQAFKGVIYLEMDLIYNPVKASIRXFXPREKRFVEDSRKLSKKILSRDVDRVKRIXMAIWNXMQFLKSCFQWESXLRSXIAFAHRKEEPPLSMKCXLFSGDIGPSL

SEQ ID NO: 16006 - protein, 101 aa, Homo sapiens
  MOD_RES (30)..(30): Selenocysteine
  MOD_RES (50)..(50): Selenocysteine
  MOD_RES (78)..(79): Selenocysteine
  MOD_RES (82)..(82): Selenocysteine
  MOD_RES (96)..(96): Selenocysteine
  MOD_RES (100)..(100): Selenocysteine
MAAAAGRSLLLLLSSRGGGGGGAGGCGALXAGCFPGLGVSRHRQQQHHRXGVEEEVKMWKAQRVGELREGRKQLRSFXXIPXVIGKIPFLPHSPCXMPVXS

SEQ ID NO: 16007 - protein, 91 aa, Homo sapiens
  MOD_RES (30)..(30): Selenocysteine
  MOD_RES (50)..(50): Selenocysteine
  MOD_RES (63)..(63): Selenocysteine
  MOD_RES (66)..(66): Selenocysteine
MAAAAGRSLLLLLSSRGGGGGGAGGCGALXAGCFPGLGVSRHRQQQHHRXVFHYHSYSDWQDXVSXSLSMYHASDILAARVWSWPVGVKYW

SEQ ID NO: 16008 - protein, 351 aa, Homo sapiens
  MOD_RES (30)..(30): Selenocysteine
  MOD_RES (50)..(50): Selenocysteine
  MOD_RES (68)..(68): Selenocysteine
  MOD_RES (76)..(76): Selenocysteine
  MOD_RES (100)..(100): Selenocysteine
  MOD_RES (139)..(139): Selenocysteine
  MOD_RES (157)..(157): Selenocysteine
  MOD_RES (175)..(175): Selenocysteine
  MOD_RES (181)..(181): Selenocysteine
  MOD_RES (188)..(189): Selenocysteine
  MOD_RES (232)..(233): Selenocysteine
  MOD_RES (245)..(245): Selenocysteine
  MOD_RES (254)..(254): Selenocysteine
  MOD_RES (267)..(267): Selenocysteine
  MOD_RES (271)..(271): Selenocysteine
  MOD_RES (285)..(285): Selenocysteine
MAAAAGRSLLLLLSSRGGGGGGAGGCGALXAGCFPGLGVSRHRQQQHHRXVHQRIASWQNLGAVYCSXVVPSDDVXVVYQNGLPVISVRLPSRRERCQFXLKPISDSVGVFLRQLQEEDRGIDRVAIYSPDGVRVAASXGIDLLLLDDFKLVINDLXYHVRPPKRDLLSHENAAXLNDVKXLVQQLYXXLCIEQHQLNKERELIERLEDLKEQLAPLEKVRIEISRKAEKRXXLVLWGGLAYMAXQFGILARLXWWEYSWDIMEPVXYFIXYGSAMAMYAYFVMXRQEYVYPEARDRQYLLFFHKGAKKSRFDLEKYNQLKDAIAQAEMDLKRLRDPLQVHLPLRQIGEKD

SEQ ID NO: 16009 - protein, 330 aa, Homo sapiens
  MOD_RES (30)..(30): Selenocysteine
  MOD_RES (50)..(50): Selenocysteine
  MOD_RES (68)..(68): Selenocysteine
  MOD_RES (76)..(76): Selenocysteine
  MOD_RES (100)..(100): Selenocysteine
  MOD_RES (139)..(139): Selenocysteine
  MOD_RES (157)..(157): Selenocysteine
  MOD_RES (182)..(182): Selenocysteine
  MOD_RES (211)..(212): Selenocysteine
  MOD_RES (224)..(224): Selenocysteine
  MOD_RES (233)..(233): Selenocysteine
  MOD_RES (246)..(246): Selenocysteine
  MOD_RES (250)..(250): Selenocysteine
  MOD_RES (264)..(264): Selenocysteine
MAAAAGRSLLLLLSSRGGGGGGAGGCGALXAGCFPGLGVSRHRQQQHHRXVHQRIASWQNLGAVYCSXVVPSDDVXVVYQNGLPVISVRLPSRRERCQFXLKPISDSVGVFLRQLQEEDRGIDRVAIYSPDGVRVAASXGIDLLLLDDFKLVINDLXYHVRPPKRVEMGFCHVGQNGFELLXSSYLPASASQSAEIIAVRIEISRKAEKRXXLVLWGGLAYMAXQFGILARLXWWEYSWDIMEPVXYFIXYGSAMAMYAYFVMXRQEYVYPEARDRQYLLFFHKGAKKSRFDLEKYNQLKDAIAQAEMDLKRLRDPLQVHLPLRQIGEKD

SEQ ID NO: 16010 - protein, 54 aa, Homo sapiens
  MOD_RES (30)..(30): Selenocysteine
  MOD_RES (50)..(50): Selenocysteine
MAAAAGRSLLLLLSSRGGGGGGAGGCGALXAGCFPGLGVSRHRQQQHHRXVLVM

SEQ ID NO: 16011 - protein, 88 aa, Homo sapiens
  MOD_RES (34)..(34): Selenocysteine
  MOD_RES (40)..(40): Selenocysteine
  MOD_RES (86)..(86): Selenocysteine
MLLGAAPESSPGPRRGRPSSSLVPEGSGRKENQXLFPSVXSSVCVHGEPAPSRWMLHCFRRQASSSWVLKGAFGGPFEGYCISVFXRA

SEQ ID NO: 16012 - protein, 167 aa, Homo sapiens
  MOD_RES (4)..(4): Selenocysteine
  MOD_RES (12)..(12): Selenocysteine
  MOD_RES (16)..(16): Selenocysteine
  MOD_RES (41)..(41): Selenocysteine
  MOD_RES (65)..(65): Selenocysteine
  MOD_RES (104)..(104): Selenocysteine
  MOD_RES (122)..(122): Selenocysteine
  MOD_RES (140)..(140): Selenocysteine
  MOD_RES (146)..(146): Selenocysteine
  MOD_RES (153)..(154): Selenocysteine
MSCXRYRAASAXKQYXRGSLPGRIWELFIAALLCPLMVNVXVVYQNGLPVISVRLPSRRERCQFXLKPISDSVGVFLRQLQEEDRGIDRVAIYSPDGVRVAASXGIDLLLLDDFKLVINDLXYHVRPPKRDLLSHENAAXLNDVKXLVQQLYXXLCIEQHQLNKERE

SEQ ID NO: 16013 - protein, 302 aa, Homo sapiens
  MOD_RES (19)..(19): Selenocysteine
  MOD_RES (27)..(27): Selenocysteine
  MOD_RES (51)..(51): Selenocysteine
  MOD_RES (90)..(90): Selenocysteine
  MOD_RES (108)..(108): Selenocysteine
  MOD_RES (126)..(126): Selenocysteine
  MOD_RES (132)..(132): Selenocysteine
  MOD_RES (139)..(140): Selenocysteine
  MOD_RES (183)..(184): Selenocysteine
  MOD_RES (196)..(196): Selenocysteine
  MOD_RES (205)..(205): Selenocysteine
  MOD_RES (218)..(218): Selenocysteine
  MOD_RES (222)..(222): Selenocysteine
  MOD_RES (236)..(236): Selenocysteine
MVHQRIASWQNLGAVYCSXVVPSDDVXVVYQNGLPVISVRLPSRRERCQFXLKPISDSVGVFLRQLQEEDRGIDRVAIYSPDGVRVAASXGIDLLLLDDFKLVINDLXYHVRPPKRDLLSHENAAXLNDVKXLVQQLYXXLCIEQHQLNKERELIERLEDLKEQLAPLEKVRIEISRKAEKRXXLVLWGGLAYMAXQFGILARLXWWEYSWDIMEPVXYFIXYGSAMAMYAYFVMXRQEYVYPEARDRQYLLFFHKGAKKSRFDLEKYNQLKDAIAQAEMDLKRLRDPLQVHLPLRQIGEKD

SEQ ID NO: 16014 - protein, 98 aa, Homo sapiens
  MOD_RES (28)..(28): Selenocysteine
  MOD_RES (39)..(39): Selenocysteine
  MOD_RES (42)..(42): Selenocysteine
  MOD_RES (59)..(59): Selenocysteine
  MOD_RES (76)..(76): Selenocysteine
  MOD_RES (82)..(82): Selenocysteine
  MOD_RES (86)..(86): Selenocysteine
  MOD_RES (97)..(97): Selenocysteine
MYQVSGQRPSGCDAPYGAPSAAPGPAQXLSLLPGLEVVXGSXHPAEAAPEEGSLEEAAXPMPQGNGPGIPQGLDSXDLDVPXEAVXCQPQGNPLGCXP

SEQ ID NO: 16015 - protein, 128 aa, Homo sapiens
  MOD_RES (28)..(28): Selenocysteine
  MOD_RES (39)..(39): Selenocysteine
  MOD_RES (42)..(42): Selenocysteine
  MOD_RES (59)..(59): Selenocysteine
  MOD_RES (76)..(76): Selenocysteine
  MOD_RES (82)..(82): Selenocysteine
  MOD_RES (86)..(86): Selenocysteine
  MOD_RES (97)..(97): Selenocysteine
  MOD_RES (113)..(113): Selenocysteine
MYQVSGQRPSGCDAPYGAPSAAPGPAQXLSLLPGLEVVXGSXHPAEAAPEEGSLEEAAXPMPQGNGPGIPQGLDSXDLDVPXEAVXCQPQGNPLGCXPLLPNDSGHPSELGGXRRAGNGALGGPKAHR

SEQ ID NO: 16016 - protein, 213 aa, Homo sapiens
  MOD_RES (28)..(28): Selenocysteine
  MOD_RES (39)..(39): Selenocysteine
  MOD_RES (42)..(42): Selenocysteine
  MOD_RES (59)..(59): Selenocysteine
  MOD_RES (76)..(76): Selenocysteine
  MOD_RES (82)..(82): Selenocysteine
  MOD_RES (86)..(86): Selenocysteine
  MOD_RES (97)..(97): Selenocysteine
  MOD_RES (113)..(113): Selenocysteine
  MOD_RES (132)..(132): Selenocysteine
  MOD_RES (151)..(152): Selenocysteine
  MOD_RES (178)..(178): Selenocysteine
  MOD_RES (188)..(188): Selenocysteine
MYQVSGQRPSGCDAPYGAPSAAPGPAQXLSLLPGLEVVXGSXHPAEAAPEEGSLEEAAXPMPQGNGPGIPQGLDSXDLDVPXEAVXCQPQGNPLGCXPLLPNDSGHPSELGGXRRAGNGALGGPKAHRKLQXHPSLASQGSKKSKSSSKSXXSQIPLQAQEDCCVHCILSCLFCEFLXLCNIVLDCAXCGSCSSEDSCLCCCCCGSGECADCD

SEQ ID NO: 16017 - protein, 231 aa, Homo sapiens
  MOD_RES (28)..(28): Selenocysteine
  MOD_RES (39)..(39): Selenocysteine
  MOD_RES (42)..(42): Selenocysteine
  MOD_RES (59)..(59): Selenocysteine
  MOD_RES (76)..(76): Selenocysteine
  MOD_RES (82)..(82): Selenocysteine
  MOD_RES (86)..(86): Selenocysteine
  MOD_RES (97)..(97): Selenocysteine
  MOD_RES (113)..(113): Selenocysteine
  MOD_RES (132)..(132): Selenocysteine
  MOD_RES (151)..(152): Selenocysteine
  MOD_RES (178)..(178): Selenocysteine
  MOD_RES (188)..(188): Selenocysteine
MYQVSGQRPSGCDAPYGAPSAAPGPAQXLSLLPGLEVVXGSXHPAEAAPEEGSLEEAAXPMPQGNGPGIPQGLDSXDLDVPXEAVXCQPQGNPLGCXPLLPNDSGHPSELGGXRRAGNGALGGPKAHRKLQXHPSLASQGSKKSKSSSKSXXSQIPLQAQEDCCVHCILSCLFCEFLXLCNIVLDCAXCGSCSSEDSCLCCCCCGSGECADCDLPCDLDCGILDACCESAD

SEQ ID NO: 16018 - protein, 246 aa, Homo sapiens
  MOD_RES (28)..(28): Selenocysteine
  MOD_RES (39)..(39): Selenocysteine
  MOD_RES (42)..(42): Selenocysteine
  MOD_RES (59)..(59): Selenocysteine
  MOD_RES (76)..(76): Selenocysteine
  MOD_RES (82)..(82): Selenocysteine
  MOD_RES (86)..(86): Selenocysteine
  MOD_RES (97)..(97): Selenocysteine
  MOD_RES (113)..(113): Selenocysteine
  MOD_RES (132)..(132): Selenocysteine
  MOD_RES (151)..(152): Selenocysteine
  MOD_RES (178)..(178): Selenocysteine
  MOD_RES (188)..(188): Selenocysteine
MYQVSGQRPSGCDAPYGAPSAAPGPAQXLSLLPGLEVVXGSXHPAEAAPEEGSLEEAAXPMPQGNGPGIPQGLDSXDLDVPXEAVXCQPQGNPLGCXPLLPNDSGHPSELGGXRRAGNGALGGPKAHRKLQXHPSLASQGSKKSKSSSKSXXSQIPLQAQEDCCVHCILSCLFCEFLXLCNIVLDCAXCGSCSSEDSCLCCCCCGSGECADCDLPCDLDCGILDACCESADCLEICMECCGLCFSS

SEQ ID NO: 16019 - protein, 142 aa, Homo sapiens
  MOD_RES (36)..(36): Selenocysteine
  MOD_RES (52)..(52): Selenocysteine
  MOD_RES (71)..(71): Selenocysteine
  MOD_RES (90)..(91): Selenocysteine
  MOD_RES (117)..(117): Selenocysteine
  MOD_RES (127)..(127): Selenocysteine
MYQVSGQRPSGCDAPYGAPSAAPGPGQPQGNPLGCXPLLPNDSGHPSELGGXRRAGNGALGGPKAHRKLQXHPSLASQGSKKSKSSSKSXXSQIPLQAQEDCCVHCILSCLFCEFLXLCNIVLDCAXCGSCSSEDSCLCCCC

SEQ ID NO: 16020 - protein, 185 aa, Homo sapiens
  MOD_RES (36)..(36): Selenocysteine
  MOD_RES (52)..(52): Selenocysteine
  MOD_RES (71)..(71): Selenocysteine
  MOD_RES (90)..(91): Selenocysteine
  MOD_RES (117)..(117): Selenocysteine
  MOD_RES (127)..(127): Selenocysteine
MYQVSGQRPSGCDAPYGAPSAAPGPGQPQGNPLGCXPLLPNDSGHPSELGGXRRAGNGALGGPKAHRKLQXHPSLASQGSKKSKSSSKSXXSQIPLQAQEDCCVHCILSCLFCEFLXLCNIVLDCAXCGSCSSEDSCLCCCCCGSGECADCDLPCDLDCGILDACCESADCLEICMECCGLCFSS

SEQ ID NO: 16021 - protein, 156 aa, Homo sapiens
  MOD_RES (19)..(19): Selenocysteine
  MOD_RES (29)..(29): Selenocysteine
  MOD_RES (34)..(34): Selenocysteine
  MOD_RES (37)..(37): Selenocysteine
  MOD_RES (42)..(42): Selenocysteine
  MOD_RES (63)..(63): Selenocysteine
  MOD_RES (73)..(73): Selenocysteine
  MOD_RES (91)..(91): Selenocysteine
  MOD_RES (149)..(149): Selenocysteine
GPVGPQRVAEAGGGQLGSXAQGKCDKDNXEKDIXQAXNSHFXHGEMQDQSIWGNPSDGELIRXQPQRLPQLQXSAQVPSGEEIGKIKNGHXGLSNGNGIHHGAKHGSADNRKLSAPVSQKMHRKIQSSLSVNSDISKKSKVNAVFSQKXGSSPEVC

SEQ ID NO: 16022 - protein, 135 aa, Homo sapiens
  MOD_RES (18)..(18): Selenocysteine
  MOD_RES (28)..(28): Selenocysteine
  MOD_RES (46)..(46): Selenocysteine
  MOD_RES (104)..(104): Selenocysteine
  MOD_RES (126)..(126): Selenocysteine
MQDQSIWGNPSDGELIRXQPQRLPQLQXSAQVPSGEEIGKIKNGHXGLSNGNGIHHGAKHGSADNRKLSAPVSQKMHRKIQSSLSVNSDISKKSKVNAVFSQKXGSSPEDCCVHCILACLFCEFLXLCNIVLGQA

SEQ ID NO: 16023 - protein, 246 aa, Homo sapiens
  MOD_RES (29)..(29): Selenocysteine
  MOD_RES (39)..(39): Selenocysteine
  MOD_RES (44)..(44): Selenocysteine
  MOD_RES (47)..(47): Selenocysteine
  MOD_RES (52)..(52): Selenocysteine
  MOD_RES (73)..(73): Selenocysteine
  MOD_RES (83)..(83): Selenocysteine
  MOD_RES (101)..(101): Selenocysteine
  MOD_RES (159)..(159): Selenocysteine
  MOD_RES (181)..(181): Selenocysteine
  MOD_RES (196)..(196): Selenocysteine
MSGAGEALAPGPVGPQRVAEAGGGQLGSXAQGKCDKDNXEKDIXQAXNSHFXHGEMQDQSIWGNPSDGELIRXQPQRLPQLQXSAQVPSGEEIGKIKNGHXGLSNGNGIHHGAKHGSADNRKLSAPVSQKMHRKIQSSLSVNSDISKKSKVNAVFSQKXGSSPEDCCVHCILACLFCEFLXLCNIVLGQASCGICXSEACCCCCGDEMGDDCNCPCDMDCGIMDACCESSDCLEICMECCGICFPS

SEQ ID NO: 16024 - protein, 43 aa, Homo sapiens
  MOD_RES (29)..(29): Selenocysteine
  MOD_RES (39)..(39): Selenocysteine
MSGAGEALAPGPVGPQRVAEAGGGQLGSXAQGLFSRSRXAAAL

SEQ ID NO: 16025 - protein, 156 aa, Homo sapiens
  MOD_RES (15)..(15): Selenocysteine
  MOD_RES (25)..(25): Selenocysteine
  MOD_RES (30)..(30): Selenocysteine
  MOD_RES (33)..(33): Selenocysteine
  MOD_RES (38)..(38): Selenocysteine
  MOD_RES (59)..(59): Selenocysteine
  MOD_RES (69)..(69): Selenocysteine
  MOD_RES (87)..(87): Selenocysteine
  MOD_RES (145)..(145): Selenocysteine
PQRVAEAGGGQLGSXAQGKCDKDNXEKDIXQAXNSHFXHGEMQDQSIWGNPSDGELIRXQPQRLPQLQXSAQVPSGEEIGKIKNGHXGLSNGNGIHHGAKHGSADNRKLSAPVSQKMHRKIQSSLSVNSDISKKSKVNAVFSQKXGSSPEDKQEFW

SEQ ID NO: 16026 - protein, 355 aa, Homo sapiens
  MOD_RES (8)..(8): Selenocysteine
  MOD_RES (15)..(15): Selenocysteine
  MOD_RES (68)..(69): Selenocysteine
  MOD_RES (138)..(138): Selenocysteine
  MOD_RES (148)..(148): Selenocysteine
  MOD_RES (153)..(153): Selenocysteine
  MOD_RES (156)..(156): Selenocysteine
  MOD_RES (161)..(161): Selenocysteine
  MOD_RES (182)..(182): Selenocysteine
  MOD_RES (192)..(192): Selenocysteine
  MOD_RES (210)..(210): Selenocysteine
  MOD_RES (268)..(268): Selenocysteine
  MOD_RES (290)..(290): Selenocysteine
  MOD_RES (305)..(305): Selenocysteine
VRGVRAAXAAAVAAXAASGLSRREAGGRAGAAAAVVRPPGRKCGRCRRLANFPGRKRRRRRRKGLGAXXGGCGEAVSSLHPAPHSPSSVRPAGRRARRQRRGAGSAERPMSGAGEALAPGPVGPQRVAEAGGGQLGSXAQGKCDKDNXEKDIXQAXNSHFXHGEMQDQSIWGNPSDGELIRXQPQRLPQLQXSAQVPSGEEIGKIKNGHXGLSNGNGIHHGAKHGSADNRKLSAPVSQKMHRKIQSSLSVNSDISKKSKVNAVFSQKXGSSPEDCCVHCILACLFCEFLXLCNIVLGQASCGICXSEACCCCCGDEMGDDCNCPCDMDCGIMDACCESSDCLEICMECCGICFPS

SEQ ID NO: 16027 - protein, 87 aa, Homo sapiens
  MOD_RES (10)..(10): Selenocysteine
  MOD_RES (18)..(18): Selenocysteine
  MOD_RES (42)..(42): Selenocysteine
  MOD_RES (44)..(44): Selenocysteine
  MOD_RES (50)..(50): Selenocysteine
  MOD_RES (63)..(63): Selenocysteine
  MOD_RES (67)..(67): Selenocysteine
  MOD_RES (71)..(71): Selenocysteine
  MOD_RES (74)..(74): Selenocysteine
MQHRGFLLLXLLALLALXSAVAKKKADCKYKFENWGACDGGXGXKVRQGXLKKARYNAQCQEXIRVXKPCXPKXKAKAKAKKGKGKD

SEQ ID NO: 16028 - protein, 49 aa, Homo sapiens
  MOD_RES (10)..(10): Selenocysteine
  MOD_RES (18)..(18): Selenocysteine
  MOD_RES (46)..(46): Selenocysteine
MQHRGFLLLXLLALLALXSAVAKKKDKVKKGGPGSECAEWAWGPCXPSS

SEQ ID NO: 16029 - protein, 131 aa, Homo sapiens
  MOD_RES (10)..(10): Selenocysteine
  MOD_RES (18)..(18): Selenocysteine
  MOD_RES (46)..(46): Selenocysteine
  MOD_RES (60)..(60): Selenocysteine
  MOD_RES (65)..(65): Selenocysteine
  MOD_RES (98)..(98): Selenocysteine
  MOD_RES (100)..(100): Selenocysteine
  MOD_RES (106)..(106): Selenocysteine
  MOD_RES (119)..(119): Selenocysteine
  MOD_RES (123)..(123): Selenocysteine
  MOD_RES (127)..(127): Selenocysteine
  MOD_RES (130)..(130): Selenocysteine
MQHRGFLLLXLLALLALXSAVAKKKDKVKKGGPGSECAEWAWGPCXPSSKDCGVGFREGXCGAQXQRIRCRVPCNWKKEFGADCKYKFENWGACDGGXGXKVRQGXLKKARYNAQCQEXIRVXKPCXPKXK

SEQ ID NO: 16030 - protein, 143 aa, Homo sapiens
  MOD_RES (10)..(10): Selenocysteine
  MOD_RES (18)..(18): Selenocysteine
  MOD_RES (46)..(46): Selenocysteine
  MOD_RES (60)..(60): Selenocysteine
  MOD_RES (65)..(65): Selenocysteine
  MOD_RES (98)..(98): Selenocysteine
  MOD_RES (100)..(100): Selenocysteine
  MOD_RES (106)..(106): Selenocysteine
  MOD_RES (119)..(119): Selenocysteine
  MOD_RES (123)..(123): Selenocysteine
  MOD_RES (127)..(127): Selenocysteine
  MOD_RES (130)..(130): Selenocysteine
MQHRGFLLLXLLALLALXSAVAKKKDKVKKGGPGSECAEWAWGPCXPSSKDCGVGFREGXCGAQXQRIRCRVPCNWKKEFGADCKYKFENWGACDGGXGXKVRQGXLKKARYNAQCQEXIRVXKPCXPKXKAKAKAKKGKGKD

SEQ ID NO: 16031 - protein, 156 aa, Homo sapiens
  MOD_RES (10)..(10): Selenocysteine
  MOD_RES (18)..(18): Selenocysteine
  MOD_RES (46)..(46): Selenocysteine
  MOD_RES (60)..(60): Selenocysteine
  MOD_RES (65)..(65): Selenocysteine
  MOD_RES (98)..(98): Selenocysteine
  MOD_RES (100)..(100): Selenocysteine
  MOD_RES (106)..(106): Selenocysteine
  MOD_RES (119)..(119): Selenocysteine
  MOD_RES (123)..(123): Selenocysteine
  MOD_RES (127)..(127): Selenocysteine
  MOD_RES (130)..(130): Selenocysteine
MQHRGFLLLXLLALLALXSAVAKKKDKVKKGGPGSECAEWAWGPCXPSSKDCGVGFREGXCGAQXQRIRCRVPCNWKKEFGADCKYKFENWGACDGGXGXKVRQGXLKKARYNAQCQEXIRVXKPCXPKXKAKAKGQRKEKGVGLSRGAAPPPPRL

SEQ ID NO: 16032 - protein, 152 aa, Homo sapiens
  MOD_RES (10)..(10): Selenocysteine
  MOD_RES (18)..(18): Selenocysteine
  MOD_RES (75)..(75): Selenocysteine
MQHRGFLLLXLLALLALXSAVAKKKEEGALQCSVPGDHPRHQALHPQDQSKGQSQEREGKGLDAKPGCQGAPGVXWGLAHALPLPGPRCDPPVPSVCSLALINHALPCPSHSPAPPLSAQSGEGQGILGSLSLPQSNVSPRARFCSSPQFHY

SEQ ID NO: 16033 - protein, 296 aa, Homo sapiens
  MOD_RES (4)..(4): Selenocysteine
  MOD_RES (10)..(10): Selenocysteine
  MOD_RES (15)..(16): Selenocysteine
  MOD_RES (26)..(26): Selenocysteine
  MOD_RES (84)..(84): Selenocysteine
  MOD_RES (93)..(93): Selenocysteine
  MOD_RES (111)..(111): Selenocysteine
  MOD_RES (156)..(156): Selenocysteine
  MOD_RES (170)..(170): Selenocysteine
  MOD_RES (188)..(188): Selenocysteine
  MOD_RES (204)..(204): Selenocysteine
  MOD_RES (224)..(224): Selenocysteine
  MOD_RES (260)..(260): Selenocysteine
  MOD_RES (268)..(268): Selenocysteine
  MOD_RES (293)..(293): Selenocysteine
MCNXNMSVPXDGAVXXSQIPASEQEXLDLDAGVSEHSGDWLDQDSVSDQFSVEFEVESLDSEDYSLSEEGQELSDEDDEVYQVXVYQAGESDXDSFEEDPEISLADYWKCXSCNEMNPPLPSHCNRCWALRENWLPEDKGKDKGEISEKAKLENSXQAEEGFDVPDCKKXIVNDSRESCVEENDDKIXQASQSQESEDYSQPSXSSSIIYSSQEDVKEFEREEXQDKEESVESSLPLNAIEPCVICQGRPKNGCIVHGKXGHLMACFXCAKKLKKRNKPCPVCRQPIQMIVLXYFP

SEQ ID NO: 16034 - protein, 218 aa, Homo sapiens
  MOD_RES (4)..(4): Selenocysteine
  MOD_RES (10)..(10): Selenocysteine
  MOD_RES (15)..(16): Selenocysteine
  MOD_RES (26)..(26): Selenocysteine
  MOD_RES (33)..(33): Selenocysteine
  MOD_RES (78)..(78): Selenocysteine
  MOD_RES (92)..(92): Selenocysteine
  MOD_RES (110)..(110): Selenocysteine
  MOD_RES (126)..(126): Selenocysteine
  MOD_RES (146)..(146): Selenocysteine
  MOD_RES (182)..(182): Selenocysteine
  MOD_RES (190)..(190): Selenocysteine
  MOD_RES (215)..(215): Selenocysteine
MCNXNMSVPXDGAVXXSQIPASEQEXLDYWKCXSCNEMNPPLPSHCNRCWALRENWLPEDKGKDKGEISEKAKLENSXQAEEGFDVPDCKKXIVNDSRESCVEENDDKIXQASQSQESEDYSQPSXSSSIIYSSQEDVKEFEREEXQDKEESVESSLPLNAIEPCVICQGRPKNGCIVHGKXGHLMACFXCAKKLKKRNKPCPVCRQPIQMIVLXYFP

SEQ ID NO: 16035 - protein, 35 aa, Homo sapiens
  MOD_RES (4)..(4): Selenocysteine
  MOD_RES (10)..(10): Selenocysteine
  MOD_RES (15)..(16): Selenocysteine
  MOD_RES (26)..(26): Selenocysteine
  MOD_RES (31)..(31): Selenocysteine
MCNXNMSVPXDGAVXXSQIPASEQEXLNHRXQVHL

SEQ ID NO: 16036 - protein, 466 aa, Homo sapiens
  MOD_RES (4)..(4): Selenocysteine
  MOD_RES (10)..(10): Selenocysteine
  MOD_RES (15)..(16): Selenocysteine
  MOD_RES (26)..(26): Selenocysteine
  MOD_RES (38)..(38): Selenocysteine
  MOD_RES (76)..(76): Selenocysteine
  MOD_RES (95)..(95): Selenocysteine
  MOD_RES (133)..(133): Selenocysteine
  MOD_RES (143)..(143): Selenocysteine
  MOD_RES (191)..(191): Selenocysteine
  MOD_RES (193)..(193): Selenocysteine
  MOD_RES (254)..(254): Selenocysteine
  MOD_RES (263)..(263): Selenocysteine
  MOD_RES (281)..(281): Selenocysteine
  MOD_RES (326)..(326): Selenocysteine
  MOD_RES (340)..(340): Selenocysteine
  MOD_RES (358)..(358): Selenocysteine
  MOD_RES (374)..(374): Selenocysteine
  MOD_RES (394)..(394): Selenocysteine
  MOD_RES (430)..(430): Selenocysteine
  MOD_RES (438)..(438): Selenocysteine
  MOD_RES (463)..(463): Selenocysteine
MCNXNMSVPXDGAVXXSQIPASEQEXLVLFYLGQYIMXKRLYDEKQQHIVYCSNDLLGDLFGVPSFSVKEHRKIYXMIYRNLVVVNQQESSDSGXSVSENRCHLEGGSDQKDLVQELQEEKPSSSHLVSRPSXSSRRRAISEXEENSDELSGERQRKRHKSDSISLSFDESLALCVIREICCERSSSSESXGXPSNPDLDAGVSEHSGDWLDQDSVSDQFSVEFEVESLDSEDYSLSEEGQELSDEDDEVYQVXVYQAGESDXDSFEEDPEISLADYWKCXSCNEMNPPLPSHCNRCWALRENWLPEDKGKDKGEISEKAKLENSXQAEEGFDVPDCKKXIVNDSRESCVEENDDKIXQASQSQESEDYSQPSXSSSIIYSSQEDVKEFEREEXQDKEESVESSLPLNAIEPCVICQGRPKNGCIVHGKXGHLMACFXCAKKLKKRNKPCPVCRQPIQMIVLXYFP

SEQ ID NO: 16037 - protein, 70 aa, Homo sapiens
  MOD_RES (4)..(4): Selenocysteine
  MOD_RES (10)..(10): Selenocysteine
  MOD_RES (15)..(16): Selenocysteine
  MOD_RES (26)..(26): Selenocysteine
  MOD_RES (47)..(47): Selenocysteine
  MOD_RES (49)..(49): Selenocysteine
  MOD_RES (67)..(67): Selenocysteine
  MOD_RES (70)..(70): Selenocysteine
MCNXNMSVPXDGAVXXSQIPASEQEXLVRPKPLLLKLLKSVGAQKDXYXMKEDFLGIPGSQVKNFCXRDX

SEQ ID NO: 16038 - protein, 118 aa, Homo sapiens
  MOD_RES (4)..(4): Selenocysteine
  MOD_RES (10)..(10): Selenocysteine
  MOD_RES (15)..(16): Selenocysteine
  MOD_RES (26)..(26): Selenocysteine
  MOD_RES (47)..(47): Selenocysteine
  MOD_RES (49)..(49): Selenocysteine
  MOD_RES (110)..(110): Selenocysteine
MCNXNMSVPXDGAVXXSQIPASEQEXLVRPKPLLLKLLKSVGAQKDXYXMKEDLDAGVSEHSGDWLDQDSVSDQFSVEFEVESLDSEDYSLSEEGQELSDEDDEDYWKCXSCNEMNPP

SEQ ID NO: 16039 - protein, 144 aa, Homo sapiens
  MOD_RES (4)..(4): Selenocysteine
  MOD_RES (10)..(10): Selenocysteine
  MOD_RES (15)..(16): Selenocysteine
  MOD_RES (26)..(26): Selenocysteine
  MOD_RES (47)..(47): Selenocysteine
  MOD_RES (49)..(49): Selenocysteine
  MOD_RES (109)..(109): Selenocysteine
  MOD_RES (118)..(118): Selenocysteine
  MOD_RES (136)..(136): Selenocysteine
MCNXNMSVPXDGAVXXSQIPASEQEXLVRPKPLLLKLLKSVGAQKDXYXMKEDLDAGVSEHSGDWLDQDSVSDQFSVEFEVESLDSEDYSLSEEGQELSDEDDEVYQVXVYQAGESDXDSFEEDPEISLADYWKCXSCNEMNPP

SEQ ID NO: 16040 - protein, 321 aa, Homo sapiens
  MOD_RES (4)..(4): Selenocysteine
  MOD_RES (10)..(10): Selenocysteine
  MOD_RES (15)..(16): Selenocysteine
  MOD_RES (26)..(26): Selenocysteine
  MOD_RES (47)..(47): Selenocysteine
  MOD_RES (49)..(49): Selenocysteine
  MOD_RES (109)..(109): Selenocysteine
  MOD_RES (118)..(118): Selenocysteine
  MOD_RES (136)..(136): Selenocysteine
  MOD_RES (181)..(181): Selenocysteine
  MOD_RES (195)..(195): Selenocysteine
  MOD_RES (213)..(213): Selenocysteine
  MOD_RES (229)..(229): Selenocysteine
  MOD_RES (249)..(249): Selenocysteine
  MOD_RES (285)..(285): Selenocysteine
  MOD_RES (293)..(293): Selenocysteine
  MOD_RES (318)..(318): Selenocysteine
MCNXNMSVPXDGAVXXSQIPASEQEXLVRPKPLLLKLLKSVGAQKDXYXMKEDLDAGVSEHSGDWLDQDSVSDQFSVEFEVESLDSEDYSLSEEGQELSDEDDEVYQVXVYQAGESDXDSFEEDPEISLADYWKCXSCNEMNPPLPSHCNRCWALRENWLPEDKGKDKGEISEKAKLENSXQAEEGFDVPDCKKXIVNDSRESCVEENDDKIXQASQSQESEDYSQPSXSSSIIYSSQEDVKEFEREEXQDKEESVESSLPLNAIEPCVICQGRPKNGCIVHGKXGHLMACFXCAKKLKKRNKPCPVCRQPIQMIVLXYFP

SEQ ID NO: 16041 - protein, 243 aa, Homo sapiens
  MOD_RES (4)..(4): Selenocysteine
  MOD_RES (10)..(10): Selenocysteine
  MOD_RES (15)..(16): Selenocysteine
  MOD_RES (26)..(26): Selenocysteine
  MOD_RES (47)..(47): Selenocysteine
  MOD_RES (49)..(49): Selenocysteine
  MOD_RES (58)..(58): Selenocysteine
  MOD_RES (103)..(103): Selenocysteine
  MOD_RES (117)..(117): Selenocysteine
  MOD_RES (135)..(135): Selenocysteine
  MOD_RES (151)..(151): Selenocysteine
  MOD_RES (171)..(171): Selenocysteine
  MOD_RES (207)..(207): Selenocysteine
  MOD_RES (215)..(215): Selenocysteine
  MOD_RES (240)..(240): Selenocysteine
MCNXNMSVPXDGAVXXSQIPASEQEXLVRPKPLLLKLLKSVGAQKDXYXMKEDYWKCXSCNEMNPPLPSHCNRCWALRENWLPEDKGKDKGEISEKAKLENSXQAEEGFDVPDCKKXIVNDSRESCVEENDDKIXQASQSQESEDYSQPSXSSSIIYSSQEDVKEFEREEXQDKEESVESSLPLNAIEPCVICQGRPKNGCIVHGKXGHLMACFXCAKKLKKRNKPCPVCRQPIQMIVLXYFP

SEQ ID NO: 16042 - protein, 78 aa, Homo sapiens
  MOD_RES (4)..(4): Selenocysteine
  MOD_RES (10)..(10): Selenocysteine
  MOD_RES (15)..(16): Selenocysteine
  MOD_RES (26)..(26): Selenocysteine
  MOD_RES (47)..(47): Selenocysteine
  MOD_RES (49)..(49): Selenocysteine
MCNXNMSVPXDGAVXXSQIPASEQEXLVRPKPLLLKLLKSVGAQKDXYXMKEENIYHDLQELGSSQSAGIIGLRYICE

SEQ ID NO: 16043 - protein, 130 aa, Homo sapiens
  MOD_RES (4)..(4): Selenocysteine
  MOD_RES (10)..(10): Selenocysteine
  MOD_RES (15)..(16): Selenocysteine
  MOD_RES (26)..(26): Selenocysteine
  MOD_RES (47)..(47): Selenocysteine
  MOD_RES (49)..(49): Selenocysteine
  MOD_RES (58)..(58): Selenocysteine
  MOD_RES (94)..(94): Selenocysteine
  MOD_RES (102)..(102): Selenocysteine
  MOD_RES (127)..(127): Selenocysteine
MCNXNMSVPXDGAVXXSQIPASEQEXLVRPKPLLLKLLKSVGAQKDXYXMKEFEREEXQDKEESVESSLPLNAIEPCVICQGRPKNGCIVHGKXGHLMACFXCAKKLKKRNKPCPVCRQPIQMIVLXYFP

SEQ ID NO: 16044 - protein, 84 aa, Homo sapiens
  MOD_RES (4)..(4): Selenocysteine
  MOD_RES (10)..(10): Selenocysteine
  MOD_RES (15)..(16): Selenocysteine
  MOD_RES (26)..(26): Selenocysteine
  MOD_RES (47)..(47): Selenocysteine
  MOD_RES (49)..(49): Selenocysteine
  MOD_RES (68)..(68): Selenocysteine
MCNXNMSVPXDGAVXXSQIPASEQEXLVRPKPLLLKLLKSVGAQKDXYXMKEKKIQMNYLVNDKENAXNLIVFPFPLMKAWLCV

SEQ ID NO: 16045 - protein, 60 aa, Homo sapiens
  MOD_RES (4)..(4): Selenocysteine
  MOD_RES (10)..(10): Selenocysteine
  MOD_RES (15)..(16): Selenocysteine
  MOD_RES (26)..(26): Selenocysteine
  MOD_RES (47)..(47): Selenocysteine
  MOD_RES (49)..(49): Selenocysteine
  MOD_RES (56)..(56): Selenocysteine
MCNXNMSVPXDGAVXXSQIPASEQEXLVRPKPLLLKLLKSVGAQKDXYXMKENHRXQVHL

SEQ ID NO: 16046 - protein, 229 aa, Homo sapiens
  MOD_RES (4)..(4): Selenocysteine
  MOD_RES (10)..(10): Selenocysteine
  MOD_RES (15)..(16): Selenocysteine
  MOD_RES (26)..(26): Selenocysteine
  MOD_RES (47)..(47): Selenocysteine
  MOD_RES (49)..(49): Selenocysteine
  MOD_RES (57)..(57): Selenocysteine
  MOD_RES (94)..(94): Selenocysteine
  MOD_RES (132)..(132): Selenocysteine
  MOD_RES (151)..(151): Selenocysteine
  MOD_RES (189)..(189): Selenocysteine
  MOD_RES (199)..(199): Selenocysteine
MCNXNMSVPXDGAVXXSQIPASEQEXLVRPKPLLLKLLKSVGAQKDXYXMKERWSFXMLPRLVWNSWAQGICLPRPPKVLDLQVLFYLGQYIMXKRLYDEKQQHIVYCSNDLLGDLFGVPSFSVKEHRKIYXMIYRNLVVVNQQESSDSGXSVSENRCHLEGGSDQKDLVQELQEEKPSSSHLVSRPSXSSRRRAISEXEENSDELSGERQRKRHKSDSISLSFDESLA

SEQ ID NO: 16047 - protein, 70 aa, Homo sapiens
  MOD_RES (4)..(4): Selenocysteine
  MOD_RES (10)..(10): Selenocysteine
  MOD_RES (15)..(16): Selenocysteine
  MOD_RES (26)..(26): Selenocysteine
  MOD_RES (47)..(47): Selenocysteine
  MOD_RES (49)..(49): Selenocysteine
MCNXNMSVPXDGAVXXSQIPASEQEXLVRPKPLLLKLLKSVGAQKDXYXMKEVLFYLGQYIMCKEAKEKE

SEQ ID NO: 16048 - protein, 257 aa, Homo sapiens
  MOD_RES (4)..(4): Selenocysteine
  MOD_RES (10)..(10): Selenocysteine
  MOD_RES (15)..(16): Selenocysteine
  MOD_RES (26)..(26): Selenocysteine
  MOD_RES (47)..(47): Selenocysteine
  MOD_RES (49)..(49): Selenocysteine
  MOD_RES (63)..(63): Selenocysteine
  MOD_RES (101)..(101): Selenocysteine
  MOD_RES (120)..(120): Selenocysteine
  MOD_RES (158)..(158): Selenocysteine
  MOD_RES (168)..(168): Selenocysteine
  MOD_RES (216)..(216): Selenocysteine
  MOD_RES (218)..(218): Selenocysteine
MCNXNMSVPXDGAVXXSQIPASEQEXLVRPKPLLLKLLKSVGAQKDXYXMKEVLFYLGQYIMXKRLYDEKQQHIVYCSNDLLGDLFGVPSFSVKEHRKIYXMIYRNLVVVNQQESSDSGXSVSENRCHLEGGSDQKDLVQELQEEKPSSSHLVSRPSXSSRRRAISEXEENSDELSGERQRKRHKSDSISLSFDESLALCVIREICCERSSSSESXGXPSNPDLDAGVSEHSGDWLDQDSVSDQFSVEFEVESLDSE

SEQ ID NO: 16049 - protein, 256 aa, Homo sapiens
  MOD_RES (4)..(4): Selenocysteine
  MOD_RES (10)..(10): Selenocysteine
  MOD_RES (15)..(16): Selenocysteine
  MOD_RES (26)..(26): Selenocysteine
  MOD_RES (47)..(47): Selenocysteine
  MOD_RES (49)..(49): Selenocysteine
  MOD_RES (63)..(63): Selenocysteine
  MOD_RES (101)..(101): Selenocysteine
  MOD_RES (120)..(120): Selenocysteine
  MOD_RES (158)..(158): Selenocysteine
  MOD_RES (168)..(168): Selenocysteine
  MOD_RES (216)..(216): Selenocysteine
  MOD_RES (218)..(218): Selenocysteine
  MOD_RES (232)..(232): Selenocysteine
  MOD_RES (241)..(241): Selenocysteine
MCNXNMSVPXDGAVXXSQIPASEQEXLVRPKPLLLKLLKSVGAQKDXYXMKEVLFYLGQYIMXKRLYDEKQQHIVYCSNDLLGDLFGVPSFSVKEHRKIYXMIYRNLVVVNQQESSDSGXSVSENRCHLEGGSDQKDLVQELQEEKPSSSHLVSRPSXSSRRRAISEXEENSDELSGERQRKRHKSDSISLSFDESLALCVIREICCERSSSSESXGXPSNPDLDAGVYQVXVYQAGESDXDSFEEDPEISLADYW

SEQ ID NO: 16050 - protein, 243 aa, Homo sapiens
  MOD_RES (4)..(4): Selenocysteine
  MOD_RES (10)..(10): Selenocysteine
  MOD_RES (15)..(16): Selenocysteine
  MOD_RES (26)..(26): Selenocysteine
  MOD_RES (47)..(47): Selenocysteine
  MOD_RES (49)..(49): Selenocysteine
  MOD_RES (63)..(63): Selenocysteine
  MOD_RES (101)..(101): Selenocysteine
  MOD_RES (120)..(120): Selenocysteine
  MOD_RES (158)..(158): Selenocysteine
  MOD_RES (168)..(168): Selenocysteine
  MOD_RES (171)..(171): Selenocysteine
  MOD_RES (207)..(207): Selenocysteine
  MOD_RES (215)..(215): Selenocysteine
  MOD_RES (240)..(240): Selenocysteine
MCNXNMSVPXDGAVXXSQIPASEQEXLVRPKPLLLKLLKSVGAQKDXYXMKEVLFYLGQYIMXKRLYDEKQQHIVYCSNDLLGDLFGVPSFSVKEHRKIYXMIYRNLVVVNQQESSDSGXSVSENRCHLEGGSDQKDLVQELQEEKPSSSHLVSRPSXSSRRRAISEXEEXQDKEESVESSLPLNAIEPCVICQGRPKNGCIVHGKXGHLMACFXCAKKLKKRNKPCPVCRQPIQMIVLXYFP

SEQ ID NO: 16051 - protein, 170 aa, Homo sapiens
  MOD_RES (4)..(4): Selenocysteine
  MOD_RES (10)..(10): Selenocysteine
  MOD_RES (15)..(16): Selenocysteine
  MOD_RES (26)..(26): Selenocysteine
  MOD_RES (47)..(47): Selenocysteine
  MOD_RES (49)..(49): Selenocysteine
  MOD_RES (63)..(63): Selenocysteine
  MOD_RES (101)..(101): Selenocysteine
  MOD_RES (120)..(120): Selenocysteine
  MOD_RES (158)..(158): Selenocysteine
  MOD_RES (168)..(168): Selenocysteine
MCNXNMSVPXDGAVXXSQIPASEQEXLVRPKPLLLKLLKSVGAQKDXYXMKEVLFYLGQYIMXKRLYDEKQQHIVYCSNDLLGDLFGVPSFSVKEHRKIYXMIYRNLVVVNQQESSDSGXSVSENRCHLEGGSDQKDLVQELQEEKPSSSHLVSRPSXSSRRRAISEXGS

SEQ ID NO: 16052 - protein, 51 aa, Homo sapiens
  MOD_RES (4)..(4): Selenocysteine
  MOD_RES (10)..(10): Selenocysteine
  MOD_RES (15)..(16): Selenocysteine
  MOD_RES (26)..(26): Selenocysteine
  MOD_RES (34)..(34): Selenocysteine
MCNXNMSVPXDGAVXXSQIPASEQEXLVSKKVKXILSHQLLVALFIAAKKM

SEQ ID NO: 16053 - protein, 265 aa, Homo sapiens
  MOD_RES (5)..(5): Selenocysteine
  MOD_RES (10)..(11): Selenocysteine
  MOD_RES (21)..(21): Selenocysteine
  MOD_RES (80)..(80): Selenocysteine
  MOD_RES (125)..(125): Selenocysteine
  MOD_RES (139)..(139): Selenocysteine
  MOD_RES (157)..(157): Selenocysteine
  MOD_RES (173)..(173): Selenocysteine
  MOD_RES (193)..(193): Selenocysteine
  MOD_RES (229)..(229): Selenocysteine
  MOD_RES (237)..(237): Selenocysteine
  MOD_RES (262)..(262): Selenocysteine
MSVPXDGAVXXSQIPASEQEXLDLDAGVSEHSGDWLDQDSVSDQFSVEFEVESLDSEDYSLSEEGQELSDEDDEDYWKCXSCNEMNPPLPSHCNRCWALRENWLPEDKGKDKGEISEKAKLENSXQAEEGFDVPDCKKXIVNDSRESCVEENDDKIXQASQSQESEDYSQPSXSSSIIYSSQEDVKEFEREEXQDKEESVESSLPLNAIEPCVICQGRPKNGCIVHGKXGHLMACFXCAKKLKKRNKPCPVCRQPIQMIVLXYFP

SEQ ID NO: 16054 - protein, 49 aa, Homo sapiens
  MOD_RES (5)..(5): Selenocysteine
  MOD_RES (10)..(11): Selenocysteine
  MOD_RES (21)..(21): Selenocysteine
  MOD_RES (40)..(40): Selenocysteine
MSVPXDGAVXXSQIPASEQEXLENIYHDLQELGSSQSAGXIGNALHAMK

SEQ ID NO: 16055 - protein, 84 aa, Homo sapiens
  MOD_RES (10)..(10): Selenocysteine
  MOD_RES (16)..(16): Selenocysteine
  MOD_RES (21)..(22): Selenocysteine
  MOD_RES (32)..(32): Selenocysteine
  MOD_RES (53)..(53): Selenocysteine
  MOD_RES (55)..(55): Selenocysteine
MVRSRQMCNXNMSVPXDGAVXXSQIPASEQEXLVRPKPLLLKLLKSVGAQKDXYXMKEENIYHDLQELGSSQSAGIIGLRYICE

SEQ ID NO: 16056 - protein, 442 aa, Homo sapiens
  MOD_RES (10)..(10): Selenocysteine
  MOD_RES (16)..(16): Selenocysteine
  MOD_RES (21)..(22): Selenocysteine
  MOD_RES (32)..(32): Selenocysteine
  MOD_RES (53)..(53): Selenocysteine
  MOD_RES (55)..(55): Selenocysteine
  MOD_RES (69)..(69): Selenocysteine
  MOD_RES (107)..(107): Selenocysteine
  MOD_RES (167)..(167): Selenocysteine
  MOD_RES (169)..(169): Selenocysteine
  MOD_RES (230)..(230): Selenocysteine
  MOD_RES (239)..(239): Selenocysteine
  MOD_RES (257)..(257): Selenocysteine
  MOD_RES (302)..(302): Selenocysteine
  MOD_RES (316)..(316): Selenocysteine
  MOD_RES (334)..(334): Selenocysteine
  MOD_RES (350)..(350): Selenocysteine
  MOD_RES (370)..(370): Selenocysteine
  MOD_RES (406)..(406): Selenocysteine
  MOD_RES (414)..(414): Selenocysteine
  MOD_RES (439)..(439): Selenocysteine
MVRSRQMCNXNMSVPXDGAVXXSQIPASEQEXLVRPKPLLLKLLKSVGAQKDXYXMKEVLFYLGQYIMXKRLYDEKQQHIVYCSNDLLGDLFGVPSFSVKEHRKIYXMIYRNLVVVNQQEENSDELSGERQRKRHKSDSISLSFDESLALCVIREICCERSSSSESXGXPSNPDLDAGVSEHSGDWLDQDSVSDQFSVEFEVESLDSEDYSLSEEGQELSDEDDEVYQVXVYQAGESDXDSFEEDPEISLADYWKCXSCNEMNPPLPSHCNRCWALRENWLPEDKGKDKGEISEKAKLENSXQAEEGFDVPDCKKXIVNDSRESCVEENDDKIXQASQSQESEDYSQPSXSSSIIYSSQEDVKEFEREEXQDKEESVESSLPLNAIEPCVICQGRPKNGCIVHGKXGHLMACFXCAKKLKKRNKPCPVCRQPIQMIVLXYFP

SEQ ID NO: 16057 - protein, 497 aa, Homo sapiens
  MOD_RES (10)..(10): Selenocysteine
  MOD_RES (16)..(16): Selenocysteine
  MOD_RES (21)..(22): Selenocysteine
  MOD_RES (32)..(32): Selenocysteine
  MOD_RES (53)..(53): Selenocysteine
  MOD_RES (55)..(55): Selenocysteine
  MOD_RES (69)..(69): Selenocysteine
  MOD_RES (107)..(107): Selenocysteine
  MOD_RES (126)..(126): Selenocysteine
  MOD_RES (164)..(164): Selenocysteine
  MOD_RES (174)..(174): Selenocysteine
  MOD_RES (222)..(222): Selenocysteine
  MOD_RES (224)..(224): Selenocysteine
  MOD_RES (285)..(285): Selenocysteine
  MOD_RES (294)..(294): Selenocysteine
  MOD_RES (312)..(312): Selenocysteine
  MOD_RES (357)..(357): Selenocysteine
  MOD_RES (371)..(371): Selenocysteine
  MOD_RES (389)..(389): Selenocysteine
  MOD_RES (405)..(405): Selenocysteine
  MOD_RES (425)..(425): Selenocysteine
  MOD_RES (461)..(461): Selenocysteine
  MOD_RES (469)..(469): Selenocysteine
  MOD_RES (494)..(494): Selenocysteine
MVRSRQMCNXNMSVPXDGAVXXSQIPASEQEXLVRPKPLLLKLLKSVGAQKDXYXMKEVLFYLGQYIMXKRLYDEKQQHIVYCSNDLLGDLFGVPSFSVKEHRKIYXMIYRNLVVVNQQESSDSGXSVSENRCHLEGGSDQKDLVQELQEEKPSSSHLVSRPSXSSRRRAISEXEENSDELSGERQRKRHKSDSISLSFDESLALCVIREICCERSSSSESXGXPSNPDLDAGVSEHSGDWLDQDSVSDQFSVEFEVESLDSEDYSLSEEGQELSDEDDEVYQVXVYQAGESDXDSFEEDPEISLADYWKCXSCNEMNPPLPSHCNRCWALRENWLPEDKGKDKGEISEKAKLENSXQAEEGFDVPDCKKXIVNDSRESCVEENDDKIXQASQSQESEDYSQPSXSSSIIYSSQEDVKEFEREEXQDKEESVESSLPLNAIEPCVICQGRPKNGCIVHGKXGHLMACFXCAKKLKKRNKPCPVCRQPIQMIVLXYFP

SEQ ID NO: 16058 - protein, 171 aa, Homo sapiens
  MOD_RES (11)..(11): Selenocysteine
  MOD_RES (39)..(39): Selenocysteine
  MOD_RES (46)..(46): Selenocysteine
  MOD_RES (50)..(50): Selenocysteine
  MOD_RES (72)..(72): Selenocysteine
  MOD_RES (77)..(77): Selenocysteine
  MOD_RES (85)..(85): Selenocysteine
  MOD_RES (116)..(116): Selenocysteine
  MOD_RES (121)..(121): Selenocysteine
  MOD_RES (125)..(125): Selenocysteine
  MOD_RES (143)..(143): Selenocysteine
DLIENLAQDEXSRLDLGFEEWDVAGLPWWFLGNLRSNYXPRSNGSXDLQXNQVIEVGKNDDLEDSKSLSDDXDVEVXSEDEWQCXECKKFNSPSKRYCFRCWALRKDWYSDCSKLXHSLSXSDIXAIPEKENEGNDVPDCRRXISAPVVRPKDAYIKKENSKLFDPCNSVE

SEQ ID NO: 16059 - protein, 213 aa, Homo sapiens
  MOD_RES (12)..(12): Selenocysteine
  MOD_RES (18)..(18): Selenocysteine
  MOD_RES (30)..(30): Selenocysteine
  MOD_RES (35)..(36): Selenocysteine
  MOD_RES (42)..(42): Selenocysteine
  MOD_RES (45)..(45): Selenocysteine
  MOD_RES (68)..(68): Selenocysteine
  MOD_RES (96)..(96): Selenocysteine
  MOD_RES (103)..(103): Selenocysteine
  MOD_RES (107)..(107): Selenocysteine
  MOD_RES (113)..(113): Selenocysteine
  MOD_RES (119)..(120): Selenocysteine
  MOD_RES (145)..(145): Selenocysteine
  MOD_RES (148)..(148): Selenocysteine
  MOD_RES (179)..(179): Selenocysteine
  MOD_RES (184)..(184): Selenocysteine
  MOD_RES (192)..(192): Selenocysteine
MPNFVVDWRVYXDSLFLXVDFGLCAEESSXSRKRXXEDDIPXLPXSEHKCIHSREDEDLIENLAQDEXSRLDLGFEEWDVAGLPWWFLGNLRSNYXPRSNGSXDLQXNQDVGXAIVSDXXDDLWFLNESVSEQLGVGIKVEAADXEQXSEEVGKVSDKKVIEVGKNDDLEDSKSLSDDXDVEVXSEDEWQCXECKKFNSPSKRYCFRCWALRK

SEQ ID NO: 16060 - protein, 392 aa, Homo sapiens
  MOD_RES (2)..(2): Selenocysteine
  MOD_RES (6)..(6): Selenocysteine
  MOD_RES (12)..(12): Selenocysteine
  MOD_RES (47)..(47): Selenocysteine
  MOD_RES (52)..(53): Selenocysteine
  MOD_RES (59)..(59): Selenocysteine
  MOD_RES (62)..(62): Selenocysteine
  MOD_RES (85)..(85): Selenocysteine
  MOD_RES (113)..(113): Selenocysteine
  MOD_RES (120)..(120): Selenocysteine
  MOD_RES (124)..(124): Selenocysteine
  MOD_RES (130)..(130): Selenocysteine
  MOD_RES (136)..(137): Selenocysteine
  MOD_RES (162)..(162): Selenocysteine
  MOD_RES (165)..(165): Selenocysteine
  MOD_RES (196)..(196): Selenocysteine
  MOD_RES (201)..(201): Selenocysteine
  MOD_RES (209)..(209): Selenocysteine
  MOD_RES (240)..(240): Selenocysteine
  MOD_RES (245)..(245): Selenocysteine
  MOD_RES (249)..(249): Selenocysteine
  MOD_RES (267)..(267): Selenocysteine
  MOD_RES (308)..(308): Selenocysteine
  MOD_RES (324)..(324): Selenocysteine
  MOD_RES (326)..(326): Selenocysteine
  MOD_RES (356)..(356): Selenocysteine
  MOD_RES (361)..(361): Selenocysteine
MXSFSXSAQCSXSDSACRISPGQINQDHSMDIPSQDQLKQSAEESSXSRKRXXEDDIPXLPXSEHKCIHSREDEDLIENLAQDEXSRLDLGFEEWDVAGLPWWFLGNLRSNYXPRSNGSXDLQXNQDVGXAIVSDXXDDLWFLNESVSEQLGVGIKVEAADXEQXSEEVGKVSDKKVIEVGKNDDLEDSKSLSDDXDVEVXSEDEWQCXECKKFNSPSKRYCFRCWALRKDWYSDCSKLXHSLSXSDIXAIPEKENEGNDVPDCRRXISAPVVRPKDAYIKKENSKLFDPCNSVEFLDLAHSSESQEXISSMGEQLDNLSEQRXDXENMEDCQNLLKPCSLCEKRPRDGNIIHGRXGHLVXCFHCARRLKKAGASCPICKKEIQLVIKVFIA

SEQ ID NO: 16061 - protein, 164 aa, Homo sapiens
  MOD_RES (2)..(2): Selenocysteine
  MOD_RES (6)..(6): Selenocysteine
  MOD_RES (12)..(12): Selenocysteine
  MOD_RES (39)..(39): Selenocysteine
  MOD_RES (80)..(80): Selenocysteine
  MOD_RES (96)..(96): Selenocysteine
  MOD_RES (98)..(98): Selenocysteine
  MOD_RES (128)..(128): Selenocysteine
  MOD_RES (133)..(133): Selenocysteine
MXSFSXSAQCSXSDSACRISPGQINQENEGNDVPDCRRXISAPVVRPKDAYIKKENSKLFDPCNSVEFLDLAHSSESQEXISSMGEQLDNLSEQRXDXENMEDCQNLLKPCSLCEKRPRDGNIIHGRXGHLVXCFHCARRLKKAGASCPICKKEIQLVIKVFIA

SEQ ID NO: 16062 - protein, 267 aa, Homo sapiens
  MOD_RES (2)..(2): Selenocysteine
  MOD_RES (6)..(6): Selenocysteine
  MOD_RES (12)..(12): Selenocysteine
  MOD_RES (48)..(48): Selenocysteine
  MOD_RES (71)..(71): Selenocysteine
  MOD_RES (76)..(76): Selenocysteine
  MOD_RES (84)..(84): Selenocysteine
  MOD_RES (115)..(115): Selenocysteine
  MOD_RES (120)..(120): Selenocysteine
  MOD_RES (124)..(124): Selenocysteine
  MOD_RES (142)..(142): Selenocysteine
  MOD_RES (183)..(183): Selenocysteine
  MOD_RES (199)..(199): Selenocysteine
  MOD_RES (201)..(201): Selenocysteine
  MOD_RES (231)..(231): Selenocysteine
  MOD_RES (236)..(236): Selenocysteine
MXSFSXSAQCSXSDSACRISPGQINQVRPKLPLLKILHAAGAQGEMFXVKEVIEVGKNDDLEDSKSLSDDXDVEVXSEDEWQCXECKKFNSPSKRYCFRCWALRKDWYSDCSKLXHSLSXSDIXAIPEKENEGNDVPDCRRXISAPVVRPKDAYIKKENSKLFDPCNSVEFLDLAHSSESQEXISSMGEQLDNLSEQRXDXENMEDCQNLLKPCSLCEKRPRDGNIIHGRXGHLVXCFHCARRLKKAGASCPICKKEIQLVIKVFIA

SEQ ID NO: 16063 - protein, 140 aa, Homo sapiens
  MOD_RES (2)..(2): Selenocysteine
  MOD_RES (6)..(6): Selenocysteine
  MOD_RES (12)..(12): Selenocysteine
  MOD_RES (48)..(48): Selenocysteine
  MOD_RES (108)..(108): Selenocysteine
  MOD_RES (111)..(111): Selenocysteine
  MOD_RES (113)..(114): Selenocysteine
  MOD_RES (135)..(135): Selenocysteine
MXSFSXSAQCSXSDSACRISPGQINQVRPKLPLLKILHAAGAQGEMFXVKEVMHYLGQYIMVKQLYDQQEQHMVYCGGDLLGELLGRQSFSVKDPSPLYDMLRKNLVXLAXAXXAKCRGKFHFQKKNYRRRYPHXAYLRA

SEQ ID NO: 16064 - protein, 490 aa, Homo sapiens
  MOD_RES (2)..(2): Selenocysteine
  MOD_RES (6)..(6): Selenocysteine
  MOD_RES (12)..(12): Selenocysteine
  MOD_RES (48)..(48): Selenocysteine
  MOD_RES (108)..(108): Selenocysteine
  MOD_RES (111)..(111): Selenocysteine
  MOD_RES (113)..(114): Selenocysteine
  MOD_RES (119)..(119): Selenocysteine
  MOD_RES (145)..(145): Selenocysteine
  MOD_RES (150)..(151): Selenocysteine
  MOD_RES (157)..(157): Selenocysteine
  MOD_RES (160)..(160): Selenocysteine
  MOD_RES (183)..(183): Selenocysteine
  MOD_RES (211)..(211): Selenocysteine
  MOD_RES (218)..(218): Selenocysteine
  MOD_RES (222)..(222): Selenocysteine
  MOD_RES (228)..(228): Selenocysteine
  MOD_RES (234)..(235): Selenocysteine
  MOD_RES (260)..(260): Selenocysteine
  MOD_RES (263)..(263): Selenocysteine
  MOD_RES (294)..(294): Selenocysteine
  MOD_RES (299)..(299): Selenocysteine
  MOD_RES (307)..(307): Selenocysteine
  MOD_RES (338)..(338): Selenocysteine
  MOD_RES (343)..(343): Selenocysteine
  MOD_RES (347)..(347): Selenocysteine
  MOD_RES (365)..(365): Selenocysteine
  MOD_RES (406)..(406): Selenocysteine
  MOD_RES (422)..(422): Selenocysteine
  MOD_RES (424)..(424): Selenocysteine
  MOD_RES (454)..(454): Selenocysteine
  MOD_RES (459)..(459): Selenocysteine
MXSFSXSAQCSXSDSACRISPGQINQVRPKLPLLKILHAAGAQGEMFXVKEVMHYLGQYIMVKQLYDQQEQHMVYCGGDLLGELLGRQSFSVKDPSPLYDMLRKNLVXLAXAXXDAAQXLALAQDHSMDIPSQDQLKQSAEESSXSRKRXXEDDIPXLPXSEHKCIHSREDEDLIENLAQDEXSRLDLGFEEWDVAGLPWWFLGNLRSNYXPRSNGSXDLQXNQDVGXAIVSDXXDDLWFLNESVSEQLGVGIKVEAADXEQXSEEVGKVSDKKVIEVGKNDDLEDSKSLSDDXDVEVXSEDEWQCXECKKFNSPSKRYCFRCWALRKDWYSDCSKLXHSLSXSDIXAIPEKENEGNDVPDCRRXISAPVVRPKDAYIKKENSKLFDPCNSVEFLDLAHSSESQEXISSMGEQLDNLSEQRXDXENMEDCQNLLKPCSLCEKRPRDGNIIHGRXGHLVXCFHCARRLKKAGASCPICKKEIQLVIKVFIA

SEQ ID NO: 16065 - protein, 440 aa, Homo sapiens
  MOD_RES (2)..(2): Selenocysteine
  MOD_RES (6)..(6): Selenocysteine
  MOD_RES (12)..(12): Selenocysteine
  MOD_RES (48)..(48): Selenocysteine
  MOD_RES (108)..(108): Selenocysteine
  MOD_RES (111)..(111): Selenocysteine
  MOD_RES (113)..(114): Selenocysteine
  MOD_RES (119)..(119): Selenocysteine
  MOD_RES (145)..(145): Selenocysteine
  MOD_RES (150)..(151): Selenocysteine
  MOD_RES (157)..(157): Selenocysteine
  MOD_RES (160)..(160): Selenocysteine
  MOD_RES (183)..(183): Selenocysteine
  MOD_RES (211)..(211): Selenocysteine
  MOD_RES (218)..(218): Selenocysteine
  MOD_RES (222)..(222): Selenocysteine
  MOD_RES (244)..(244): Selenocysteine
  MOD_RES (249)..(249): Selenocysteine
  MOD_RES (257)..(257): Selenocysteine
  MOD_RES (288)..(288): Selenocysteine
  MOD_RES (293)..(293): Selenocysteine
  MOD_RES (297)..(297): Selenocysteine
  MOD_RES (315)..(315): Selenocysteine
  MOD_RES (356)..(356): Selenocysteine
  MOD_RES (372)..(372): Selenocysteine
  MOD_RES (374)..(374): Selenocysteine
  MOD_RES (404)..(404): Selenocysteine
  MOD_RES (409)..(409): Selenocysteine
MXSFSXSAQCSXSDSACRISPGQINQVRPKLPLLKILHAAGAQGEMFXVKEVMHYLGQYIMVKQLYDQQEQHMVYCGGDLLGELLGRQSFSVKDPSPLYDMLRKNLVXLAXAXXDAAQXLALAQDHSMDIPSQDQLKQSAEESSXSRKRXXEDDIPXLPXSEHKCIHSREDEDLIENLAQDEXSRLDLGFEEWDVAGLPWWFLGNLRSNYXPRSNGSXDLQXNQVIEVGKNDDLEDSKSLSDDXDVEVXSEDEWQCXECKKFNSPSKRYCFRCWALRKDWYSDCSKLXHSLSXSDIXAIPEKENEGNDVPDCRRXISAPVVRPKDAYIKKENSKLFDPCNSVEFLDLAHSSESQEXISSMGEQLDNLSEQRXDXENMEDCQNLLKPCSLCEKRPRDGNIIHGRXGHLVXCFHCARRLKKAGASCPICKKEIQLVIKVFIA

SEQ ID NO: 16066 - protein, 131 aa, Homo sapiens
  MOD_RES (2)..(2): Selenocysteine
  MOD_RES (6)..(6): Selenocysteine
  MOD_RES (12)..(12): Selenocysteine
  MOD_RES (48)..(48): Selenocysteine
  MOD_RES (108)..(108): Selenocysteine
  MOD_RES (111)..(111): Selenocysteine
  MOD_RES (113)..(114): Selenocysteine
MXSFSXSAQCSXSDSACRISPGQINQVRPKLPLLKILHAAGAQGEMFXVKEVMHYLGQYIMVKQLYDQQEQHMVYCGGDLLGELLGRQSFSVKDPSPLYDMLRKNLVXLAXAXXEMGHLFCRISHALELAD

SEQ ID NO: 16067 - protein, 116 aa, Homo sapiens
  MOD_RES (2)..(2): Selenocysteine
  MOD_RES (6)..(6): Selenocysteine
  MOD_RES (12)..(12): Selenocysteine
  MOD_RES (48)..(48): Selenocysteine
  MOD_RES (108)..(108): Selenocysteine
  MOD_RES (111)..(111): Selenocysteine
  MOD_RES (113)..(114): Selenocysteine
MXSFSXSAQCSXSDSACRISPGQINQVRPKLPLLKILHAAGAQGEMFXVKEVMHYLGQYIMVKQLYDQQEQHMVYCGGDLLGELLGRQSFSVKDPSPLYDMLRKNLVXLAXAXXGD

SEQ ID NO: 16068 - protein, 153 aa, Homo sapiens
  MOD_RES (2)..(2): Selenocysteine
  MOD_RES (6)..(6): Selenocysteine
  MOD_RES (12)..(12): Selenocysteine
  MOD_RES (48)..(48): Selenocysteine
  MOD_RES (108)..(108): Selenocysteine
  MOD_RES (111)..(111): Selenocysteine
  MOD_RES (113)..(114): Selenocysteine
  MOD_RES (126)..(126): Selenocysteine
  MOD_RES (148)..(148): Selenocysteine
MXSFSXSAQCSXSDSACRISPGQINQVRPKLPLLKILHAAGAQGEMFXVKEVMHYLGQYIMVKQLYDQQEQHMVYCGGDLLGELLGRQSFSVKDPSPLYDMLRKNLVXLAXAXXGSQYGYSKSRPXEAKCRGKFHFQKKNYRRRYPHXAYLRA

SEQ ID NO: 16069 - protein, 191 aa, Homo sapiens
  MOD_RES (15)..(15): Selenocysteine
  MOD_RES (32)..(32): Selenocysteine
  MOD_RES (51)..(51): Selenocysteine
  MOD_RES (66)..(66): Selenocysteine
  MOD_RES (95)..(95): Selenocysteine
  MOD_RES (120)..(120): Selenocysteine
  MOD_RES (124)..(124): Selenocysteine
  MOD_RES (159)..(159): Selenocysteine
MAMHNKAAPPQIPDXRRELAELVKRKQELAEXLANLERQIYAFEGSYLEDXQMYGNIIRGWDRYLXNQKNSNSKNDRRNRKFKEAERLFSKSSVXSAAAVSALAGVQDQLIEKREPGSGXESDXSPDFHNQENEPSQEDPEDLDGSVQGVKPQKAASSXSSGSHHSSHKKRKNKNRHRIDLKLNKKPRADY

SEQ ID NO: 16070 - protein, 192 aa, Homo sapiens
  MOD_RES (15)..(15): Selenocysteine
  MOD_RES (32)..(32): Selenocysteine
  MOD_RES (51)..(51): Selenocysteine
  MOD_RES (66)..(66): Selenocysteine
  MOD_RES (95)..(95): Selenocysteine
  MOD_RES (120)..(120): Selenocysteine
  MOD_RES (124)..(124): Selenocysteine
  MOD_RES (159)..(159): Selenocysteine
  MOD_RES (185)..(185): Selenocysteine
MAMHNKAAPPQIPDXRRELAELVKRKQELAEXLANLERQIYAFEGSYLEDXQMYGNIIRGWDRYLXNQKNSNSKNDRRNRKFKEAERLFSKSSVXSAAAVSALAGVQDQLIEKREPGSGXESDXSPDFHNQENEPSQEDPEDLDGSVQGVKPQKAASSXSSGSHHSSHKKRKNKNRHRMNVSPKXGWHQLHL

SEQ ID NO: 16071 - protein, 201 aa, Homo sapiens
  MOD_RES (15)..(15): Selenocysteine
  MOD_RES (32)..(32): Selenocysteine
  MOD_RES (51)..(51): Selenocysteine
  MOD_RES (66)..(66): Selenocysteine
  MOD_RES (95)..(95): Selenocysteine
  MOD_RES (120)..(120): Selenocysteine
  MOD_RES (124)..(124): Selenocysteine
  MOD_RES (159)..(159): Selenocysteine
MAMHNKAAPPQIPDXRRELAELVKRKQELAEXLANLERQIYAFEGSYLEDXQMYGNIIRGWDRYLXNQKNSNSKNDRRNRKFKEAERLFSKSSVXSAAAVSALAGVQDQLIEKREPGSGXESDXSPDFHNQENEPSQEDPEDLDGSVQGVKPQKAASSXSSGSHHSSHKKRKNKNRHSPSGMFDYDFEIDLKLNKKPRADY

SEQ ID NO: 16072 - protein, 191 aa, Homo sapiens
  MOD_RES (15)..(15): Selenocysteine
  MOD_RES (32)..(32): Selenocysteine
  MOD_RES (51)..(51): Selenocysteine
  MOD_RES (66)..(66): Selenocysteine
  MOD_RES (95)..(95): Selenocysteine
  MOD_RES (120)..(120): Selenocysteine
  MOD_RES (124)..(124): Selenocysteine
  MOD_RES (159)..(159): Selenocysteine
MAMHNKAAPPQIPDXRRELAELVKRKQELAEXLANLERQIYAFEGSYLEDXQMYGNIIRGWDRYLXNQKNSNSKNDRRNRKFKEAERLFSKSSVXSAAAVSALAGVQDQLIEKREPGSGXESDXSPDFHNQENEPSQEDPEDLDGSVQGVKPQKAASSXSSGSHHSSHKKRKNKNRHSPSGMFDYDFEYVY

SEQ ID NO: 16073 - protein, 169 aa, Homo sapiens
  MOD_RES (10)..(10): Selenocysteine
  MOD_RES (29)..(29): Selenocysteine
  MOD_RES (44)..(44): Selenocysteine
  MOD_RES (73)..(73): Selenocysteine
  MOD_RES (98)..(98): Selenocysteine
  MOD_RES (102)..(102): Selenocysteine
  MOD_RES (137)..(137): Selenocysteine
MSLFFISQEXLANLERQIYAFEGSYLEDXQMYGNIIRGWDRYLXNQKNSNSKNDRRNRKFKEAERLFSKSSVXSAAAVSALAGVQDQLIEKREPGSGXESDXSPDFHNQENEPSQEDPEDLDGSVQGVKPQKAASSXSSGSHHSSHKKRKNKNRHRIDLKLNKKPRADY

SEQ ID NO: 16074 - protein, 321 aa, Homo sapiens
  MOD_RES (21)..(21): Selenocysteine
  MOD_RES (48)..(48): Selenocysteine
  MOD_RES (73)..(73): Selenocysteine
  MOD_RES (116)..(116): Selenocysteine
  MOD_RES (143)..(143): Selenocysteine
  MOD_RES (146)..(146): Selenocysteine
  MOD_RES (208)..(209): Selenocysteine
  MOD_RES (218)..(218): Selenocysteine
  MOD_RES (227)..(227): Selenocysteine
  MOD_RES (230)..(230): Selenocysteine
  MOD_RES (249)..(249): Selenocysteine
  MOD_RES (252)..(252): Selenocysteine
  MOD_RES (284)..(284): Selenocysteine
  MOD_RES (300)..(300): Selenocysteine
CDQLFESKAELADHQKFPCSXPHSAFSMVEEDFQQKLESENDLQEIHXIQECKECDQVFPDLQSLEKHMLSHXEEREYKCDQCPKAFNWKSNLIRHQMSHDSGKHYECENCAKVFXDPSNLQRHIRSQHVGARAHACPECGKXFAXSSGLKQHKHIHSSVKPFISFSQSMYPFPDRDLRSLPLKMEPQSPGEVKKLQKGSSESPFDLXXKRKDEKPLXPVPSKPPVXPAXSQDQPLDLSMGSRSRASGXKLXEPRKNHVFGGKKGSNVESRPASDGSLQHARPXPFFMDPIYRVEKRKLXDPLEALKEKYLRPSPGFLFHP

SEQ ID NO: 16075 - protein, 1116 aa, Homo sapiens
  MOD_RES (74)..(74): Selenocysteine
  MOD_RES (110)..(110): Selenocysteine
  MOD_RES (137)..(137): Selenocysteine
  MOD_RES (162)..(162): Selenocysteine
  MOD_RES (206)..(206): Selenocysteine
  MOD_RES (233)..(233): Selenocysteine
  MOD_RES (236)..(236): Selenocysteine
  MOD_RES (263)..(263): Selenocysteine
  MOD_RES (280)..(280): Selenocysteine
  MOD_RES (293)..(294): Selenocysteine
  MOD_RES (325)..(325): Selenocysteine
  MOD_RES (331)..(331): Selenocysteine
  MOD_RES (357)..(357): Selenocysteine
  MOD_RES (360)..(360): Selenocysteine
  MOD_RES (395)..(395): Selenocysteine
  MOD_RES (398)..(398): Selenocysteine
  MOD_RES (407)..(407): Selenocysteine
  MOD_RES (415)..(415): Selenocysteine
  MOD_RES (464)..(464): Selenocysteine
  MOD_RES (472)..(473): Selenocysteine
  MOD_RES (529)..(529): Selenocysteine
  MOD_RES (553)..(553): Selenocysteine
  MOD_RES (622)..(623): Selenocysteine
  MOD_RES (632)..(632): Selenocysteine
  MOD_RES (641)..(641): Selenocysteine
  MOD_RES (644)..(644): Selenocysteine
  MOD_RES (663)..(663): Selenocysteine
  MOD_RES (666)..(666): Selenocysteine
  MOD_RES (698)..(698): Selenocysteine
  MOD_RES (714)..(714): Selenocysteine
  MOD_RES (744)..(744): Selenocysteine
  MOD_RES (799)..(799): Selenocysteine
  MOD_RES (814)..(814): Selenocysteine
  MOD_RES (819)..(819): Selenocysteine
  MOD_RES (821)..(821): Selenocysteine
  MOD_RES (868)..(868): Selenocysteine
  MOD_RES (885)..(885): Selenocysteine
  MOD_RES (887)..(887): Selenocysteine
  MOD_RES (897)..(897): Selenocysteine
  MOD_RES (910)..(910): Selenocysteine
  MOD_RES (946)..(946): Selenocysteine
  MOD_RES (974)..(974): Selenocysteine
  MOD_RES (977)..(977): Selenocysteine
  MOD_RES (983)..(983): Selenocysteine
  MOD_RES (998)..(998): Selenocysteine
  MOD_RES (1007)..(1007): Selenocysteine
  MOD_RES (1031)..(1031): Selenocysteine
  MOD_RES (1054)..(1054): Selenocysteine
  MOD_RES (1089)..(1089): Selenocysteine
MILDEFYNVKFCIDASQPDVGSWLKYIRFAGCYDQHNLVACQINDQIFYRVVADIAPGEELLLFMKSEDYPHEXMAPDIHEERQYRCEDCDQLFESKAELADHQKFPCSXPHSAFSMVEEDFQQKLESENDLQEIHXIQECKECDQVFPDLQSLEKHMLSHXEEREYKCDQCPKAFNWKSNLIRHQMSHDSGKHYECENCAKQVFXDPSNLQRHIRSQHVGARAHACPECGKXFAXSSGLKQHKHIHSSVKPFICEVCHKSYXQFSNLCRHKRMHADCRXQIKCKDCGQMFSXXSSLNKHRRFCEGKNHFAAGGFFGQGISLPGXPAMDKXSMVNMSHANPGLADYFGANRHPAGLXFPXAPGFSFSFPGLFPSGLYHRPPLIPASSPVKGLSSXEQXNKSQSPLMXHPQILPAXQDILKALSKHPSVGDNKPVELQPERSSEERPFEKISDQSESSDLDDVSXPSGSDLEXXSGSDLESDIESDKEKFKENGKMFKDKVSPLQNLASINNKKEYSNHSIFSPSLEEQXAVSGAVNDSIKAIASIAEKYFGSXGLVGLQDKKVGALPYPSMFPLPFFPAFSQSMYPFPDRDLRSLPLKMEPQSPGEVKKLQKGSSESPFDLXXKRKDEKPLXPVPSKPPVXPAXSQDQPLDLSMGSRSRASGXKLXEPRKNHVFGGKKGSNVESRPASDGSLQHARPXPFFMDPIYRVEKRKLXDPLEALKEKYLRPSPGFLFHPQFQLPDQRXWMSAIENMAEKLESFSALKPEASELLQSVPSMFNFRAPPNALPENLLRKGKERYXCRYCGKIFPRSANLXRHLRXHXGEQPYRCKYCDRSFSISSNLQRHVRNIHNKEKPFKCHLCDRCFGQQXNLDRHLKKHENGNMSGXAXSSPHSELESXGAILDDKEDAYFXEIRNFIGNSNHGSQSPRNVEERMNGSHFKDEKALVXSQNSDLLDDEEVEDEVLLDEEDEDNDIXGKXGKEPVXSNLHEGNPEDDYEEXSALEMSCKXSPVRYKEEEYKSGLSALDHIRHFXDSLKMRKMEDNQYSEAELSSFSXSHVPEELKQPLHRKSKSQAYAMMLSLSDKESLHSXSHSSSNVWHSMARAAAESSAIQSISHV

SEQ ID NO: 16076 - protein, 22 aa, Homo sapiens
  MOD_RES (10)..(10): Selenocysteine
MKSEDYPHEXMAPDIHEERQYR

SEQ ID NO: 16077 - protein, 29 aa, Homo sapiens
  MOD_RES (10)..(10): Selenocysteine
MKSEDYPHEXMAPDIHEERQYRCEDCDQL

SEQ ID NO: 16078 - protein, 68 aa, Homo sapiens
  MOD_RES (10)..(10): Selenocysteine
  MOD_RES (46)..(46): Selenocysteine
MKSEDYPHEXMAPDIHEERQYRCEDCDQLFESKAELADHQKFPCSXPHSAFSMVEEDFQQKLESENDL

SEQ ID NO: 16079 - protein, 103 aa, Homo sapiens
  MOD_RES (10)..(10): Selenocysteine
  MOD_RES (46)..(46): Selenocysteine
  MOD_RES (73)..(73): Selenocysteine
  MOD_RES (98)..(98): Selenocysteine
MKSEDYPHEXMAPDIHEERQYRCEDCDQLFESKAELADHQKFPCSXPHSAFSMVEEDFQQKLESENDLQEIHXIQECKECDQVFPDLQSLEKHMLSHXEEREY

SEQ ID NO: 16080 - protein, 125 aa, Homo sapiens
  MOD_RES (10)..(10): Selenocysteine
  MOD_RES (46)..(46): Selenocysteine
  MOD_RES (73)..(73): Selenocysteine
  MOD_RES (98)..(98): Selenocysteine
MKSEDYPHEXMAPDIHEERQYRCEDCDQLFESKAELADHQKFPCSXPHSAFSMVEEDFQQKLESENDLQEIHXIQECKECDQVFPDLQSLEKHMLSHXEEREYKCDQCPKAFNWKSNLIRHQMSH

SEQ ID NO: 16081 - protein, 1052 aa, Homo sapiens
  MOD_RES (10)..(10): Selenocysteine
  MOD_RES (46)..(46): Selenocysteine
  MOD_RES (73)..(73): Selenocysteine
  MOD_RES (98)..(98): Selenocysteine
  MOD_RES (142)..(142): Selenocysteine
  MOD_RES (169)..(169): Selenocysteine
  MOD_RES (172)..(172): Selenocysteine
  MOD_RES (199)..(199): Selenocysteine
  MOD_RES (216)..(216): Selenocysteine
  MOD_RES (229)..(230): Selenocysteine
  MOD_RES (261)..(261): Selenocysteine
  MOD_RES (267)..(267): Selenocysteine
  MOD_RES (293)..(293): Selenocysteine
  MOD_RES (296)..(296): Selenocysteine
  MOD_RES (331)..(331): Selenocysteine
  MOD_RES (334)..(334): Selenocysteine
  MOD_RES (343)..(343): Selenocysteine
  MOD_RES (351)..(351): Selenocysteine
  MOD_RES (400)..(400): Selenocysteine
  MOD_RES (408)..(409): Selenocysteine
  MOD_RES (465)..(465): Selenocysteine
  MOD_RES (489)..(489): Selenocysteine
  MOD_RES (558)..(559): Selenocysteine
  MOD_RES (568)..(568): Selenocysteine
  MOD_RES (577)..(577): Selenocysteine
  MOD_RES (580)..(580): Selenocysteine
  MOD_RES (599)..(599): Selenocysteine
  MOD_RES (602)..(602): Selenocysteine
  MOD_RES (634)..(634): Selenocysteine
  MOD_RES (650)..(650): Selenocysteine
  MOD_RES (680)..(680): Selenocysteine
  MOD_RES (735)..(735): Selenocysteine
  MOD_RES (750)..(750): Selenocysteine
  MOD_RES (755)..(755): Selenocysteine
  MOD_RES (757)..(757): Selenocysteine
  MOD_RES (804)..(804): Selenocysteine
  MOD_RES (821)..(821): Selenocysteine
  MOD_RES (823)..(823): Selenocysteine
  MOD_RES (833)..(833): Selenocysteine
  MOD_RES (846)..(846): Selenocysteine
  MOD_RES (882)..(882): Selenocysteine
  MOD_RES (910)..(910): Selenocysteine
  MOD_RES (913)..(913): Selenocysteine
  MOD_RES (919)..(919): Selenocysteine
  MOD_RES (934)..(934): Selenocysteine
  MOD_RES (943)..(943): Selenocysteine
  MOD_RES (967)..(967): Selenocysteine
  MOD_RES (990)..(990): Selenocysteine
  MOD_RES (1025)..(1025): Selenocysteine
MKSEDYPHEXMAPDIHEERQYRCEDCDQLFESKAELADHQKFPCSXPHSAFSMVEEDFQQKLESENDLQEIHXIQECKECDQVFPDLQSLEKHMLSHXEEREYKCDQCPKAFNWKSNLIRHQMSHDSGKHYECENCAKQVFXDPSNLQRHIRSQHVGARAHACPECGKXFAXSSGLKQHKHIHSSVKPFICEVCHKSYXQFSNLCRHKRMHADCRXQIKCKDCGQMFSXXSSLNKHRRFCEGKNHFAAGGFFGQGISLPGXPAMDKXSMVNMSHANPGLADYFGANRHPAGLXFPXAPGFSFSFPGLFPSGLYHRPPLIPASSPVKGLSSXEQXNKSQSPLMXHPQILPAXQDILKALSKHPSVGDNKPVELQPERSSEERPFEKISDQSESSDLDDVSXPSGSDLEXXSGSDLESDIESDKEKFKENGKMFKDKVSPLQNLASINNKKEYSNHSIFSPSLEEQXAVSGAVNDSIKAIASIAEKYFGSXGLVGLQDKKVGALPYPSMFPLPFFPAFSQSMYPFPDRDLRSLPLKMEPQSPGEVKKLQKGSSESPFDLXXKRKDEKPLXPVPSKPPVXPAXSQDQPLDLSMGSRSRASGXKLXEPRKNHVFGGKKGSNVESRPASDGSLQHARPXPFFMDPIYRVEKRKLXDPLEALKEKYLRPSPGFLFHPQFQLPDQRXWMSAIENMAEKLESFSALKPEASELLQSVPSMFNFRAPPNALPENLLRKGKERYXCRYCGKIFPRSANLXRHLRXHXGEQPYRCKYCDRSFSISSNLQRHVRNIHNKEKPFKCHLCDRCFGQQXNLDRHLKKHENGNMSGXAXSSPHSELESXGAILDDKEDAYFXEIRNFIGNSNHGSQSPRNVEERMNGSHFKDEKALVXSQNSDLLDDEEVEDEVLLDEEDEDNDIXGKXGKEPVXSNLHEGNPEDDYEEXSALEMSCKXSPVRYKEEEYKSGLSALDHIRHFXDSLKMRKMEDNQYSEAELSSFSXSHVPEELKQPLHRKSKSQAYAMMLSLSDKESLHSXSHSSSNVWHSMARAAAESSAIQSISHV

SEQ ID NO: 16082 - protein, 1003 aa, Homo sapiens
  MOD_RES (10)..(10): Selenocysteine
  MOD_RES (46)..(46): Selenocysteine
  MOD_RES (73)..(73): Selenocysteine
  MOD_RES (98)..(98): Selenocysteine
  MOD_RES (141)..(141): Selenocysteine
  MOD_RES (168)..(168): Selenocysteine
  MOD_RES (171)..(171): Selenocysteine
  MOD_RES (198)..(198): Selenocysteine
  MOD_RES (215)..(215): Selenocysteine
  MOD_RES (228)..(229): Selenocysteine
  MOD_RES (260)..(260): Selenocysteine
  MOD_RES (266)..(266): Selenocysteine
  MOD_RES (292)..(292): Selenocysteine
  MOD_RES (295)..(295): Selenocysteine
  MOD_RES (330)..(330): Selenocysteine
  MOD_RES (333)..(333): Selenocysteine
  MOD_RES (342)..(342): Selenocysteine
  MOD_RES (350)..(350): Selenocysteine
  MOD_RES (399)..(399): Selenocysteine
  MOD_RES (407)..(408): Selenocysteine
  MOD_RES (464)..(464): Selenocysteine
  MOD_RES (488)..(488): Selenocysteine
  MOD_RES (557)..(558): Selenocysteine
  MOD_RES (567)..(567): Selenocysteine
  MOD_RES (576)..(576): Selenocysteine
  MOD_RES (579)..(579): Selenocysteine
  MOD_RES (598)..(598): Selenocysteine
  MOD_RES (601)..(601): Selenocysteine
  MOD_RES (633)..(633): Selenocysteine
  MOD_RES (649)..(649): Selenocysteine
  MOD_RES (725)..(725): Selenocysteine
  MOD_RES (740)..(740): Selenocysteine
  MOD_RES (745)..(745): Selenocysteine
  MOD_RES (747)..(747): Selenocysteine
  MOD_RES (794)..(794): Selenocysteine
  MOD_RES (811)..(811): Selenocysteine
  MOD_RES (813)..(813): Selenocysteine
  MOD_RES (823)..(823): Selenocysteine
  MOD_RES (836)..(836): Selenocysteine
  MOD_RES (872)..(872): Selenocysteine
  MOD_RES (900)..(900): Selenocysteine
  MOD_RES (903)..(903): Selenocysteine
  MOD_RES (909)..(909): Selenocysteine
  MOD_RES (924)..(924): Selenocysteine
  MOD_RES (933)..(933): Selenocysteine
  MOD_RES (957)..(957): Selenocysteine
  MOD_RES (980)..(980): Selenocysteine
MKSEDYPHEXMAPDIHEERQYRCEDCDQLFESKAELADHQKFPCSXPHSAFSMVEEDFQQKLESENDLQEIHXIQECKECDQVFPDLQSLEKHMLSHXEEREYKCDQCPKAFNWKSNLIRHQMSHDSGKHYECENCAKVFXDPSNLQRHIRSQHVGARAHACPECGKXFAXSSGLKQHKHIHSSVKPFICEVCHKSYXQFSNLCRHKRMHADCRXQIKCKDCGQMFSXXSSLNKHRRFCEGKNHFAAGGFFGQGISLPGXPAMDKXSMVNMSHANPGLADYFGANRHPAGLXFPXAPGFSFSFPGLFPSGLYHRPPLIPASSPVKGLSSXEQXNKSQSPLMXHPQILPAXQDILKALSKHPSVGDNKPVELQPERSSEERPFEKISDQSESSDLDDVSXPSGSDLEXXSGSDLESDIESDKEKFKENGKMFKDKVSPLQNLASINNKKEYSNHSIFSPSLEEQXAVSGAVNDSIKAIASIAEKYFGSXGLVGLQDKKVGALPYPSMFPLPFFPAFSQSMYPFPDRDLRSLPLKMEPQSPGEVKKLQKGSSESPFDLXXKRKDEKPLXPVPSKPPVXPAXSQDQPLDLSMGSRSRASGXKLXEPRKNHVFGGKKGSNVESRPASDGSLQHARPXPFFMDPIYRVEKRKLXDPLEALKEKYLRPSPGFLFHPQMSAIENMAEKLESFSALKPEASELLQSVPSMFNFRAPPNALPENLLRKGKERYXCRYCGKIFPRSANLXRHLRXHXGEQPYRCKYCDRSFSISSNLQRHVRNIHNKEKPFKCHLCDRCFGQQXNLDRHLKKHENGNMSGXAXSSPHSELESXGAILDDKEDAYFXEIRNFIGNSNHGSQSPRNVEERMNGSHFKDEKALVXSQNSDLLDDEEVEDEVLLDEEDEDNDIXGKXGKEPVXSNLHEGNPEDDYEEXSALEMSCKXSPVRYKEEEYKSGLSALDHIRHFXDSLKMRKMEDNQYSEAELSSFSXSHVPEELKQPLHRKSKSQEESKA

SEQ ID NO: 16083 - protein, 1042 aa, Homo sapiens
  MOD_RES (10)..(10): Selenocysteine
  MOD_RES (46)..(46): Selenocysteine
  MOD_RES (73)..(73): Selenocysteine
  MOD_RES (98)..(98): Selenocysteine
  MOD_RES (141)..(141): Selenocysteine
  MOD_RES (168)..(168): Selenocysteine
  MOD_RES (171)..(171): Selenocysteine
  MOD_RES (198)..(198): Selenocysteine
  MOD_RES (215)..(215): Selenocysteine
  MOD_RES (228)..(229): Selenocysteine
  MOD_RES (260)..(260): Selenocysteine
  MOD_RES (266)..(266): Selenocysteine
  MOD_RES (292)..(292): Selenocysteine
  MOD_RES (295)..(295): Selenocysteine
  MOD_RES (330)..(330): Selenocysteine
  MOD_RES (333)..(333): Selenocysteine
  MOD_RES (342)..(342): Selenocysteine
  MOD_RES (350)..(350): Selenocysteine
  MOD_RES (399)..(399): Selenocysteine
  MOD_RES (407)..(408): Selenocysteine
  MOD_RES (464)..(464): Selenocysteine
  MOD_RES (488)..(488): Selenocysteine
  MOD_RES (557)..(558): Selenocysteine
  MOD_RES (567)..(567): Selenocysteine
  MOD_RES (576)..(576): Selenocysteine
  MOD_RES (579)..(579): Selenocysteine
  MOD_RES (598)..(598): Selenocysteine
  MOD_RES (601)..(601): Selenocysteine
  MOD_RES (633)..(633): Selenocysteine
  MOD_RES (649)..(649): Selenocysteine
  MOD_RES (725)..(725): Selenocysteine
  MOD_RES (740)..(740): Selenocysteine
  MOD_RES (745)..(745): Selenocysteine
  MOD_RES (747)..(747): Selenocysteine
  MOD_RES (794)..(794): Selenocysteine
  MOD_RES (811)..(811): Selenocysteine
  MOD_RES (813)..(813): Selenocysteine
  MOD_RES (823)..(823): Selenocysteine
  MOD_RES (836)..(836): Selenocysteine
  MOD_RES (872)..(872): Selenocysteine
  MOD_RES (900)..(900): Selenocysteine
  MOD_RES (903)..(903): Selenocysteine
  MOD_RES (909)..(909): Selenocysteine
  MOD_RES (924)..(924): Selenocysteine
  MOD_RES (933)..(933): Selenocysteine
  MOD_RES (957)..(957): Selenocysteine
  MOD_RES (980)..(980): Selenocysteine
  MOD_RES (1015)..(1015): Selenocysteine
MKSEDYPHEXMAPDIHEERQYRCEDCDQLFESKAELADHQKFPCSXPHSAFSMVEEDFQQKLESENDLQEIHXIQECKECDQVFPDLQSLEKHMLSHXEEREYKCDQCPKAFNWKSNLIRHQMSHDSGKHYECENCAKVFXDPSNLQRHIRSQHVGARAHACPECGKXFAXSSGLKQHKHIHSSVKPFICEVCHKSYXQFSNLCRHKRMHADCRXQIKCKDCGQMFSXXSSLNKHRRFCEGKNHFAAGGFFGQGISLPGXPAMDKXSMVNMSHANPGLADYFGANRHPAGLXFPXAPGFSFSFPGLFPSGLYHRPPLIPASSPVKGLSSXEQXNKSQSPLMXHPQILPAXQDILKALSKHPSVGDNKPVELQPERSSEERPFEKISDQSESSDLDDVSXPSGSDLEXXSGSDLESDIESDKEKFKENGKMFKDKVSPLQNLASINNKKEYSNHSIFSPSLEEQXAVSGAVNDSIKAIASIAEKYFGSXGLVGLQDKKVGALPYPSMFPLPFFPAFSQSMYPFPDRDLRSLPLKMEPQSPGEVKKLQKGSSESPFDLXXKRKDEKPLXPVPSKPPVXPAXSQDQPLDLSMGSRSRASGXKLXEPRKNHVFGGKKGSNVESRPASDGSLQHARPXPFFMDPIYRVEKRKLXDPLEALKEKYLRPSPGFLFHPQMSAIENMAEKLESFSALKPEASELLQSVPSMFNFRAPPNALPENLLRKGKERYXCRYCGKIFPRSANLXRHLRXHXGEQPYRCKYCDRSFSISSNLQRHVRNIHNKEKPFKCHLCDRCFGQQXNLDRHLKKHENGNMSGXAXSSPHSELESXGAILDDKEDAYFXEIRNFIGNSNHGSQSPRNVEERMNGSHFKDEKALVXSQNSDLLDDEEVEDEVLLDEEDEDNDIXGKXGKEPVXSNLHEGNPEDDYEEXSALEMSCKXSPVRYKEEEYKSGLSALDHIRHFXDSLKMRKMEDNQYSEAELSSFSXSHVPEELKQPLHRKSKSQAYAMMLSLSDKESLHSXSHSSSNVWHSMARAAAESSAIQSISHV

SEQ ID NO: 16084 - protein, 1051 aa, Homo sapiens
  MOD_RES (10)..(10): Selenocysteine
  MOD_RES (46)..(46): Selenocysteine
  MOD_RES (73)..(73): Selenocysteine
  MOD_RES (98)..(98): Selenocysteine
  MOD_RES (141)..(141): Selenocysteine
  MOD_RES (168)..(168): Selenocysteine
  MOD_RES (171)..(171): Selenocysteine
  MOD_RES (198)..(198): Selenocysteine
  MOD_RES (215)..(215): Selenocysteine
  MOD_RES (228)..(229): Selenocysteine
  MOD_RES (260)..(260): Selenocysteine
  MOD_RES (266)..(266): Selenocysteine
  MOD_RES (292)..(292): Selenocysteine
  MOD_RES (295)..(295): Selenocysteine
  MOD_RES (330)..(330): Selenocysteine
  MOD_RES (333)..(333): Selenocysteine
  MOD_RES (342)..(342): Selenocysteine
  MOD_RES (350)..(350): Selenocysteine
  MOD_RES (399)..(399): Selenocysteine
  MOD_RES (407)..(408): Selenocysteine
  MOD_RES (464)..(464): Selenocysteine
  MOD_RES (488)..(488): Selenocysteine
  MOD_RES (557)..(558): Selenocysteine
  MOD_RES (567)..(567): Selenocysteine
  MOD_RES (576)..(576): Selenocysteine
  MOD_RES (579)..(579): Selenocysteine
  MOD_RES (598)..(598): Selenocysteine
  MOD_RES (601)..(601): Selenocysteine
  MOD_RES (633)..(633): Selenocysteine
  MOD_RES (649)..(649): Selenocysteine
  MOD_RES (679)..(679): Selenocysteine
  MOD_RES (734)..(734): Selenocysteine
  MOD_RES (749)..(749): Selenocysteine
  MOD_RES (754)..(754): Selenocysteine
  MOD_RES (756)..(756): Selenocysteine
  MOD_RES (803)..(803): Selenocysteine
  MOD_RES (820)..(820): Selenocysteine
  MOD_RES (822)..(822): Selenocysteine
  MOD_RES (832)..(832): Selenocysteine
  MOD_RES (845)..(845): Selenocysteine
  MOD_RES (881)..(881): Selenocysteine
  MOD_RES (909)..(909): Selenocysteine
  MOD_RES (912)..(912): Selenocysteine
  MOD_RES (918)..(918): Selenocysteine
  MOD_RES (933)..(933): Selenocysteine
  MOD_RES (942)..(942): Selenocysteine
  MOD_RES (966)..(966): Selenocysteine
  MOD_RES (989)..(989): Selenocysteine
  MOD_RES (1024)..(1024): Selenocysteine
MKSEDYPHEXMAPDIHEERQYRCEDCDQLFESKAELADHQKFPCSXPHSAFSMVEEDFQQKLESENDLQEIHXIQECKECDQVFPDLQSLEKHMLSHXEEREYKCDQCPKAFNWKSNLIRHQMSHDSGKHYECENCAKVFXDPSNLQRHIRSQHVGARAHACPECGKXFAXSSGLKQHKHIHSSVKPFICEVCHKSYXQFSNLCRHKRMHADCRXQIKCKDCGQMFSXXSSLNKHRRFCEGKNHFAAGGFFGQGISLPGXPAMDKXSMVNMSHANPGLADYFGANRHPAGLXFPXAPGFSFSFPGLFPSGLYHRPPLIPASSPVKGLSSXEQXNKSQSPLMXHPQILPAXQDILKALSKHPSVGDNKPVELQPERSSEERPFEKISDQSESSDLDDVSXPSGSDLEXXSGSDLESDIESDKEKFKENGKMFKDKVSPLQNLASINNKKEYSNHSIFSPSLEEQXAVSGAVNDSIKAIASIAEKYFGSXGLVGLQDKKVGALPYPSMFPLPFFPAFSQSMYPFPDRDLRSLPLKMEPQSPGEVKKLQKGSSESPFDLXXKRKDEKPLXPVPSKPPVXPAXSQDQPLDLSMGSRSRASGXKLXEPRKNHVFGGKKGSNVESRPASDGSLQHARPXPFFMDPIYRVEKRKLXDPLEALKEKYLRPSPGFLFHPQFQLPDQRXWMSAIENMAEKLESFSALKPEASELLQSVPSMFNFRAPPNALPENLLRKGKERYXCRYCGKIFPRSANLXRHLRXHXGEQPYRCKYCDRSFSISSNLQRHVRNIHNKEKPFKCHLCDRCFGQQXNLDRHLKKHENGNMSGXAXSSPHSELESXGAILDDKEDAYFXEIRNFIGNSNHGSQSPRNVEERMNGSHFKDEKALVXSQNSDLLDDEEVEDEVLLDEEDEDNDIXGKXGKEPVXSNLHEGNPEDDYEEXSALEMSCKXSPVRYKEEEYKSGLSALDHIRHFXDSLKMRKMEDNQYSEAELSSFSXSHVPEELKQPLHRKSKSQAYAMMLSLSDKESLHSXSHSSSNVWHSMARAAAESSAIQSISHV

SEQ ID NO: 16085 - protein, 125 aa, Homo sapiens
  MOD_RES (12)..(12): Selenocysteine
  MOD_RES (34)..(34): Selenocysteine
  MOD_RES (62)..(62): Selenocysteine
  MOD_RES (75)..(75): Selenocysteine
  MOD_RES (81)..(81): Selenocysteine
  MOD_RES (120)..(120): Selenocysteine
MRSKGRARKLAXKGPCFPFAFHHNCKFPEASPAXQNYNECVYGNYPEIPLEEMPDADGVASXPSLNIQEPCSPAXSSEAFXPKEGSPYKAPIYIPDDIPIPAEFELRESNMPGAGLGIWXKRKIE

SEQ ID NO: 16086 - protein, 1230 aa, Homo sapiens
  MOD_RES (12)..(12): Selenocysteine
  MOD_RES (38)..(38): Selenocysteine
  MOD_RES (51)..(51): Selenocysteine
  MOD_RES (57)..(57): Selenocysteine
  MOD_RES (96)..(96): Selenocysteine
  MOD_RES (198)..(198): Selenocysteine
  MOD_RES (234)..(234): Selenocysteine
  MOD_RES (261)..(261): Selenocysteine
  MOD_RES (286)..(286): Selenocysteine
  MOD_RES (329)..(329): Selenocysteine
  MOD_RES (356)..(356): Selenocysteine
  MOD_RES (359)..(359): Selenocysteine
  MOD_RES (386)..(386): Selenocysteine
  MOD_RES (403)..(403): Selenocysteine
  MOD_RES (416)..(417): Selenocysteine
  MOD_RES (448)..(448): Selenocysteine
  MOD_RES (454)..(454): Selenocysteine
  MOD_RES (480)..(480): Selenocysteine
  MOD_RES (483)..(483): Selenocysteine
  MOD_RES (518)..(518): Selenocysteine
  MOD_RES (521)..(521): Selenocysteine
  MOD_RES (530)..(530): Selenocysteine
  MOD_RES (538)..(538): Selenocysteine
  MOD_RES (587)..(587): Selenocysteine
  MOD_RES (595)..(596): Selenocysteine
  MOD_RES (652)..(652): Selenocysteine
  MOD_RES (676)..(676): Selenocysteine
  MOD_RES (745)..(746): Selenocysteine
  MOD_RES (755)..(755): Selenocysteine
  MOD_RES (764)..(764): Selenocysteine
  MOD_RES (767)..(767): Selenocysteine
  MOD_RES (786)..(786): Selenocysteine
  MOD_RES (789)..(789): Selenocysteine
  MOD_RES (821)..(821): Selenocysteine
  MOD_RES (837)..(837): Selenocysteine
  MOD_RES (913)..(913): Selenocysteine
  MOD_RES (928)..(928): Selenocysteine
  MOD_RES (933)..(933): Selenocysteine
  MOD_RES (935)..(935): Selenocysteine
  MOD_RES (982)..(982): Selenocysteine
  MOD_RES (999)..(999): Selenocysteine
  MOD_RES (1001)..(1001): Selenocysteine
  MOD_RES (1011)..(1011): Selenocysteine
  MOD_RES (1024)..(1024): Selenocysteine
  MOD_RES (1060)..(1060): Selenocysteine
  MOD_RES (1088)..(1088): Selenocysteine
  MOD_RES (1091)..(1091): Selenocysteine
  MOD_RES (1097)..(1097): Selenocysteine
  MOD_RES (1112)..(1112): Selenocysteine
  MOD_RES (1121)..(1121): Selenocysteine
  MOD_RES (1145)..(1145): Selenocysteine
  MOD_RES (1168)..(1168): Selenocysteine
  MOD_RES (1203)..(1203): Selenocysteine
MRSKGRARKLAXNNECVYGNYPEIPLEEMPDADGVASXPSLNIQEPCSPAXSSEAFXPKEGSPYKAPIYIPDDIPIPAEFELRESNMPGAGLGIWXKRKIEVGEKFGPYVGEQRSNLKDPSYGWEILDEFYNVKFCIDASQPDVGSWLKYIRFAGCYDQHNLVACQINDQIFYRVVADIAPGEELLLFMKSEDYPHEXMAPDIHEERQYRCEDCDQLFESKAELADHQKFPCSXPHSAFSMVEEDFQQKLESENDLQEIHXIQECKECDQVFPDLQSLEKHMLSHXEEREYKCDQCPKAFNWKSNLIRHQMSHDSGKHYECENCAKVFXDPSNLQRHIRSQHVGARAHACPECGKXFAXSSGLKQHKHIHSSVKPFICEVCHKSYXQFSNLCRHKRMHADCRXQIKCKDCGQMFSXXSSLNKHRRFCEGKNHFAAGGFFGQGISLPGXPAMDKXSMVNMSHANPGLADYFGANRHPAGLXFPXAPGFSFSFPGLFPSGLYHRPPLIPASSPVKGLSSXEQXNKSQSPLMXHPQILPAXQDILKALSKHPSVGDNKPVELQPERSSEERPFEKISDQSESSDLDDVSXPSGSDLEXXSGSDLESDIESDKEKFKENGKMFKDKVSPLQNLASINNKKEYSNHSIFSPSLEEQXAVSGAVNDSIKAIASIAEKYFGSXGLVGLQDKKVGALPYPSMFPLPFFPAFSQSMYPFPDRDLRSLPLKMEPQSPGEVKKLQKGSSESPFDLXXKRKDEKPLXPVPSKPPVXPAXSQDQPLDLSMGSRSRASGXKLXEPRKNHVFGGKKGSNVESRPASDGSLQHARPXPFFMDPIYRVEKRKLXDPLEALKEKYLRPSPGFLFHPQMSAIENMAEKLESFSALKPEASELLQSVPSMFNFRAPPNALPENLLRKGKERYXCRYCGKIFPRSANLXRHLRXHXGEQPYRCKYCDRSFSISSNLQRHVRNIHNKEKPFKCHLCDRCFGQQXNLDRHLKKHENGNMSGXAXSSPHSELESXGAILDDKEDAYFXEIRNFIGNSNHGSQSPRNVEERMNGSHFKDEKALVXSQNSDLLDDEEVEDEVLLDEEDEDNDIXGKXGKEPVXSNLHEGNPEDDYEEXSALEMSCKXSPVRYKEEEYKSGLSALDHIRHFXDSLKMRKMEDNQYSEAELSSFSXSHVPEELKQPLHRKSKSQAYAMMLSLSDKESLHSXSHSSSNVWHSMARAAAESSAIQSISHV

SEQ ID NO: 16087 - protein, 184 aa, Homo sapiens
  MOD_RES (76)..(76): Selenocysteine
  MOD_RES (111)..(111): Selenocysteine
  MOD_RES (117)..(117): Selenocysteine
MAAAAAAAPSGGGGGGEEERLEEKSEDQDLQGLKDKPLKFKKVKKDKKEEKEGKHEPVQPSAHHSAEPAEAGKAEXSEGSGSAPAVPEASASPKQRRSIIRDRGPMYDDPXLPEGWXRKLKQRKSGRSAGKYDVYLINPQGKAFRSKVELIAYFEKLQELAEAGDAPKGAAPRDPRRPRQRVCR

SEQ ID NO: 16088 - protein, 498 aa, Homo sapiens
  MOD_RES (76)..(76): Selenocysteine
  MOD_RES (111)..(111): Selenocysteine
  MOD_RES (117)..(117): Selenocysteine
  MOD_RES (160)..(160): Selenocysteine
  MOD_RES (170)..(170): Selenocysteine
  MOD_RES (172)..(172): Selenocysteine
  MOD_RES (196)..(196): Selenocysteine
  MOD_RES (208)..(209): Selenocysteine
  MOD_RES (215)..(215): Selenocysteine
  MOD_RES (240)..(240): Selenocysteine
  MOD_RES (252)..(253): Selenocysteine
  MOD_RES (255)..(255): Selenocysteine
  MOD_RES (311)..(311): Selenocysteine
  MOD_RES (320)..(320): Selenocysteine
  MOD_RES (323)..(323): Selenocysteine
  MOD_RES (339)..(339): Selenocysteine
  MOD_RES (350)..(350): Selenocysteine
  MOD_RES (412)..(412): Selenocysteine
  MOD_RES (448)..(448): Selenocysteine
  MOD_RES (454)..(454): Selenocysteine
  MOD_RES (457)..(457): Selenocysteine
  MOD_RES (491)..(491): Selenocysteine
  MOD_RES (494)..(494): Selenocysteine
MAAAAAAAPSGGGGGGEEERLEEKSEDQDLQGLKDKPLKFKKVKKDKKEEKEGKHEPVQPSAHHSAEPAEAGKAEXSEGSGSAPAVPEASASPKQRRSIIRDRGPMYDDPXLPEGWXRKLKQRKSGRSAGKYDVYLINPQGKAFRSKVELIAYFEKVGDXSLDPNDFDFXVXGRGSPSRREQKPPKKPKSPKAPGXGRGRGRPKGSGXXRPKAAXSEGVQVKRVLEKSPGKLLVKMPFQXSPGGKAEGGGAXXSXQVMVIKRPGRKRKAEADPQAIPKKRGRKPGSVVAAAAAEAKKKAVKESSIRSVQEXVLPIKKRKXREXVSIEVKEVVKPLLVSXLGEKSGKGLKXCKSPGRKSKESSPKGRSSSASSPPKKEHHHHHHHSESPKAPVPLLPPLPPPPPEPESSEDPXSPPEPQDLSSSVCKEEKMPRGGSLESDGCPKEPAKXQPAVAXAAXAAEKYKHRGEGERKDIVSSSMPRPNREEPVDSRXPVXERVS

SEQ ID NO: 16089 - protein, 168 aa, Homo sapiens
  MOD_RES (60)..(60): Selenocysteine
  MOD_RES (95)..(95): Selenocysteine
  MOD_RES (101)..(101): Selenocysteine
  MOD_RES (144)..(144): Selenocysteine
  MOD_RES (154)..(154): Selenocysteine
  MOD_RES (156)..(156): Selenocysteine
  MOD_RES (167)..(168): Selenocysteine
MLGLREEKSEDQDLQGLKDKPLKFKKVKKDKKEEKEGKHEPVQPSAHHSAEPAEAGKAEXSEGSGSAPAVPEASASPKQRRSIIRDRGPMYDDPXLPEGWXRKLKQRKSGRSAGKYDVYLINPQGKAFRSKVELIAYFEKVGDXSLDPNDFDFXVXGREPLPARAEXX

SEQ ID NO: 16090 - protein, 324 aa, Homo sapiens
  MOD_RES (60)..(60): Selenocysteine
  MOD_RES (95)..(95): Selenocysteine
  MOD_RES (101)..(101): Selenocysteine
  MOD_RES (144)..(144): Selenocysteine
  MOD_RES (154)..(154): Selenocysteine
  MOD_RES (156)..(156): Selenocysteine
  MOD_RES (180)..(180): Selenocysteine
  MOD_RES (192)..(193): Selenocysteine
  MOD_RES (199)..(199): Selenocysteine
  MOD_RES (224)..(224): Selenocysteine
  MOD_RES (236)..(237): Selenocysteine
  MOD_RES (239)..(239): Selenocysteine
  MOD_RES (296)..(296): Selenocysteine
MLGLREEKSEDQDLQGLKDKPLKFKKVKKDKKEEKEGKHEPVQPSAHHSAEPAEAGKAEXSEGSGSAPAVPEASASPKQRRSIIRDRGPMYDDPXLPEGWXRKLKQRKSGRSAGKYDVYLINPQGKAFRSKVELIAYFEKVGDXSLDPNDFDFXVXGRGSPSRREQKPPKKPKSPKAPGXGRGRGRPKGSGXXRPKAAXSEGVQVKRVLEKSPGKLLVKMPFQXSPGGKAEGGGAXXSXQVMVIKRPGRKRKAEADPQAIPKKRGRKPGSVVAAAAAEAKKKAVKEFYPICAGDRXPHQEAQDPGDGQHRGQGSGEAPAGVHPR

SEQ ID NO: 16091 - protein, 41 aa, Homo sapiens
MVAGMLGLREEKSEDQDLQGLKDKPLKFKKVKKDKKEEKEG

SEQ ID NO: 16092 - protein, 50 aa, Homo sapiens
MVAGMLGLREEKSEDQDLQGLKDKPLKFKKVKKDKKEEKEGKHEPVQPSA

SEQ ID NO: 16093 - protein, 172 aa, Homo sapiens
  MOD_RES (64)..(64): Selenocysteine
  MOD_RES (99)..(99): Selenocysteine
  MOD_RES (105)..(105): Selenocysteine
MVAGMLGLREEKSEDQDLQGLKDKPLKFKKVKKDKKEEKEGKHEPVQPSAHHSAEPAEAGKAEXSEGSGSAPAVPEASASPKQRRSIIRDRGPMYDDPXLPEGWXRKLKQRKSGRSAGKYDVYLINPQGKAFRSKVELIAYFEKLQELAEAGDAPKGAAPRDPRRPRQRVCR

SEQ ID NO: 16094 - protein, 486 aa, Homo sapiens
  MOD_RES (64)..(64): Selenocysteine
  MOD_RES (99)..(99): Selenocysteine
  MOD_RES (105)..(105): Selenocysteine
  MOD_RES (148)..(148): Selenocysteine
  MOD_RES (158)..(158): Selenocysteine
  MOD_RES (160)..(160): Selenocysteine
  MOD_RES (184)..(184): Selenocysteine
  MOD_RES (196)..(197): Selenocysteine
  MOD_RES (203)..(203): Selenocysteine
  MOD_RES (228)..(228): Selenocysteine
  MOD_RES (240)..(241): Selenocysteine
  MOD_RES (243)..(243): Selenocysteine
  MOD_RES (299)..(299): Selenocysteine
  MOD_RES (308)..(308): Selenocysteine
  MOD_RES (311)..(311): Selenocysteine
  MOD_RES (327)..(327): Selenocysteine
  MOD_RES (338)..(338): Selenocysteine
  MOD_RES (400)..(400): Selenocysteine
  MOD_RES (436)..(436): Selenocysteine
  MOD_RES (442)..(442): Selenocysteine
  MOD_RES (445)..(445): Selenocysteine
  MOD_RES (479)..(479): Selenocysteine
  MOD_RES (482)..(482): Selenocysteine
MVAGMLGLREEKSEDQDLQGLKDKPLKFKKVKKDKKEEKEGKHEPVQPSAHHSAEPAEAGKAEXSEGSGSAPAVPEASASPKQRRSIIRDRGPMYDDPXLPEGWXRKLKQRKSGRSAGKYDVYLINPQGKAFRSKVELIAYFEKVGDXSLDPNDFDFXVXGRGSPSRREQKPPKKPKSPKAPGXGRGRGRPKGSGXXRPKAAXSEGVQVKRVLEKSPGKLLVKMPFQXSPGGKAEGGGAXXSXQVMVIKRPGRKRKAEADPQAIPKKRGRKPGSVVAAAAAEAKKKAVKESSIRSVQEXVLPIKKRKXREXVSIEVKEVVKPLLVSXLGEKSGKGLKXCKSPGRKSKESSPKGRSSSASSPPKKEHHHHHHHSESPKAPVPLLPPLPPPPPEPESSEDPXSPPEPQDLSSSVCKEEKMPRGGSLESDGCPKEPAKXQPAVAXAAXAAEKYKHRGEGERKDIVSSSMPRPNREEPVDSRXPVXERVS

SEQ ID NO: 16095 - protein, 37 aa, Homo sapiens
MVAGMLGLSCKMGFRSVLKPVVPGPRREKQLPGEVSS

SEQ ID NO: 16096 - protein, 53 aa, Homo sapiens
  MOD_RES (1)..(1): Any amino acid
  MOD_RES (24)..(24): Selenocysteine
  MOD_RES (33)..(33): Selenocysteine
  MOD_RES (36)..(36): Selenocysteine
  MOD_RES (52)..(52): Selenocysteine
XLINPQGKAFRSKVELIAYFEKEXVLPIKKRKXREXVSIEVKEVVKPLLVSXL

SEQ ID NO: 16097 - protein, 97 aa, Homo sapiens
  MOD_RES (7)..(7): Selenocysteine
  MOD_RES (36)..(36): Selenocysteine
  MOD_RES (64)..(64): Selenocysteine
  MOD_RES (72)..(72): Selenocysteine
  MOD_RES (78)..(78): Selenocysteine
MKAQGEXEESEKLSKMSSLLERLHAKFNQNRPWSEXIKLVRQVMEKRVVMSSGGHQHLVSCLEXLQKALKVXSLPAMXDRLESIARQNGAVRSLYSS

SEQ ID NO: 16098 - protein, 556 aa, Homo sapiens
  MOD_RES (7)..(7): Selenocysteine
  MOD_RES (36)..(36): Selenocysteine
  MOD_RES (64)..(64): Selenocysteine
  MOD_RES (72)..(72): Selenocysteine
  MOD_RES (78)..(78): Selenocysteine
  MOD_RES (99)..(99): Selenocysteine
  MOD_RES (104)..(104): Selenocysteine
  MOD_RES (171)..(171): Selenocysteine
  MOD_RES (195)..(195): Selenocysteine
  MOD_RES (212)..(212): Selenocysteine
  MOD_RES (236)..(236): Selenocysteine
  MOD_RES (258)..(258): Selenocysteine
  MOD_RES (262)..(262): Selenocysteine
  MOD_RES (285)..(285): Selenocysteine
  MOD_RES (292)..(292): Selenocysteine
  MOD_RES (325)..(325): Selenocysteine
  MOD_RES (332)..(332): Selenocysteine
  MOD_RES (335)..(335): Selenocysteine
  MOD_RES (344)..(344): Selenocysteine
  MOD_RES (391)..(391): Selenocysteine
  MOD_RES (397)..(397): Selenocysteine
  MOD_RES (419)..(419): Selenocysteine
  MOD_RES (428)..(428): Selenocysteine
  MOD_RES (473)..(473): Selenocysteine
  MOD_RES (490)..(490): Selenocysteine
  MOD_RES (507)..(507): Selenocysteine
  MOD_RES (517)..(517): Selenocysteine
  MOD_RES (522)..(522): Selenocysteine
  MOD_RES (531)..(531): Selenocysteine
MKAQGEXEESEKLSKMSSLLERLHAKFNQNRPWSEXIKLVRQVMEKRVVMSSGGHQHLVSCLEXLQKALKVXSLPAMXDRLESIARQNGLGSHLSASGXECYIXSDMFYVEVQLDPAGQLCDVKVAHHGENPVSCPELVQQLREKNFDEFSKHLKGLVNLYNLPGDNKLKXKMYLALQSLEQDLSKMAIMYWKAXNAGPLDKILHGSVGYLXPRSGGHLMNLKYYVSPSDLLDDKXASPIILHENNVSRSLGMNASVXIEGXSAVYKLPIAPLIMGSHPVDNKWXPSFSSIXSANSVDLPACFFLKFPQPIPVSRAFVQKLQNCXGIPLFEXQPXYAPLYELIXQFELSKDPDPIPLNHNMRFYAALPGQQHCYFLNKDAPLPDGRSLQGXLVSKIXFQHPGRVPLILNLIRHQVAYNXLIGSCVKRXILKEDSPGLLQFEVCPLSESRFSVSFQHPVNDSLVCVVMDVQDSXHVSCKLYKGLSDALICXDDFIAKVVQRCMSIPVXMRAIRRKAEXIQADXPALSLIAEXVEDMVKKNLPPASSPGSKNPELGSG

SEQ ID NO: 16099 - protein, 1581 aa, Homo sapiens
  MOD_RES (7)..(7): Selenocysteine
  MOD_RES (36)..(36): Selenocysteine
  MOD_RES (64)..(64): Selenocysteine
  MOD_RES (72)..(72): Selenocysteine
  MOD_RES (78)..(78): Selenocysteine
  MOD_RES (99)..(99): Selenocysteine
  MOD_RES (104)..(104): Selenocysteine
  MOD_RES (171)..(171): Selenocysteine
  MOD_RES (195)..(195): Selenocysteine
  MOD_RES (212)..(212): Selenocysteine
  MOD_RES (236)..(236): Selenocysteine
  MOD_RES (258)..(258): Selenocysteine
  MOD_RES (262)..(262): Selenocysteine
  MOD_RES (285)..(285): Selenocysteine
  MOD_RES (292)..(292): Selenocysteine
  MOD_RES (325)..(325): Selenocysteine
  MOD_RES (332)..(332): Selenocysteine
  MOD_RES (335)..(335): Selenocysteine
  MOD_RES (344)..(344): Selenocysteine
  MOD_RES (391)..(391): Selenocysteine
  MOD_RES (397)..(397): Selenocysteine
  MOD_RES (419)..(419): Selenocysteine
  MOD_RES (428)..(428): Selenocysteine
  MOD_RES (473)..(473): Selenocysteine
  MOD_RES (490)..(490): Selenocysteine
  MOD_RES (507)..(507): Selenocysteine
  MOD_RES (517)..(517): Selenocysteine
  MOD_RES (522)..(522): Selenocysteine
  MOD_RES (531)..(531): Selenocysteine
  MOD_RES (551)..(552): Selenocysteine
  MOD_RES (560)..(562): Selenocysteine
  MOD_RES (564)..(564): Selenocysteine
  MOD_RES (566)..(566): Selenocysteine
  MOD_RES (573)..(574): Selenocysteine
  MOD_RES (605)..(605): Selenocysteine
  MOD_RES (611)..(611): Selenocysteine
  MOD_RES (617)..(617): Selenocysteine
  MOD_RES (623)..(623): Selenocysteine
  MOD_RES (628)..(628): Selenocysteine
  MOD_RES (639)..(639): Selenocysteine
  MOD_RES (659)..(659): Selenocysteine
  MOD_RES (687)..(687): Selenocysteine
  MOD_RES (704)..(704): Selenocysteine
  MOD_RES (729)..(729): Selenocysteine
  MOD_RES (732)..(732): Selenocysteine
  MOD_RES (735)..(735): Selenocysteine
  MOD_RES (739)..(739): Selenocysteine
  MOD_RES (747)..(747): Selenocysteine
  MOD_RES (750)..(751): Selenocysteine
  MOD_RES (780)..(780): Selenocysteine
  MOD_RES (796)..(796): Selenocysteine
  MOD_RES (805)..(805): Selenocysteine
  MOD_RES (819)..(819): Selenocysteine
  MOD_RES (828)..(828): Selenocysteine
  MOD_RES (836)..(836): Selenocysteine
  MOD_RES (855)..(855): Selenocysteine
  MOD_RES (905)..(905): Selenocysteine
  MOD_RES (918)..(918): Selenocysteine
  MOD_RES (928)..(928): Selenocysteine
  MOD_RES (959)..(960): Selenocysteine
  MOD_RES (968)..(968): Selenocysteine
  MOD_RES (978)..(978): Selenocysteine
  MOD_RES (982)..(982): Selenocysteine
  MOD_RES (998)..(998): Selenocysteine
  MOD_RES (1017)..(1017): Selenocysteine
  MOD_RES (1032)..(1032): Selenocysteine
  MOD_RES (1035)..(1035): Selenocysteine
  MOD_RES (1037)..(1037): Selenocysteine
  MOD_RES (1051)..(1051): Selenocysteine
  MOD_RES (1057)..(1057): Selenocysteine
  MOD_RES (1064)..(1064): Selenocysteine
  MOD_RES (1071)..(1071): Selenocysteine
  MOD_RES (1084)..(1084): Selenocysteine
  MOD_RES (1110)..(1110): Selenocysteine
  MOD_RES (1159)..(1159): Selenocysteine
  MOD_RES (1170)..(1170): Selenocysteine
  MOD_RES (1215)..(1215): Selenocysteine
  MOD_RES (1237)..(1237): Selenocysteine
  MOD_RES (1259)..(1259): Selenocysteine
  MOD_RES (1267)..(1267): Selenocysteine
  MOD_RES (1304)..(1304): Selenocysteine
  MOD_RES (1316)..(1316): Selenocysteine
  MOD_RES (1333)..(1333): Selenocysteine
  MOD_RES (1367)..(1367): Selenocysteine
  MOD_RES (1378)..(1378): Selenocysteine
  MOD_RES (1387)..(1387): Selenocysteine
  MOD_RES (1409)..(1409): Selenocysteine
  MOD_RES (1440)..(1440): Selenocysteine
  MOD_RES (1457)..(1457): Selenocysteine
  MOD_RES (1494)..(1494): Selenocysteine
  MOD_RES (1547)..(1547): Selenocysteine
  MOD_RES (1550)..(1550): Selenocysteine
MKAQGEXEESEKLSKMSSLLERLHAKFNQNRPWSEXIKLVRQVMEKRVVMSSGGHQHLVSCLEXLQKALKVXSLPAMXDRLESIARQNGLGSHLSASGXECYIXSDMFYVEVQLDPAGQLCDVKVAHHGENPVSCPELVQQLREKNFDEFSKHLKGLVNLYNLPGDNKLKXKMYLALQSLEQDLSKMAIMYWKAXNAGPLDKILHGSVGYLXPRSGGHLMNLKYYVSPSDLLDDKXASPIILHENNVSRSLGMNASVXIEGXSAVYKLPIAPLIMGSHPVDNKWXPSFSSIXSANSVDLPACFFLKFPQPIPVSRAFVQKLQNCXGIPLFEXQPXYAPLYELIXQFELSKDPDPIPLNHNMRFYAALPGQQHCYFLNKDAPLPDGRSLQGXLVSKIXFQHPGRVPLILNLIRHQVAYNXLIGSCVKRXILKEDSPGLLQFEVCPLSESRFSVSFQHPVNDSLVCVVMDVQDSXHVSCKLYKGLSDALICXDDFIAKVVQRCMSIPVXMRAIRRKAEXIQADXPALSLIAEXVEDMVKKNLPPASSPGYGMXXGNNPMSGXXXPXNXFPGGPIXXLFNMSMSIKDRHESVGHGEDFSKVSQNPILXSLLQIXGNGGSXIGSSPXPPHHXPPPVSSMAGNXKNHPMLMNLLKDNPAQDFSXLYGSSPLERQNSSSGSPRMEICSGSNKXKKKKSSRLPPEKPKHQXEDDFQRELFSMDVDSQNPIFDVNMXADXLDXPHIXPAPSQCSXPPXXYPQPVPHPQPSIQRMVRLSSSDSIGPDVXDILSDIAEEASKLPSXSDDCPAIGXPLRDSSSSGHSQSXLFDSDVFQXNNNENPYXDPADLIADAAGSPSSDSPXNHFFHDGVDFNPDLLNSQSQSGFGEEYFDESSQSGDNDDFKGFASQALNXLGVPMLGGDNGEXKFKGNNQADXVDFSIISVAGKALAPADLMEHHSGSQGPLLXXGDLGKEKXQKRVKEGNGXSNSXLSGPGLDSKPGKRSRXPSNDGKSKDKPPKRKKADXEGKSPSHSSSNRPFXPPXSXGGSKSPGSAGRSQXPPGVAXPPIPKIXIQIPKGXVMVGKPSSHSQYXSSGSVSSSGSKSHHSHSSSSSSSASXSGKMKSSKSEGSSSSKLSSSMYSSQGSSGSSQSKNSSQSGGKPGSSPIXKHGLSSGSSSXKMKPQGKPSSLMNPSLSKPNISPSHSRPPGGSDKLASPMKPVPGXPPSSKAKSPISSGSGGSHMSGXSSSSGMKSSSGLGSSGSLSQKXPPSSNSCXASSSSFSSSGSSMSSSQNQHGSSKGKSPSRNKKPSLXAVIDKLKHGVVXSGPGGEDPLDGQMGVSXNSSSHPMSSKHNMSGGEFQGKREKSDKDKSKVSXSGSSVDSSKKXSESKNVGSXGVAKIIISKHDGGSPSIKAKVXLQKPGESSGEGLRPQMASSKNYGSPLISGSXPKHERGSPSHSKSPAYXPQNLDSESESGSSIAEKSYQNSPSSDDGIRPLPEYSXEKHKKHKKEKKKVKDKDRDRDRDKDRDKKKSHSIKPESWSKSPISSDQSLSMXSNXILSADRPSRLSPDFMIGEEDDDLMDVALIGN

SEQ ID NO: 16100 - protein, 79 aa, Homo sapiens
  MOD_RES (7)..(7): Selenocysteine
  MOD_RES (36)..(36): Selenocysteine
  MOD_RES (76)..(76): Selenocysteine
MKAQGEXEESEKLSKMSSLLERLHAKFNQNRPWSEXIKLVRQVMFCRFRNLILLVHQDFIEFSWLGVVVHICNPSXLGG

SEQ ID NO: 16101 - protein, 2176 aa, Homo sapiens
  MOD_RES (37)..(37): Selenocysteine
  MOD_RES (85)..(85): Selenocysteine
  MOD_RES (89)..(89): Selenocysteine
  MOD_RES (106)..(106): Selenocysteine
  MOD_RES (115)..(115): Selenocysteine
  MOD_RES (118)..(118): Selenocysteine
  MOD_RES (123)..(123): Selenocysteine
  MOD_RES (127)..(127): Selenocysteine
  MOD_RES (150)..(150): Selenocysteine
  MOD_RES (163)..(163): Selenocysteine
  MOD_RES (173)..(173): Selenocysteine
  MOD_RES (187)..(187): Selenocysteine
  MOD_RES (191)..(191): Selenocysteine
  MOD_RES (218)..(218): Selenocysteine
  MOD_RES (236)..(236): Selenocysteine
  MOD_RES (256)..(256): Selenocysteine
  MOD_RES (302)..(302): Selenocysteine
  MOD_RES (325)..(325): Selenocysteine
  MOD_RES (327)..(327): Selenocysteine
  MOD_RES (330)..(331): Selenocysteine
  MOD_RES (338)..(338): Selenocysteine
  MOD_RES (341)..(341): Selenocysteine
  MOD_RES (344)..(344): Selenocysteine
  MOD_RES (368)..(368): Selenocysteine
  MOD_RES (384)..(384): Selenocysteine
  MOD_RES (390)..(390): Selenocysteine
  MOD_RES (414)..(414): Selenocysteine
  MOD_RES (448)..(448): Selenocysteine
  MOD_RES (452)..(452): Selenocysteine
  MOD_RES (459)..(459): Selenocysteine
  MOD_RES (576)..(576): Selenocysteine
  MOD_RES (582)..(582): Selenocysteine
  MOD_RES (615)..(615): Selenocysteine
  MOD_RES (617)..(617): Selenocysteine
  MOD_RES (690)..(690): Selenocysteine
  MOD_RES (721)..(721): Selenocysteine
  MOD_RES (736)..(736): Selenocysteine
  MOD_RES (775)..(775): Selenocysteine
  MOD_RES (787)..(787): Selenocysteine
  MOD_RES (790)..(790): Selenocysteine
  MOD_RES (805)..(805): Selenocysteine
  MOD_RES (825)..(825): Selenocysteine
  MOD_RES (845)..(845): Selenocysteine
  MOD_RES (857)..(857): Selenocysteine
  MOD_RES (919)..(920): Selenocysteine
  MOD_RES (980)..(980): Selenocysteine
  MOD_RES (1003)..(1003): Selenocysteine
  MOD_RES (1025)..(1025): Selenocysteine
  MOD_RES (1033)..(1033): Selenocysteine
  MOD_RES (1035)..(1035): Selenocysteine
  MOD_RES (1037)..(1037): Selenocysteine
  MOD_RES (1082)..(1082): Selenocysteine
  MOD_RES (1107)..(1107): Selenocysteine
  MOD_RES (1130)..(1130): Selenocysteine
  MOD_RES (1172)..(1172): Selenocysteine
  MOD_RES (1182)..(1182): Selenocysteine
  MOD_RES (1196)..(1196): Selenocysteine
  MOD_RES (1241)..(1241): Selenocysteine
  MOD_RES (1243)..(1243): Selenocysteine
  MOD_RES (1246)..(1246): Selenocysteine
  MOD_RES (1272)..(1272): Selenocysteine
  MOD_RES (1355)..(1355): Selenocysteine
  MOD_RES (1370)..(1370): Selenocysteine
  MOD_RES (1386)..(1386): Selenocysteine
  MOD_RES (1396)..(1396): Selenocysteine
  MOD_RES (1403)..(1403): Selenocysteine
  MOD_RES (1413)..(1413): Selenocysteine
  MOD_RES (1437)..(1437): Selenocysteine
  MOD_RES (1487)..(1487): Selenocysteine
  MOD_RES (1501)..(1501): Selenocysteine
  MOD_RES (1546)..(1546): Selenocysteine
  MOD_RES (1551)..(1551): Selenocysteine
  MOD_RES (1554)..(1555): Selenocysteine
  MOD_RES (1569)..(1569): Selenocysteine
  MOD_RES (1580)..(1581): Selenocysteine
  MOD_RES (1593)..(1593): Selenocysteine
  MOD_RES (1645)..(1645): Selenocysteine
  MOD_RES (1650)..(1650): Selenocysteine
  MOD_RES (1660)..(1660): Selenocysteine
  MOD_RES (1681)..(1681): Selenocysteine
  MOD_RES (1707)..(1707): Selenocysteine
  MOD_RES (1728)..(1728): Selenocysteine
  MOD_RES (1755)..(1755): Selenocysteine
  MOD_RES (1769)..(1769): Selenocysteine
  MOD_RES (1779)..(1779): Selenocysteine
  MOD_RES (1787)..(1787): Selenocysteine
  MOD_RES (1797)..(1797): Selenocysteine
  MOD_RES (1799)..(1799): Selenocysteine
  MOD_RES (1815)..(1815): Selenocysteine
  MOD_RES (1830)..(1830): Selenocysteine
  MOD_RES (1843)..(1843): Selenocysteine
  MOD_RES (1870)..(1870): Selenocysteine
  MOD_RES (1873)..(1873): Selenocysteine
  MOD_RES (1880)..(1881): Selenocysteine
  MOD_RES (1883)..(1883): Selenocysteine
  MOD_RES (1895)..(1895): Selenocysteine
  MOD_RES (1930)..(1930): Selenocysteine
  MOD_RES (1939)..(1939): Selenocysteine
  MOD_RES (1944)..(1944): Selenocysteine
  MOD_RES (1956)..(1956): Selenocysteine
  MOD_RES (1961)..(1961): Selenocysteine
  MOD_RES (1975)..(1975): Selenocysteine
  MOD_RES (1979)..(1979): Selenocysteine
  MOD_RES (1982)..(1982): Selenocysteine
  MOD_RES (1987)..(1987): Selenocysteine
  MOD_RES (2004)..(2004): Selenocysteine
  MOD_RES (2010)..(2010): Selenocysteine
  MOD_RES (2012)..(2012): Selenocysteine
  MOD_RES (2019)..(2019): Selenocysteine
  MOD_RES (2023)..(2023): Selenocysteine
  MOD_RES (2028)..(2028): Selenocysteine
  MOD_RES (2030)..(2030): Selenocysteine
  MOD_RES (2044)..(2044): Selenocysteine
  MOD_RES (2144)..(2144): Selenocysteine
  MOD_RES (2150)..(2150): Selenocysteine
  MOD_RES (2164)..(2164): Selenocysteine
  MOD_RES (2170)..(2170): Selenocysteine
MAAFGILSYEHRPLKRPRLGPPDVYPQDPKQKEDELXALNVKQGFNNQPAVSGDEHGSAKNVSFNPAKISSNFSSIIAEKLRCNXLPDXGRRKPQVNQKDNFWLVXARSQSAINXWFXDLAGXKPLXQLAKKVPIFSKKEEVFGYLAKYXVPVMRAAWLIKMXCAYYAAISEXKVKKRHVDPFMEWXQIIXKYLWEQLQKMAEYYRPGPAGSGGCGSXIGPLPHDVEVAIRQWDYXEKLAMFMFQDGMLDRHEFLXWVLECFEKIRPGEDELLKLLLPLLLRYSGEFVQSAYLSRRLAYFCXRRLALQLDGVSSHSSHVISAQSXSXLPXXPAPQPPXSSXPSXPFSDLLMCPQHRPLVFGLSCILQXILLCCPSALVWHYSLXDSRIKXGSPLDHLPIAPSNLPMPEGNSAFXQQVRAKLREIEQQIKERGQAVEVRWSFDKCQEAXAGFXIGRVLHXLEVLDSHSFERSDFSNSLDSLCNRIFGLGPSKDGHEISSDDDAVVSLLCEWAVSCKRSGRHRAMVVAKLLEKRQAEIEAERCGESEAADEKGSIASGSLSAPSAPIFQDVLLQFLDXQAPMLXDPRSESERVEFFNLVLLFCELIRHDVFSHNMYXCXLISRGDLAFGAPGPRPPSPFDDPADDPEHKEAEGSSSSKLEDPGLSESMDIDPSSSVLFEDMEKPDFSLFSPXMPCEGKGSPSPEKPDVEKEVKPPPKEKIEGXLGVLYDQPRHVQYAXHFPIPQEESCSHECNQRLVVLFGVGKQRDDARHAIKKIXKDILKVLNRKGXAEXDQLAPIVPLNPGDLXFLGGEDGQKRRRNRPEAFPXAEDIFAKFQHLSHYDQHQVXAQVSRNVLEQIXSFALGMSYHLPLVQHVQFIFDLMEYSLSISGLIDFAIQLLNELSVVEAELLLKSSDLVGSYXXSLCLCIVAVLRHYHACLILNQDQMAQVFEGLCGVVKHGMNRSDGSSAERCILAYLYDLYXSCSHLKNKFGELFSDFCSKVKNXIYCNVEPSESNMRWAPEFMIDXLENPAAHXFXYXGLGKSLSENPANRYSFVCNALMHVCVGHHDPDRVNDIAILCAELXGYCKSLSAEWLGVLKALCCSSNNGXCGFNDLLCNVDVSDLSFHDSLAXFVAILIARQCLLLEDLIRCAAIPSLLNAACSEQDSEPGARLXCRILLHLFKXPQLNPCQSDGNKPXVGIRSSCDRHLLAASQNRIVDGAVFAVLKAVFVLGDAELKGSGFXVXGGXEELPEEEGGGGSGGRRQGGRNISVEXASLDVYAKYVLRSICQQEWVGERCLKSLCEDSNDLQDPVLSSAQAQRLMQLICYPHRLLDNEDGENPQRQRIKRILQNLDQWXMRQSSLELQLMIKQXPNNEMNSLLENIAKAXIEVFQQSAEXGSSSGSXASNMPSSSKXKPVLSSLERSGVWLVAPLIAKLPXSVQGHVLKAAGEELEKGQHLGSSSRKERDRQKQKSMSLLSQQPFLSLVLXCLKGQDEQREGLLXSLYSQVHQIVNNWRDDQYLDDCKPKQLMHEALKLRLNLVGGMFDXVQRSXQQXXEWAMLLLEIIISGXVDMQSNNELFXXVLDMLSVLINGXLAADMSSISQGSMEENKRAYMNLAKKLQKELGERQSDSLEKVRQLLPLPKQXRDVIXCEPQGSLIDXKGNKIAGFDSIFKKEGLQVSXKQKISPWDLFEGLKPSAPLSWGWFGXVRVDRRVARGEEQQRLLLYHXHLRPRPRAYYLEPLPLPPEDEEPPAPXLLEPEKKAPEPPKXDKPGAAPPSXEERKKKSXKGKKRSQPAXKXEDYGMGPGRSGPYGVXVPPDLLHHPNPGSIXHLNYRQGSIGLYXQNQPLPAGGPRVDPYRPVRLPMQKLPXRPXYPGVLPXXMXGVMGLEPSSYKXSVYRQQQPAVPQGQRLRQQLQSQGMLGQSSVHQMXPSSSYGLQXSQGYXPYVSHVGLQQHXGPAGXMVPPSYSSQPYQSXHPSXNPXLVDPXRHLQQRPSGYVHQQAPXYGHGLXSXQRFSHQXLQQXPMISXMXPMSAQGVQAGVRSXAILPEQQQQQQQQQQQQQQQQQQQQQQQQQQYHIRQQQQQQILRQQQQQQQQQQQQQQQQQQQQQQQQQQHQQQQQQQAAPPQPQPQSQPQFQRQGLQQXQQQQQXAALVRQLQQQLSNXQPQPSXNIFGRY

SEQ ID NO: 16102 - protein, 2177 aa, Homo sapiens
  MOD_RES (37)..(37): Selenocysteine
  MOD_RES (85)..(85): Selenocysteine
  MOD_RES (89)..(89): Selenocysteine
  MOD_RES (106)..(106): Selenocysteine
  MOD_RES (115)..(115): Selenocysteine
  MOD_RES (118)..(118): Selenocysteine
  MOD_RES (123)..(123): Selenocysteine
  MOD_RES (127)..(127): Selenocysteine
  MOD_RES (150)..(150): Selenocysteine
  MOD_RES (163)..(163): Selenocysteine
  MOD_RES (173)..(173): Selenocysteine
  MOD_RES (187)..(187): Selenocysteine
  MOD_RES (191)..(191): Selenocysteine
  MOD_RES (218)..(218): Selenocysteine
  MOD_RES (236)..(236): Selenocysteine
  MOD_RES (256)..(256): Selenocysteine
  MOD_RES (302)..(302): Selenocysteine
  MOD_RES (325)..(325): Selenocysteine
  MOD_RES (327)..(327): Selenocysteine
  MOD_RES (330)..(331): Selenocysteine
  MOD_RES (338)..(338): Selenocysteine
  MOD_RES (341)..(341): Selenocysteine
  MOD_RES (344)..(344): Selenocysteine
  MOD_RES (368)..(368): Selenocysteine
  MOD_RES (384)..(384): Selenocysteine
  MOD_RES (390)..(390): Selenocysteine
  MOD_RES (414)..(414): Selenocysteine
  MOD_RES (448)..(448): Selenocysteine
  MOD_RES (452)..(452): Selenocysteine
  MOD_RES (459)..(459): Selenocysteine
  MOD_RES (576)..(576): Selenocysteine
  MOD_RES (582)..(582): Selenocysteine
  MOD_RES (615)..(615): Selenocysteine
  MOD_RES (617)..(617): Selenocysteine
  MOD_RES (690)..(690): Selenocysteine
  MOD_RES (721)..(721): Selenocysteine
  MOD_RES (736)..(736): Selenocysteine
  MOD_RES (775)..(775): Selenocysteine
  MOD_RES (787)..(787): Selenocysteine
  MOD_RES (790)..(790): Selenocysteine
  MOD_RES (805)..(805): Selenocysteine
  MOD_RES (825)..(825): Selenocysteine
  MOD_RES (845)..(845): Selenocysteine
  MOD_RES (857)..(857): Selenocysteine
  MOD_RES (919)..(920): Selenocysteine
  MOD_RES (980)..(980): Selenocysteine
  MOD_RES (1003)..(1003): Selenocysteine
  MOD_RES (1025)..(1025): Selenocysteine
  MOD_RES (1033)..(1033): Selenocysteine
  MOD_RES (1035)..(1035): Selenocysteine
  MOD_RES (1037)..(1037): Selenocysteine
  MOD_RES (1082)..(1082): Selenocysteine
  MOD_RES (1107)..(1107): Selenocysteine
  MOD_RES (1130)..(1130): Selenocysteine
  MOD_RES (1172)..(1172): Selenocysteine
  MOD_RES (1182)..(1182): Selenocysteine
  MOD_RES (1196)..(1196): Selenocysteine
  MOD_RES (1241)..(1241): Selenocysteine
  MOD_RES (1243)..(1243): Selenocysteine
  MOD_RES (1246)..(1246): Selenocysteine
  MOD_RES (1272)..(1272): Selenocysteine
  MOD_RES (1355)..(1355): Selenocysteine
  MOD_RES (1370)..(1370): Selenocysteine
  MOD_RES (1386)..(1386): Selenocysteine
  MOD_RES (1396)..(1396): Selenocysteine
  MOD_RES (1403)..(1403): Selenocysteine
  MOD_RES (1413)..(1413): Selenocysteine
  MOD_RES (1437)..(1437): Selenocysteine
  MOD_RES (1487)..(1487): Selenocysteine
  MOD_RES (1501)..(1501): Selenocysteine
  MOD_RES (1546)..(1546): Selenocysteine
  MOD_RES (1551)..(1551): Selenocysteine
  MOD_RES (1554)..(1555): Selenocysteine
  MOD_RES (1569)..(1569): Selenocysteine
  MOD_RES (1580)..(1581): Selenocysteine
  MOD_RES (1593)..(1593): Selenocysteine
  MOD_RES (1645)..(1645): Selenocysteine
  MOD_RES (1650)..(1650): Selenocysteine
  MOD_RES (1660)..(1660): Selenocysteine
  MOD_RES (1681)..(1681): Selenocysteine
  MOD_RES (1707)..(1707): Selenocysteine
  MOD_RES (1728)..(1728): Selenocysteine
  MOD_RES (1755)..(1755): Selenocysteine
  MOD_RES (1769)..(1769): Selenocysteine
  MOD_RES (1779)..(1779): Selenocysteine
  MOD_RES (1787)..(1787): Selenocysteine
  MOD_RES (1797)..(1797): Selenocysteine
  MOD_RES (1799)..(1799): Selenocysteine
  MOD_RES (1815)..(1815): Selenocysteine
  MOD_RES (1830)..(1830): Selenocysteine
  MOD_RES (1843)..(1843): Selenocysteine
  MOD_RES (1870)..(1870): Selenocysteine
  MOD_RES (1873)..(1873): Selenocysteine
  MOD_RES (1880)..(1881): Selenocysteine
  MOD_RES (1883)..(1883): Selenocysteine
  MOD_RES (1895)..(1895): Selenocysteine
  MOD_RES (1931)..(1931): Selenocysteine
  MOD_RES (1940)..(1940): Selenocysteine
  MOD_RES (1945)..(1945): Selenocysteine
  MOD_RES (1957)..(1957): Selenocysteine
  MOD_RES (1962)..(1962): Selenocysteine
  MOD_RES (1976)..(1976): Selenocysteine
  MOD_RES (1980)..(1980): Selenocysteine
  MOD_RES (1983)..(1983): Selenocysteine
  MOD_RES (1988)..(1988): Selenocysteine
  MOD_RES (2005)..(2005): Selenocysteine
  MOD_RES (2011)..(2011): Selenocysteine
  MOD_RES (2013)..(2013): Selenocysteine
  MOD_RES (2020)..(2020): Selenocysteine
  MOD_RES (2024)..(2024): Selenocysteine
  MOD_RES (2029)..(2029): Selenocysteine
  MOD_RES (2031)..(2031): Selenocysteine
  MOD_RES (2045)..(2045): Selenocysteine
  MOD_RES (2145)..(2145): Selenocysteine
  MOD_RES (2151)..(2151): Selenocysteine
  MOD_RES (2165)..(2165): Selenocysteine
  MOD_RES (2171)..(2171): Selenocysteine
MAAFGILSYEHRPLKRPRLGPPDVYPQDPKQKEDELXALNVKQGFNNQPAVSGDEHGSAKNVSFNPAKISSNFSSIIAEKLRCNXLPDXGRRKPQVNQKDNFWLVXARSQSAINXWFXDLAGXKPLXQLAKKVPIFSKKEEVFGYLAKYXVPVMRAAWLIKMXCAYYAAISEXKVKKRHVDPFMEWXQIIXKYLWEQLQKMAEYYRPGPAGSGGCGSXIGPLPHDVEVAIRQWDYXEKLAMFMFQDGMLDRHEFLXWVLECFEKIRPGEDELLKLLLPLLLRYSGEFVQSAYLSRRLAYFCXRRLALQLDGVSSHSSHVISAQSXSXLPXXPAPQPPXSSXPSXPFSDLLMCPQHRPLVFGLSCILQXILLCCPSALVWHYSLXDSRIKXGSPLDHLPIAPSNLPMPEGNSAFXQQVRAKLREIEQQIKERGQAVEVRWSFDKCQEAXAGFXIGRVLHXLEVLDSHSFERSDFSNSLDSLCNRIFGLGPSKDGHEISSDDDAVVSLLCEWAVSCKRSGRHRAMVVAKLLEKRQAEIEAERCGESEAADEKGSIASGSLSAPSAPIFQDVLLQFLDXQAPMLXDPRSESERVEFFNLVLLFCELIRHDVFSHNMYXCXLISRGDLAFGAPGPRPPSPFDDPADDPEHKEAEGSSSSKLEDPGLSESMDIDPSSSVLFEDMEKPDFSLFSPXMPCEGKGSPSPEKPDVEKEVKPPPKEKIEGXLGVLYDQPRHVQYAXHFPIPQEESCSHECNQRLVVLFGVGKQRDDARHAIKKIXKDILKVLNRKGXAEXDQLAPIVPLNPGDLXFLGGEDGQKRRRNRPEAFPXAEDIFAKFQHLSHYDQHQVXAQVSRNVLEQIXSFALGMSYHLPLVQHVQFIFDLMEYSLSISGLIDFAIQLLNELSVVEAELLLKSSDLVGSYXXSLCLCIVAVLRHYHACLILNQDQMAQVFEGLCGVVKHGMNRSDGSSAERCILAYLYDLYXSCSHLKNKFGELFSDFCSKVKNXIYCNVEPSESNMRWAPEFMIDXLENPAAHXFXYXGLGKSLSENPANRYSFVCNALMHVCVGHHDPDRVNDIAILCAELXGYCKSLSAEWLGVLKALCCSSNNGXCGFNDLLCNVDVSDLSFHDSLAXFVAILIARQCLLLEDLIRCAAIPSLLNAACSEQDSEPGARLXCRILLHLFKXPQLNPCQSDGNKPXVGIRSSCDRHLLAASQNRIVDGAVFAVLKAVFVLGDAELKGSGFXVXGGXEELPEEEGGGGSGGRRQGGRNISVEXASLDVYAKYVLRSICQQEWVGERCLKSLCEDSNDLQDPVLSSAQAQRLMQLICYPHRLLDNEDGENPQRQRIKRILQNLDQWXMRQSSLELQLMIKQXPNNEMNSLLENIAKAXIEVFQQSAEXGSSSGSXASNMPSSSKXKPVLSSLERSGVWLVAPLIAKLPXSVQGHVLKAAGEELEKGQHLGSSSRKERDRQKQKSMSLLSQQPFLSLVLXCLKGQDEQREGLLXSLYSQVHQIVNNWRDDQYLDDCKPKQLMHEALKLRLNLVGGMFDXVQRSXQQXXEWAMLLLEIIISGXVDMQSNNELFXXVLDMLSVLINGXLAADMSSISQGSMEENKRAYMNLAKKLQKELGERQSDSLEKVRQLLPLPKQXRDVIXCEPQGSLIDXKGNKIAGFDSIFKKEGLQVSXKQKISPWDLFEGLKPSAPLSWGWFGXVRVDRRVARGEEQQRLLLYHXHLRPRPRAYYLEPLPLPPEDEEPPAPXLLEPEKKAPEPPKXDKPGAAPPSXEERKKKSXKGKKRSQPAXKXEDYGMGPGRSGPYGVXVPPDLLHHPNPGSIXHLNYRQGSIGLYXQNQPLPAGGPRVDPYRPVRLPMQKLPXRPXYPGVLPXXMXGVMGLEPSSYKXSVYRQQQPAVPQGQRLRQQLQQSQGMLGQSSVHQMXPSSSYGLQXSQGYXPYVSHVGLQQHXGPAGXMVPPSYSSQPYQSXHPSXNPXLVDPXRHLQQRPSGYVHQQAPXYGHGLXSXQRFSHQXLQQXPMISXMXPMSAQGVQAGVRSXAILPEQQQQQQQQQQQQQQQQQQQQQQQQQQYHIRQQQQQQILRQQQQQQQQQQQQQQQQQQQQQQQQQQHQQQQQQQAAPPQPQPQSQPQFQRQGLQQXQQQQQXAALVRQLQQQLSNXQPQPSXNIFGRY

SEQ ID NO: 16103 - protein, 2027 aa, Homo sapiens
  MOD_RES (10)..(10): Selenocysteine
  MOD_RES (20)..(20): Selenocysteine
  MOD_RES (34)..(34): Selenocysteine
  MOD_RES (38)..(38): Selenocysteine
  MOD_RES (65)..(65): Selenocysteine
  MOD_RES (83)..(83): Selenocysteine
  MOD_RES (103)..(103): Selenocysteine
  MOD_RES (149)..(149): Selenocysteine
  MOD_RES (172)..(172): Selenocysteine
  MOD_RES (174)..(174): Selenocysteine
  MOD_RES (177)..(178): Selenocysteine
  MOD_RES (185)..(185): Selenocysteine
  MOD_RES (188)..(188): Selenocysteine
  MOD_RES (191)..(191): Selenocysteine
  MOD_RES (215)..(215): Selenocysteine
  MOD_RES (231)..(231): Selenocysteine
  MOD_RES (237)..(237): Selenocysteine
  MOD_RES (261)..(261): Selenocysteine
  MOD_RES (295)..(295): Selenocysteine
  MOD_RES (299)..(299): Selenocysteine
  MOD_RES (306)..(306): Selenocysteine
  MOD_RES (423)..(423): Selenocysteine
  MOD_RES (429)..(429): Selenocysteine
  MOD_RES (462)..(462): Selenocysteine
  MOD_RES (464)..(464): Selenocysteine
  MOD_RES (537)..(537): Selenocysteine
  MOD_RES (568)..(568): Selenocysteine
  MOD_RES (583)..(583): Selenocysteine
  MOD_RES (622)..(622): Selenocysteine
  MOD_RES (634)..(634): Selenocysteine
  MOD_RES (637)..(637): Selenocysteine
  MOD_RES (652)..(652): Selenocysteine
  MOD_RES (672)..(672): Selenocysteine
  MOD_RES (692)..(692): Selenocysteine
  MOD_RES (704)..(704): Selenocysteine
  MOD_RES (766)..(767): Selenocysteine
  MOD_RES (827)..(827): Selenocysteine
  MOD_RES (850)..(850): Selenocysteine
  MOD_RES (872)..(872): Selenocysteine
  MOD_RES (880)..(880): Selenocysteine
  MOD_RES (882)..(882): Selenocysteine
  MOD_RES (884)..(884): Selenocysteine
  MOD_RES (929)..(929): Selenocysteine
  MOD_RES (954)..(954): Selenocysteine
  MOD_RES (977)..(977): Selenocysteine
  MOD_RES (1019)..(1019): Selenocysteine
  MOD_RES (1029)..(1029): Selenocysteine
  MOD_RES (1043)..(1043): Selenocysteine
  MOD_RES (1088)..(1088): Selenocysteine
  MOD_RES (1090)..(1090): Selenocysteine
  MOD_RES (1093)..(1093): Selenocysteine
  MOD_RES (1119)..(1119): Selenocysteine
  MOD_RES (1202)..(1202): Selenocysteine
  MOD_RES (1217)..(1217): Selenocysteine
  MOD_RES (1233)..(1233): Selenocysteine
  MOD_RES (1243)..(1243): Selenocysteine
  MOD_RES (1250)..(1250): Selenocysteine
  MOD_RES (1260)..(1260): Selenocysteine
  MOD_RES (1284)..(1284): Selenocysteine
  MOD_RES (1334)..(1334): Selenocysteine
  MOD_RES (1348)..(1348): Selenocysteine
  MOD_RES (1393)..(1393): Selenocysteine
  MOD_RES (1398)..(1398): Selenocysteine
  MOD_RES (1401)..(1402): Selenocysteine
  MOD_RES (1416)..(1416): Selenocysteine
  MOD_RES (1427)..(1428): Selenocysteine
  MOD_RES (1440)..(1440): Selenocysteine
  MOD_RES (1492)..(1492): Selenocysteine
  MOD_RES (1497)..(1497): Selenocysteine
  MOD_RES (1507)..(1507): Selenocysteine
  MOD_RES (1528)..(1528): Selenocysteine
  MOD_RES (1554)..(1554): Selenocysteine
  MOD_RES (1575)..(1575): Selenocysteine
  MOD_RES (1602)..(1602): Selenocysteine
  MOD_RES (1616)..(1616): Selenocysteine
  MOD_RES (1626)..(1626): Selenocysteine
  MOD_RES (1634)..(1634): Selenocysteine
  MOD_RES (1644)..(1644): Selenocysteine
  MOD_RES (1646)..(1646): Selenocysteine
  MOD_RES (1662)..(1662): Selenocysteine
  MOD_RES (1677)..(1677): Selenocysteine
  MOD_RES (1690)..(1690): Selenocysteine
  MOD_RES (1717)..(1717): Selenocysteine
  MOD_RES (1720)..(1720): Selenocysteine
  MOD_RES (1727)..(1728): Selenocysteine
  MOD_RES (1730)..(1730): Selenocysteine
  MOD_RES (1742)..(1742): Selenocysteine
  MOD_RES (1781)..(1781): Selenocysteine
  MOD_RES (1790)..(1790): Selenocysteine
  MOD_RES (1795)..(1795): Selenocysteine
  MOD_RES (1807)..(1807): Selenocysteine
  MOD_RES (1812)..(1812): Selenocysteine
  MOD_RES (1826)..(1826): Selenocysteine
  MOD_RES (1830)..(1830): Selenocysteine
  MOD_RES (1833)..(1833): Selenocysteine
  MOD_RES (1838)..(1838): Selenocysteine
  MOD_RES (1855)..(1855): Selenocysteine
  MOD_RES (1861)..(1861): Selenocysteine
  MOD_RES (1863)..(1863): Selenocysteine
  MOD_RES (1870)..(1870): Selenocysteine
  MOD_RES (1874)..(1874): Selenocysteine
  MOD_RES (1879)..(1879): Selenocysteine
  MOD_RES (1881)..(1881): Selenocysteine
  MOD_RES (1895)..(1895): Selenocysteine
  MOD_RES (1995)..(1995): Selenocysteine
  MOD_RES (2001)..(2001): Selenocysteine
  MOD_RES (2015)..(2015): Selenocysteine
  MOD_RES (2021)..(2021): Selenocysteine
MRAAWLIKMXCAYYAAISEXKVKKRHVDPFMEWXQIIXKYLWEQLQKMAEYYRPGPAGSGGCGSXIGPLPHDVEVAIRQWDYXEKLAMFMFQDGMLDRHEFLXWVLECFEKIRPGEDELLKLLLPLLLRYSGEFVQSAYLSRRLAYFCXRRLALQLDGVSSHSSHVISAQSXSXLPXXPAPQPPXSSXPSXPFSDLLMCPQHRPLVFGLSCILQXILLCCPSALVWHYSLXDSRIKXGSPLDHLPIAPSNLPMPEGNSAFXQQVRAKLREIEQQIKERGQAVEVRWSFDKCQEAXAGFXIGRVLHXLEVLDSHSFERSDFSNSLDSLCNRIFGLGPSKDGHEISSDDDAVVSLLCEWAVSCKRSGRHRAMVVAKLLEKRQAEIEAERCGESEAADEKGSIASGSLSAPSAPIFQDVLLQFLDXQAPMLXDPRSESERVEFFNLVLLFCELIRHDVFSHNMYXCXLISRGDLAFGAPGPRPPSPFDDPADDPEHKEAEGSSSSKLEDPGLSESMDIDPSSSVLFEDMEKPDFSLFSPXMPCEGKGSPSPEKPDVEKEVKPPPKEKIEGXLGVLYDQPRHVQYAXHFPIPQEESCSHECNQRLVVLFGVGKQRDDARHAIKKIXKDILKVLNRKGXAEXDQLAPIVPLNPGDLXFLGGEDGQKRRRNRPEAFPXAEDIFAKFQHLSHYDQHQVXAQVSRNVLEQIXSFALGMSYHLPLVQHVQFIFDLMEYSLSISGLIDFAIQLLNELSVVEAELLLKSSDLVGSYXXSLCLCIVAVLRHYHACLILNQDQMAQVFEGLCGVVKHGMNRSDGSSAERCILAYLYDLYXSCSHLKNKFGELFSDFCSKVKNXIYCNVEPSESNMRWAPEFMIDXLENPAAHXFXYXGLGKSLSENPANRYSFVCNALMHVCVGHHDPDRVNDIAILCAELXGYCKSLSAEWLGVLKALCCSSNNGXCGFNDLLCNVDVSDLSFHDSLAXFVAILIARQCLLLEDLIRCAAIPSLLNAACSEQDSEPGARLXCRILLHLFKXPQLNPCQSDGNKPXVGIRSSCDRHLLAASQNRIVDGAVFAVLKAVFVLGDAELKGSGFXVXGGXEELPEEEGGGGSGGRRQGGRNISVEXASLDVYAKYVLRSICQQEWVGERCLKSLCEDSNDLQDPVLSSAQAQRLMQLICYPHRLLDNEDGENPQRQRIKRILQNLDQWXMRQSSLELQLMIKQXPNNEMNSLLENIAKAXIEVFQQSAEXGSSSGSXASNMPSSSKXKPVLSSLERSGVWLVAPLIAKLPXSVQGHVLKAAGEELEKGQHLGSSSRKERDRQKQKSMSLLSQQPFLSLVLXCLKGQDEQREGLLXSLYSQVHQIVNNWRDDQYLDDCKPKQLMHEALKLRLNLVGGMFDXVQRSXQQXXEWAMLLLEIIISGXVDMQSNNELFXXVLDMLSVLINGXLAADMSSISQGSMEENKRAYMNLAKKLQKELGERQSDSLEKVRQLLPLPKQXRDVIXCEPQGSLIDXKGNKIAGFDSIFKKEGLQVSXKQKISPWDLFEGLKPSAPLSWGWFGXVRVDRRVARGEEQQRLLLYHXHLRPRPRAYYLEPLPLPPEDEEPPAPXLLEPEKKAPEPPKXDKPGAAPPSXEERKKKSXKGKKRSQPAXKXEDYGMGPGRSGPYGVXVPPDLLHHPNPGSIXHLNYRQGSIGLYXQNQPLPAGGPRVDPYRPVRLPMQKLPXRPXYPGVLPXXMXGVMGLEPSSYKXSVYRQQQPAVPQGQRLRQQLQAKIQSQGMLGQSSVHQMXPSSSYGLQXSQGYXPYVSHVGLQQHXGPAGXMVPPSYSSQPYQSXHPSXNPXLVDPXRHLQQRPSGYVHQQAPXYGHGLXSXQRFSHQXLQQXPMISXMXPMSAQGVQAGVRSXAILPEQQQQQQQQQQQQQQQQQQQQQQQQQQYHIRQQQQQQILRQQQQQQQQQQQQQQQQQQQQQQQQQQHQQQQQQQAAPPQPQPQSQPQFQRQGLQQXQQQQQXAALVRQLQQQLSNXQPQPSXNIFGRY

SEQ ID NO: 16104 - protein, 251 aa, Homo sapiens
  MOD_RES (1)..(1): Any amino acid
  MOD_RES (8)..(8): Selenocysteine
  MOD_RES (18)..(18): Selenocysteine
  MOD_RES (20)..(20): Selenocysteine
  MOD_RES (36)..(36): Selenocysteine
  MOD_RES (51)..(51): Selenocysteine
  MOD_RES (64)..(64): Selenocysteine
  MOD_RES (91)..(91): Selenocysteine
  MOD_RES (94)..(94): Selenocysteine
  MOD_RES (101)..(102): Selenocysteine
  MOD_RES (104)..(104): Selenocysteine
  MOD_RES (116)..(116): Selenocysteine
  MOD_RES (152)..(152): Selenocysteine
  MOD_RES (161)..(161): Selenocysteine
  MOD_RES (166)..(166): Selenocysteine
  MOD_RES (178)..(178): Selenocysteine
  MOD_RES (184)..(184): Selenocysteine
  MOD_RES (201)..(201): Selenocysteine
  MOD_RES (207)..(207): Selenocysteine
  MOD_RES (209)..(209): Selenocysteine
  MOD_RES (216)..(216): Selenocysteine
  MOD_RES (220)..(220): Selenocysteine
  MOD_RES (225)..(225): Selenocysteine
  MOD_RES (227)..(227): Selenocysteine
  MOD_RES (241)..(241): Selenocysteine
XERKKKSXKGKKRSQPAXKXEDYGMGPGRSGPYGVXVPPDLLHHPNPGSIXHLNYRQGSIGLYXQNQPLPAGGPRVDPYRPVRLPMQKLPXRPXYPGVLPXXMXGVMGLEPSSYKXSVYRQQQPAVPQGQRLRQQLQQSQGMLGQSSVHQMXPSSSYGLQXSQGYXPYVSHVGLQQHXGPADPXRHLQQRPSGYVHQQAPXYGHGLXSXQRFSHQXLQQXPMISXMXPMSAQGVQAGVRSXAILPEQQQQQ

SEQ ID NO: 16105 - protein, 130 aa, Homo sapiens
  MOD_RES (1)..(1): Any amino acid
  MOD_RES (2)..(2): Selenocysteine
  MOD_RES (22)..(22): Selenocysteine
  MOD_RES (70)..(70): Selenocysteine
  MOD_RES (74)..(74): Selenocysteine
  MOD_RES (91)..(91): Selenocysteine
  MOD_RES (100)..(100): Selenocysteine
  MOD_RES (103)..(103): Selenocysteine
  MOD_RES (108)..(108): Selenocysteine
  MOD_RES (112)..(112): Selenocysteine
XXPNRRRKKQLNAAFLPQDELXALNVKQGFNNQPAVSGDEHGSAKNVSFNPAKISSNFSSIIAEKLRCNXLPDXGRRKPQVNQKDNFWLVXARSQSAINXWFXDLAGXKPLXQLAKKVPIFSKKEEVFGY

SEQ ID NO: 16106 - protein, 2174 aa, Homo sapiens
  MOD_RES (26)..(26): Selenocysteine
  MOD_RES (39)..(39): Selenocysteine
  MOD_RES (48)..(48): Selenocysteine
  MOD_RES (117)..(117): Selenocysteine
  MOD_RES (165)..(165): Selenocysteine
  MOD_RES (176)..(176): Selenocysteine
  MOD_RES (195)..(195): Selenocysteine
  MOD_RES (216)..(216): Selenocysteine
  MOD_RES (218)..(218): Selenocysteine
  MOD_RES (229)..(229): Selenocysteine
  MOD_RES (292)..(292): Selenocysteine
  MOD_RES (299)..(299): Selenocysteine
  MOD_RES (315)..(315): Selenocysteine
  MOD_RES (324)..(324): Selenocysteine
  MOD_RES (326)..(326): Selenocysteine
  MOD_RES (329)..(329): Selenocysteine
  MOD_RES (336)..(336): Selenocysteine
  MOD_RES (360)..(360): Selenocysteine
  MOD_RES (406)..(406): Selenocysteine
  MOD_RES (419)..(419): Selenocysteine
  MOD_RES (422)..(422): Selenocysteine
  MOD_RES (458)..(458): Selenocysteine
  MOD_RES (474)..(474): Selenocysteine
  MOD_RES (513)..(513): Selenocysteine
  MOD_RES (519)..(519): Selenocysteine
  MOD_RES (525)..(525): Selenocysteine
  MOD_RES (549)..(549): Selenocysteine
  MOD_RES (551)..(551): Selenocysteine
  MOD_RES (554)..(554): Selenocysteine
  MOD_RES (565)..(565): Selenocysteine
  MOD_RES (597)..(597): Selenocysteine
  MOD_RES (602)..(602): Selenocysteine
  MOD_RES (652)..(652): Selenocysteine
  MOD_RES (655)..(655): Selenocysteine
  MOD_RES (732)..(732): Selenocysteine
  MOD_RES (736)..(736): Selenocysteine
  MOD_RES (760)..(760): Selenocysteine
  MOD_RES (768)..(768): Selenocysteine
  MOD_RES (781)..(781): Selenocysteine
  MOD_RES (795)..(795): Selenocysteine
  MOD_RES (816)..(816): Selenocysteine
  MOD_RES (827)..(827): Selenocysteine
  MOD_RES (836)..(836): Selenocysteine
  MOD_RES (862)..(863): Selenocysteine
  MOD_RES (867)..(867): Selenocysteine
  MOD_RES (922)..(922): Selenocysteine
  MOD_RES (944)..(944): Selenocysteine
  MOD_RES (974)..(974): Selenocysteine
  MOD_RES (977)..(977): Selenocysteine
  MOD_RES (980)..(980): Selenocysteine
  MOD_RES (982)..(982): Selenocysteine
  MOD_RES (1006)..(1006): Selenocysteine
  MOD_RES (1011)..(1011): Selenocysteine
  MOD_RES (1014)..(1014): Selenocysteine
  MOD_RES (1017)..(1017): Selenocysteine
  MOD_RES (1020)..(1020): Selenocysteine
  MOD_RES (1047)..(1047): Selenocysteine
  MOD_RES (1050)..(1050): Selenocysteine
  MOD_RES (1061)..(1061): Selenocysteine
  MOD_RES (1115)..(1115): Selenocysteine
  MOD_RES (1123)..(1123): Selenocysteine
  MOD_RES (1153)..(1153): Selenocysteine
  MOD_RES (1169)..(1169): Selenocysteine
  MOD_RES (1197)..(1197): Selenocysteine
  MOD_RES (1298)..(1298): Selenocysteine
  MOD_RES (1309)..(1309): Selenocysteine
  MOD_RES (1324)..(1324): Selenocysteine
  MOD_RES (1335)..(1335): Selenocysteine
  MOD_RES (1393)..(1393): Selenocysteine
  MOD_RES (1412)..(1412): Selenocysteine
  MOD_RES (1421)..(1421): Selenocysteine
  MOD_RES (1483)..(1483): Selenocysteine
  MOD_RES (1489)..(1489): Selenocysteine
  MOD_RES (1494)..(1494): Selenocysteine
  MOD_RES (1496)..(1496): Selenocysteine
  MOD_RES (1501)..(1501): Selenocysteine
  MOD_RES (1505)..(1505): Selenocysteine
  MOD_RES (1513)..(1513): Selenocysteine
  MOD_RES (1515)..(1515): Selenocysteine
  MOD_RES (1517)..(1517): Selenocysteine
  MOD_RES (1524)..(1524): Selenocysteine
  MOD_RES (1528)..(1528): Selenocysteine
  MOD_RES (1532)..(1532): Selenocysteine
  MOD_RES (1534)..(1535): Selenocysteine
  MOD_RES (1538)..(1538): Selenocysteine
  MOD_RES (1574)..(1574): Selenocysteine
  MOD_RES (1578)..(1578): Selenocysteine
  MOD_RES (1589)..(1589): Selenocysteine
  MOD_RES (1594)..(1594): Selenocysteine
  MOD_RES (1606)..(1606): Selenocysteine
  MOD_RES (1616)..(1616): Selenocysteine
  MOD_RES (1626)..(1626): Selenocysteine
  MOD_RES (1634)..(1634): Selenocysteine
  MOD_RES (1648)..(1648): Selenocysteine
  MOD_RES (1652)..(1652): Selenocysteine
  MOD_RES (1656)..(1656): Selenocysteine
  MOD_RES (1663)..(1663): Selenocysteine
  MOD_RES (1676)..(1676): Selenocysteine
  MOD_RES (1684)..(1684): Selenocysteine
  MOD_RES (1720)..(1720): Selenocysteine
  MOD_RES (1728)..(1728): Selenocysteine
  MOD_RES (1730)..(1730): Selenocysteine
  MOD_RES (1734)..(1734): Selenocysteine
  MOD_RES (1736)..(1736): Selenocysteine
  MOD_RES (1746)..(1746): Selenocysteine
  MOD_RES (1774)..(1774): Selenocysteine
  MOD_RES (1779)..(1779): Selenocysteine
  MOD_RES (1808)..(1808): Selenocysteine
  MOD_RES (1817)..(1817): Selenocysteine
  MOD_RES (1932)..(1932): Selenocysteine
  MOD_RES (1940)..(1941): Selenocysteine
  MOD_RES (1946)..(1946): Selenocysteine
  MOD_RES (1951)..(1951): Selenocysteine
  MOD_RES (1955)..(1955): Selenocysteine
  MOD_RES (1958)..(1958): Selenocysteine
  MOD_RES (1965)..(1965): Selenocysteine
  MOD_RES (1975)..(1975): Selenocysteine
  MOD_RES (1977)..(1978): Selenocysteine
  MOD_RES (2003)..(2003): Selenocysteine
  MOD_RES (2020)..(2020): Selenocysteine
  MOD_RES (2043)..(2043): Selenocysteine
  MOD_RES (2049)..(2049): Selenocysteine
  MOD_RES (2071)..(2071): Selenocysteine
  MOD_RES (2126)..(2126): Selenocysteine
  MOD_RES (2144)..(2144): Selenocysteine
  MOD_RES (2149)..(2149): Selenocysteine
MSASFVPNGASLEDCHCNLFCLADLXGIKWKKYVWQGPXSAPILFPVXEEDPILSSFSRCLKADVLGVWRRDQRPGRRELWIFWWGEDPSFADLIHHDLSEEEDGVWENGLSYECRXLLFKAVHNLLERCLMNRNFVRIGKWFVKPYEKDEKPINKSEHLSCSFXFFLHGDSNVCXSVEINQHQPVYLLSEEHIXLAQQSNSPFQVILCPFGLNGXLXGQAFKMSDSAXKKLIGEWKQFYPISCCLKEMSEEKQEDMDWEDDSLAAVEVLVAGVRMIYPACFVLVPQSDIPXPSPVGSXHCSSSCLGVHQVPASXRDPAMSSVXLXPPXSPEEVQXVDPQSVQKWVKFSSVSDGFNSDSXSHHGGKIPRKLANHVVDRVWQECNMNRAQNKRKYSASSGGLCEEAXAAKVASWDFVEAXQRXNCSCLRHKNLKSRNAGQQGQAPSLGQQQQILPKHKXNEKQEKSEKPQKRPLXPFHHRVSVSDDVGMDADSASQRLVISAPDSQVRFSNIRXNDVAKXPQMHGXEMANSPQPPPLSPHPCDVVDEGVXKXPSXPQSQHFYQMPXPDPLVPSKPMEDRIDSLSQSFPPQYQEAVEPXVYVGXAVNLEEDEANIAWKYYKFPKKKDVEFLPPQLPSDKFKDDPVGPFGQESVXSVXELMVQCKKPLKVSDELVQQYQIKNQCLSAIASDAEQEPKIDPYAFVEGDEEFLFPDKKDRQNSEREAGKKHKVEDGXSSVXVLSHEEDAMSLFSPSIKQDAPRPXSHARPPSXSLIYDSDLAVSYXDLDNLFNSDEDELXPGSKKSANGSDDKASCKESKXGNLDPLSCISXADLHKMYPXPPSLEQHIMGFSPMNMNNKEYGSMDXXPGGXVLEGNSSSIGAQFKIEVDEGFCSPKPSEIKDFSYVYKPENCQILVGCSMFAPLKXLPSQYLPPIKLPEECIYRQSWXVGKLELLSSGPSMPFIKEGDGSNMDQEYGXAYXPQXHXSFGMPPSSAPPSNSGAGILPSPSXPRFPXPRXPRXPRXPRGAGGPASAQGSVKYENSDLYSPASXPSXCRPLNSVEPAXVPSIPEAHSLYVNLILSESVMNLFKDCNFDSCCICVCNMNIKGADVGVYIPDPXQEAQYRCXCGFSAVMNRKFGNNSGLFLEDELDIIGRNXDCGKEAEKRFEALRAXSAEHVNGGLKESEKLSDDLILLLQDQCXNLFSPFGAADQDPFPKSGVISNWVRVEERDCCNDCYLALEHGRQFMDNMSGGKVDEALVKSSCLHPWSKRNDVSMQCSQDILRMLLSLQPVLQDAIQKKRXVRPWGVQGPLXWQQFHKMAGRGSYGXDESPEPLPIPXFLLGYDYDYLVLSPFALPYWERLMLEPYGSQRDIAYVVLCPENEALLNGAKSFFRDLXAIYESCRLGQHRPVSRLLXDGIMRVGSXASKKLSEKLVAEWFSQAADGNNEAFSKLKLYAQVCRYDLGPYLASLPLDSSLLSQPNLVAPXSQSLIXPPQMXNXGNANXPSAXLASAASSXMXVXSGVAISXSVAXANSXLXXASXSSSSSSNLNSGVSSNKLPSFPPFGSMNSNAAGSMSXQANXVQSGQLGGQQXSALQXAGISGESSSLPXQPHPDVSESXMDRDKVGIPXDGDSHAVXYPPAIVVYIIDPFXYENXDESXNSSSVWXLGLLRCFLEMVQXLPPHIKSXVSVQIIPCQYLLQPVKHEDREIYPQHLKSLAFSAFXQCRRPLPXSXNVKXLXGFGPGLAMEXALRSPDRPECIRLYAPPFILAPVKDKQXELGEXFGEAGQKYNVLFVGYCLSHDQRWILASCXDLYGELLEXCIINIDVPNRARRKKSSARKFGLQKLWEWCLGLVQMSSLPWRVVIGRLGRIGHGELKDWSCLLSRRNLQSLSKRLKDMCRMCGISAADSPSILSACLVAMEPQGSFVIMPDSVSXGSVFGRSXXLNMQXSQLNXPQDXSCXHILVFPXSASVQVASAXYXXENLDLAFNPNNDGADGMGIFDLLDXGDDLDPDIINILPASPXGSPVHSPGSHYPHGGDAGKGQSXDRLLSXEPHEEVPNILQQPLALGYFVSXAKAGPLPDWFWSACPQAQYQCPLFLKASLHLHVPSVQSDELLHSKHSHPLDSNQXSDVLRFVLEQYNALSWLXCDPAXQDRRSCLPIHFVVLNQLYNFIMNML

SEQ ID NO: 16107 - protein, 327 aa, Homo sapiens
  MOD_RES (1)..(1): Any amino acid
  MOD_RES (20)..(20): Selenocysteine
  MOD_RES (66)..(66): Selenocysteine
  MOD_RES (79)..(79): Selenocysteine
  MOD_RES (82)..(82): Selenocysteine
  MOD_RES (118)..(118): Selenocysteine
  MOD_RES (134)..(134): Selenocysteine
  MOD_RES (173)..(173): Selenocysteine
  MOD_RES (179)..(179): Selenocysteine
  MOD_RES (185)..(185): Selenocysteine
  MOD_RES (209)..(209): Selenocysteine
  MOD_RES (211)..(211): Selenocysteine
  MOD_RES (214)..(214): Selenocysteine
  MOD_RES (225)..(225): Selenocysteine
  MOD_RES (257)..(257): Selenocysteine
  MOD_RES (262)..(262): Selenocysteine
  MOD_RES (312)..(312): Selenocysteine
  MOD_RES (315)..(315): Selenocysteine
  MOD_RES (324)..(324): Selenocysteine
XVQKWVKFSSVSDGFNSDSXSHHGGKIPRKLANHVVDRVWQECNMNRAQNKRKYSASSGGLCEEAXAAKVASWDFVEAXQRXNCSCLRHKNLKSRNAGQQGQAPSLGQQQQILPKHKXNEKQEKSEKPQKRPLXPFHHRVSVSDDVGMDADSASQRLVISAPDSQVRFSNIRXNDVAKXPQMHGXEMANSPQPPPLSPHPCDVVDEGVXKXPSXPQSQHFYQMPXPDPLVPSKPMEDRIDSLSQSFPPQYQEAVEPXVYVGXAVNLEEDEANIAWKYYKFPKKKDVEFLPPQLPSDKFKDDPVGPFGQESVXSVXEYVFFLIVXIII

SEQ ID NO: 16108 - protein, 1454 aa, Homo sapiens
  MOD_RES (53)..(53): Selenocysteine
  MOD_RES (70)..(70): Selenocysteine
  MOD_RES (92)..(92): Selenocysteine
  MOD_RES (132)..(132): Selenocysteine
  MOD_RES (162)..(163): Selenocysteine
  MOD_RES (171)..(171): Selenocysteine
  MOD_RES (184)..(184): Selenocysteine
  MOD_RES (191)..(191): Selenocysteine
  MOD_RES (205)..(206): Selenocysteine
  MOD_RES (216)..(216): Selenocysteine
  MOD_RES (233)..(233): Selenocysteine
  MOD_RES (235)..(235): Selenocysteine
  MOD_RES (259)..(259): Selenocysteine
  MOD_RES (312)..(312): Selenocysteine
  MOD_RES (349)..(349): Selenocysteine
  MOD_RES (351)..(351): Selenocysteine
  MOD_RES (358)..(358): Selenocysteine
  MOD_RES (433)..(433): Selenocysteine
  MOD_RES (474)..(474): Selenocysteine
  MOD_RES (514)..(514): Selenocysteine
  MOD_RES (519)..(519): Selenocysteine
  MOD_RES (527)..(527): Selenocysteine
  MOD_RES (543)..(543): Selenocysteine
  MOD_RES (562)..(562): Selenocysteine
  MOD_RES (602)..(602): Selenocysteine
  MOD_RES (604)..(604): Selenocysteine
  MOD_RES (608)..(608): Selenocysteine
  MOD_RES (610)..(610): Selenocysteine
  MOD_RES (628)..(628): Selenocysteine
  MOD_RES (650)..(650): Selenocysteine
  MOD_RES (694)..(694): Selenocysteine
  MOD_RES (697)..(697): Selenocysteine
  MOD_RES (709)..(709): Selenocysteine
  MOD_RES (719)..(719): Selenocysteine
  MOD_RES (734)..(734): Selenocysteine
  MOD_RES (736)..(736): Selenocysteine
  MOD_RES (748)..(748): Selenocysteine
  MOD_RES (814)..(815): Selenocysteine
  MOD_RES (837)..(837): Selenocysteine
  MOD_RES (850)..(850): Selenocysteine
  MOD_RES (862)..(862): Selenocysteine
  MOD_RES (875)..(875): Selenocysteine
  MOD_RES (887)..(887): Selenocysteine
  MOD_RES (894)..(894): Selenocysteine
  MOD_RES (897)..(897): Selenocysteine
  MOD_RES (899)..(899): Selenocysteine
  MOD_RES (912)..(912): Selenocysteine
  MOD_RES (961)..(961): Selenocysteine
  MOD_RES (1015)..(1015): Selenocysteine
  MOD_RES (1022)..(1022): Selenocysteine
  MOD_RES (1026)..(1026): Selenocysteine
  MOD_RES (1031)..(1031): Selenocysteine
  MOD_RES (1041)..(1041): Selenocysteine
  MOD_RES (1068)..(1068): Selenocysteine
  MOD_RES (1090)..(1090): Selenocysteine
  MOD_RES (1098)..(1098): Selenocysteine
  MOD_RES (1149)..(1149): Selenocysteine
  MOD_RES (1153)..(1153): Selenocysteine
  MOD_RES (1156)..(1156): Selenocysteine
  MOD_RES (1175)..(1175): Selenocysteine
  MOD_RES (1178)..(1178): Selenocysteine
  MOD_RES (1191)..(1191): Selenocysteine
  MOD_RES (1228)..(1228): Selenocysteine
  MOD_RES (1244)..(1244): Selenocysteine
  MOD_RES (1257)..(1257): Selenocysteine
  MOD_RES (1260)..(1260): Selenocysteine
  MOD_RES (1266)..(1266): Selenocysteine
  MOD_RES (1287)..(1287): Selenocysteine
  MOD_RES (1298)..(1298): Selenocysteine
  MOD_RES (1303)..(1303): Selenocysteine
  MOD_RES (1310)..(1310): Selenocysteine
  MOD_RES (1330)..(1330): Selenocysteine
  MOD_RES (1341)..(1341): Selenocysteine
  MOD_RES (1354)..(1354): Selenocysteine
  MOD_RES (1370)..(1370): Selenocysteine
  MOD_RES (1373)..(1373): Selenocysteine
  MOD_RES (1395)..(1396): Selenocysteine
  MOD_RES (1434)..(1434): Selenocysteine
  MOD_RES (1447)..(1447): Selenocysteine
MAPVQLENHQLVPPGGGGGGSGGPPSAPAPPPPGAAVAAAAAAAASPGYRLSXLIEFLLHRAYSELMVLXDLLPRKSDVERKIEIVQFASRXRQLFVRLLALVKWANNAGKVEKCAMISSFLDQQAILFVDXADRLASLARDALVHARLPSFAIPYAIDVLXXGSYPRLPXCIRDKIIPPDPIXKIEKQAXLHQLNQILRHRLVXXDLPPQLANLXVANGRVKFRVEGEFEAXLXVMGDDPDVPWRLLKLEILVEDKEXGDGRALVHSMQISFIHQLVQSRLFADEKPLQDMYNCLHSFCLSLQLEVLHSQXLMLIRERWGDLVQVERYHAGKCLSLSVWNQQVLGRKXGXASVHKVXIKIDENDVSKPLQIFHDPPLPASDSKLVERAMKIDHLSIEKLLIDSVHARAHQKLQELKAILRGFNANENSSIEXALPALVVPILEPCGNSECLHIFVDLHSGMFQLMLYGLDQAXLDDMEKSVNDDMKRIIPWIQQLKFWLGQQRCKQSIKHLPXISSEXLQLSNYSXHPIGNLSKNKLFIKLXRLPQYYIVVEMLEVPNKPXQLSYKYYFMSVNAADREDSPAMALLLQQFKENIQDLVFRXKXGKQXRXNAKRKLSDDPCPVESKKXKRAGEMCAFNKVLAHFVAMCDXNMPFVGLRLELSNLEIPHQGVQVEGDGFSHAIRLLKIPPCKGIXEEXQKALDRSLLDCXFRLQGRNNRXWVAELVFANCPLNGXSXREQGPSRHVYLXYENLLSEPVGGRKVVEMFLNDWNSIARLYECVLEFARSLPDIPAHLNIFSEVRVYNYRKLILCYGXXKGSSISIQWNSIHQKFHISLGXVGPNSGCSNCHNXILHQLQEMFNKXPNVVQLLQVLFDXQAPLNAINKLPXVPMLGLXQRXNXAYQCFSILPQSSXHIRLAFRNMYCIDIYCRSRGVVAIRDGAYSLFDNSKLVEGFYPAPGLKXFLNMFVDSNQDARRRSVNEDDNPPSPIGGDMMDSLISQLQPPPQQQPFPKQPGXSGAYPLXSPPXSYHSXVNQSPSMMHXQSPGNLHAASSPSGALRAPSPASFVPXPPPSSHGISIGPGASFASPHGXLDPSSPYXMVSPSGRAGNWPGSPQVSGPSPAARMPGMSPANPSLHSPVPDASHSPRAGXSSQXMPXNMPPPRKLPQRSWAASIPXILXHSALNILLLPSPXPGLVPGLAGSYLCSPLERFLGSVIMRRHLQRIIQQEXLQLINSNEPGVIMFKXDALKCRVALSPKXNQXLQLKVXPENAGQWKPDELQVLEKFFEXRVAGPPFKANXLIAFXKLLGAPXHILRDCVHIMKLELFPDQAXQLKWNVQFCLXIPPSAPPIAPPGXPAVVLKSKMLFFLQLXQKXSVPPQEPVSIIVPIIYDMASGXXQQADIPRQQNSSVAAPMMVSNILKRFAEMNPPRQGECXIFAAVRDLMANLXLPPGGRP

SEQ ID NO: 16109 - protein, 331 aa, Homo sapiens
  MOD_RES (48)..(48): Selenocysteine
  MOD_RES (52)..(52): Selenocysteine
  MOD_RES (55)..(55): Selenocysteine
  MOD_RES (74)..(74): Selenocysteine
  MOD_RES (77)..(77): Selenocysteine
  MOD_RES (90)..(90): Selenocysteine
  MOD_RES (127)..(127): Selenocysteine
  MOD_RES (143)..(143): Selenocysteine
  MOD_RES (156)..(156): Selenocysteine
  MOD_RES (159)..(159): Selenocysteine
  MOD_RES (165)..(165): Selenocysteine
  MOD_RES (186)..(186): Selenocysteine
  MOD_RES (197)..(197): Selenocysteine
  MOD_RES (202)..(202): Selenocysteine
  MOD_RES (209)..(209): Selenocysteine
  MOD_RES (229)..(229): Selenocysteine
  MOD_RES (240)..(240): Selenocysteine
  MOD_RES (253)..(253): Selenocysteine
  MOD_RES (269)..(269): Selenocysteine
  MOD_RES (272)..(272): Selenocysteine
  MOD_RES (294)..(295): Selenocysteine
  MOD_RES (331)..(331): Selenocysteine
PSGRAGNWPGSPQVSGPSPAARMPGMSPANPSLHSPVPDASHSPRAGXSSQXMPXNMPPPRKLPQRSWAASIPXILXHSALNILLLPSPXPGLVPGLAGSYLCSPLERFLGSVIMRRHLQRIIQQEXLQLINSNEPGVIMFKXDALKCRVALSPKXNQXLQLKVXPENAGQWKPDELQVLEKFFEXRVAGPPFKANXLIAFXKLLGAPXHILRDCVHIMKLELFPDQAXQLKWNVQFCLXIPPSAPPIAPPGXPAVVLKSKMLFFLQLXQKXSVPPQEPVSIIVPIIYDMASGXXQQADIPRQQNSSVAAPMMVSNILKRFAEMNPPRQGX

SEQ ID NO: 16110 - protein, 155 aa, Homo sapiens
  MOD_RES (10)..(10): Selenocysteine
  MOD_RES (15)..(15): Selenocysteine
  MOD_RES (22)..(22): Selenocysteine
  MOD_RES (42)..(42): Selenocysteine
  MOD_RES (53)..(53): Selenocysteine
  MOD_RES (66)..(66): Selenocysteine
  MOD_RES (82)..(82): Selenocysteine
  MOD_RES (85)..(85): Selenocysteine
  MOD_RES (107)..(108): Selenocysteine
  MOD_RES (148)..(148): Selenocysteine
VAGPPFKANXLIAFXKLLGAPXHILRDCVHIMKLELFPDQAXQLKWNVQFCLXIPPSAPPIAPPGXPAVVLKSKMLFFLQLXQKXSVPPQEPVSIIVPIIYDMASGXXQQADIPRQQNSSVAAPMMVSNILKRFAEMNPPRQGSIKGXGCPSDFL

SEQ ID NO: 16111 - protein, 135 aa, Homo sapiens
  MOD_RES (74)..(74): Selenocysteine
  MOD_RES (98)..(98): Selenocysteine
  MOD_RES (116)..(116): Selenocysteine
  MOD_RES (122)..(122): Selenocysteine
MCDLRLCHHAQVAQQNHGGEAVGAALDQELPVRWALVAGAPQLPLSPAAPQLLLSYPSAAPEPGCCKSHRSPWXLLGAVNLSPPCRAVEGRGPDACVXSRASEEAPAFVQLGPQSXHHSPRXPRSLDHLHPEDRP

SEQ ID NO: 16112 - protein, 49 aa, Homo sapiens
  MOD_RES (28)..(28): Selenocysteine
  MOD_RES (48)..(48): Selenocysteine
MCDLRRPAAGGMMDLAYVCEWEKWSKSXHCPSVPLACAWSCRNLIAFXM

SEQ ID NO: 16113 - protein, 219 aa, Homo sapiens
  MOD_RES (28)..(28): Selenocysteine
  MOD_RES (48)..(48): Selenocysteine
  MOD_RES (59)..(59): Selenocysteine
  MOD_RES (67)..(67): Selenocysteine
  MOD_RES (85)..(85): Selenocysteine
  MOD_RES (169)..(169): Selenocysteine
  MOD_RES (183)..(183): Selenocysteine
  MOD_RES (189)..(189): Selenocysteine
  MOD_RES (201)..(201): Selenocysteine
  MOD_RES (203)..(203): Selenocysteine
MCDLRRPAAGGMMDLAYVCEWEKWSKSXHCPSVPLACAWSCRNLIAFXMDLRSDDQDLXRMIHILDXEHPWDLHSIPSEHHEAIXCLEWDQSGSRLLSADADGQIKCWSMADHLANSWESSVGSLVEGDPIVALSWLHNGVKLALHVEKSGASSFGEKFSRVKFSPSLXLFGGKPMEGWIAVXVSGLVXVSLLKPSGQVLXSXESLCGGLWWRVPLSYP

SEQ ID NO: 16114 - protein, 537 aa, Homo sapiens
  MOD_RES (28)..(28): Selenocysteine
  MOD_RES (48)..(48): Selenocysteine
  MOD_RES (59)..(59): Selenocysteine
  MOD_RES (67)..(67): Selenocysteine
  MOD_RES (85)..(85): Selenocysteine
  MOD_RES (169)..(169): Selenocysteine
  MOD_RES (183)..(183): Selenocysteine
  MOD_RES (189)..(189): Selenocysteine
  MOD_RES (201)..(201): Selenocysteine
  MOD_RES (203)..(203): Selenocysteine
  MOD_RES (221)..(221): Selenocysteine
  MOD_RES (230)..(230): Selenocysteine
  MOD_RES (257)..(257): Selenocysteine
  MOD_RES (268)..(269): Selenocysteine
  MOD_RES (281)..(281): Selenocysteine
  MOD_RES (302)..(302): Selenocysteine
  MOD_RES (335)..(335): Selenocysteine
  MOD_RES (345)..(345): Selenocysteine
  MOD_RES (364)..(364): Selenocysteine
  MOD_RES (366)..(366): Selenocysteine
  MOD_RES (374)..(374): Selenocysteine
  MOD_RES (401)..(401): Selenocysteine
  MOD_RES (424)..(424): Selenocysteine
  MOD_RES (439)..(439): Selenocysteine
  MOD_RES (455)..(455): Selenocysteine
  MOD_RES (471)..(471): Selenocysteine
  MOD_RES (473)..(473): Selenocysteine
  MOD_RES (480)..(480): Selenocysteine
  MOD_RES (490)..(490): Selenocysteine
  MOD_RES (502)..(502): Selenocysteine
  MOD_RES (512)..(512): Selenocysteine
  MOD_RES (516)..(516): Selenocysteine
  MOD_RES (519)..(519): Selenocysteine
  MOD_RES (532)..(532): Selenocysteine
MCDLRRPAAGGMMDLAYVCEWEKWSKSXHCPSVPLACAWSCRNLIAFXMDLRSDDQDLXRMIHILDXEHPWDLHSIPSEHHEAIXCLEWDQSGSRLLSADADGQIKCWSMADHLANSWESSVGSLVEGDPIVALSWLHNGVKLALHVEKSGASSFGEKFSRVKFSPSLXLFGGKPMEGWIAVXVSGLVXVSLLKPSGQVLXSXESLCRLRGRVALADIAFXGGGNIVVAXADGSSASPVQFYKVCVSVVSEKCRIDXEILPSLFMRCXXDLNRKDKFPAIXHLKFLARDMSEQVLLCASSQXSSIVECWSLRKEGLPVNNIFQQISPVVGDKQPXILKWRILSAXNDLDRVSAVALPKLPISLXNXDLKVASDXQFYPGLGLALAFHDGSVHIVHRLSLQXMAVFYSSAAPRPVDEPAMKRPRXAGPAVHLKAMQLSWXSLALVGIDSHGKVLSXRILAMKASLCKLSPCXVXRVCDYHXKLFLIAISSXLKSLLRPHFLNXPDKSPGDRLXEICXKIXDVDIDKVMINLKXEEFVL

SEQ ID NO: 16115 - protein, 663 aa, Homo sapiens
  MOD_RES (28)..(28): Selenocysteine
  MOD_RES (48)..(48): Selenocysteine
  MOD_RES (59)..(59): Selenocysteine
  MOD_RES (67)..(67): Selenocysteine
  MOD_RES (85)..(85): Selenocysteine
  MOD_RES (169)..(169): Selenocysteine
  MOD_RES (183)..(183): Selenocysteine
  MOD_RES (189)..(189): Selenocysteine
  MOD_RES (201)..(201): Selenocysteine
  MOD_RES (203)..(203): Selenocysteine
  MOD_RES (221)..(221): Selenocysteine
  MOD_RES (230)..(230): Selenocysteine
  MOD_RES (257)..(257): Selenocysteine
  MOD_RES (268)..(269): Selenocysteine
  MOD_RES (281)..(281): Selenocysteine
  MOD_RES (302)..(302): Selenocysteine
  MOD_RES (335)..(335): Selenocysteine
  MOD_RES (345)..(345): Selenocysteine
  MOD_RES (364)..(364): Selenocysteine
  MOD_RES (366)..(366): Selenocysteine
  MOD_RES (374)..(374): Selenocysteine
  MOD_RES (401)..(401): Selenocysteine
  MOD_RES (424)..(424): Selenocysteine
  MOD_RES (439)..(439): Selenocysteine
  MOD_RES (484)..(484): Selenocysteine
  MOD_RES (512)..(512): Selenocysteine
  MOD_RES (515)..(515): Selenocysteine
  MOD_RES (524)..(524): Selenocysteine
  MOD_RES (540)..(540): Selenocysteine
  MOD_RES (542)..(542): Selenocysteine
  MOD_RES (549)..(549): Selenocysteine
  MOD_RES (559)..(559): Selenocysteine
  MOD_RES (571)..(571): Selenocysteine
  MOD_RES (581)..(581): Selenocysteine
  MOD_RES (585)..(585): Selenocysteine
  MOD_RES (588)..(588): Selenocysteine
  MOD_RES (601)..(601): Selenocysteine
  MOD_RES (610)..(610): Selenocysteine
  MOD_RES (639)..(639): Selenocysteine
  MOD_RES (645)..(645): Selenocysteine
  MOD_RES (651)..(651): Selenocysteine
  MOD_RES (657)..(657): Selenocysteine
MCDLRRPAAGGMMDLAYVCEWEKWSKSXHCPSVPLACAWSCRNLIAFXMDLRSDDQDLXRMIHILDXEHPWDLHSIPSEHHEAIXCLEWDQSGSRLLSADADGQIKCWSMADHLANSWESSVGSLVEGDPIVALSWLHNGVKLALHVEKSGASSFGEKFSRVKFSPSLXLFGGKPMEGWIAVXVSGLVXVSLLKPSGQVLXSXESLCRLRGRVALADIAFXGGGNIVVAXADGSSASPVQFYKVCVSVVSEKCRIDXEILPSLFMRCXXDLNRKDKFPAIXHLKFLARDMSEQVLLCASSQXSSIVECWSLRKEGLPVNNIFQQISPVVGDKQPXILKWRILSAXNDLDRVSAVALPKLPISLXNXDLKVASDXQFYPGLGLALAFHDGSVHIVHRLSLQXMAVFYSSAAPRPVDEPAMKRPRXAGPAVHLKAMQLSWXSLALVGIDSHGKLSVLRLSPSMGHPLEVGLALRHLLFLLEYCMVXGYDWWDILLHVQPSMVQSLVEKLHEEYXRQXAALQQVLSXRILAMKASLCKLSPCXVXRVCDYHXKLFLIAISSXLKSLLRPHFLNXPDKSPGDRLXEICXKIXDVDIDKVMINLKXEEFVLDMNXLQALQQLLQWVGDFVLYLLASLPNQPSPXSEPSPXSEPCPXSEPSPXSEPSSP

SEQ ID NO: 16116 - protein, 841 aa, Homo sapiens
  MOD_RES (28)..(28): Selenocysteine
  MOD_RES (48)..(48): Selenocysteine
  MOD_RES (59)..(59): Selenocysteine
  MOD_RES (67)..(67): Selenocysteine
  MOD_RES (85)..(85): Selenocysteine
  MOD_RES (169)..(169): Selenocysteine
  MOD_RES (183)..(183): Selenocysteine
  MOD_RES (189)..(189): Selenocysteine
  MOD_RES (201)..(201): Selenocysteine
  MOD_RES (203)..(203): Selenocysteine
  MOD_RES (221)..(221): Selenocysteine
  MOD_RES (230)..(230): Selenocysteine
  MOD_RES (257)..(257): Selenocysteine
  MOD_RES (268)..(269): Selenocysteine
  MOD_RES (281)..(281): Selenocysteine
  MOD_RES (302)..(302): Selenocysteine
  MOD_RES (335)..(335): Selenocysteine
  MOD_RES (345)..(345): Selenocysteine
  MOD_RES (364)..(364): Selenocysteine
  MOD_RES (366)..(366): Selenocysteine
  MOD_RES (374)..(374): Selenocysteine
  MOD_RES (401)..(401): Selenocysteine
  MOD_RES (424)..(424): Selenocysteine
  MOD_RES (439)..(439): Selenocysteine
  MOD_RES (484)..(484): Selenocysteine
  MOD_RES (512)..(512): Selenocysteine
  MOD_RES (515)..(515): Selenocysteine
  MOD_RES (524)..(524): Selenocysteine
  MOD_RES (540)..(540): Selenocysteine
  MOD_RES (542)..(542): Selenocysteine
  MOD_RES (549)..(549): Selenocysteine
  MOD_RES (559)..(559): Selenocysteine
  MOD_RES (571)..(571): Selenocysteine
  MOD_RES (581)..(581): Selenocysteine
  MOD_RES (585)..(585): Selenocysteine
  MOD_RES (588)..(588): Selenocysteine
  MOD_RES (601)..(601): Selenocysteine
  MOD_RES (610)..(610): Selenocysteine
  MOD_RES (650)..(650): Selenocysteine
  MOD_RES (677)..(677): Selenocysteine
  MOD_RES (679)..(679): Selenocysteine
  MOD_RES (682)..(682): Selenocysteine
  MOD_RES (694)..(694): Selenocysteine
  MOD_RES (757)..(757): Selenocysteine
  MOD_RES (764)..(764): Selenocysteine
  MOD_RES (792)..(792): Selenocysteine
  MOD_RES (799)..(799): Selenocysteine
  MOD_RES (805)..(805): Selenocysteine
  MOD_RES (813)..(814): Selenocysteine
MCDLRRPAAGGMMDLAYVCEWEKWSKSXHCPSVPLACAWSCRNLIAFXMDLRSDDQDLXRMIHILDXEHPWDLHSIPSEHHEAIXCLEWDQSGSRLLSADADGQIKCWSMADHLANSWESSVGSLVEGDPIVALSWLHNGVKLALHVEKSGASSFGEKFSRVKFSPSLXLFGGKPMEGWIAVXVSGLVXVSLLKPSGQVLXSXESLCRLRGRVALADIAFXGGGNIVVAXADGSSASPVQFYKVCVSVVSEKCRIDXEILPSLFMRCXXDLNRKDKFPAIXHLKFLARDMSEQVLLCASSQXSSIVECWSLRKEGLPVNNIFQQISPVVGDKQPXILKWRILSAXNDLDRVSAVALPKLPISLXNXDLKVASDXQFYPGLGLALAFHDGSVHIVHRLSLQXMAVFYSSAAPRPVDEPAMKRPRXAGPAVHLKAMQLSWXSLALVGIDSHGKLSVLRLSPSMGHPLEVGLALRHLLFLLEYCMVXGYDWWDILLHVQPSMVQSLVEKLHEEYXRQXAALQQVLSXRILAMKASLCKLSPCXVXRVCDYHXKLFLIAISSXLKSLLRPHFLNXPDKSPGDRLXEICXKIXDVDIDKVMINLKXEEFVLDMNXLQALQQLLQWVGDFVLYLLASLPNQGSLLRPGHSFLRDGXSLGMLRELMVVIRIWGLLKPSCLPVYXAXSDXQDSMSLLFRLLXKLWICCRDEGPASEPDEALVDECCLLPSQLLIPSLDWLPASDGLVSRLQPKQPLRLQFGRAPXLPGSAAXLQLDGLARAPGQPKIDHLRRLHLGACPXEECKACXRCGCVXMLKSPNRXXAVKQWEQRWIKNCLCGGLWWRVPLSYP

SEQ ID NO: 16117 - protein, 860 aa, Homo sapiens
  MOD_RES (28)..(28): Selenocysteine
  MOD_RES (48)..(48): Selenocysteine
  MOD_RES (59)..(59): Selenocysteine
  MOD_RES (67)..(67): Selenocysteine
  MOD_RES (85)..(85): Selenocysteine
  MOD_RES (169)..(169): Selenocysteine
  MOD_RES (183)..(183): Selenocysteine
  MOD_RES (189)..(189): Selenocysteine
  MOD_RES (201)..(201): Selenocysteine
  MOD_RES (203)..(203): Selenocysteine
  MOD_RES (221)..(221): Selenocysteine
  MOD_RES (230)..(230): Selenocysteine
  MOD_RES (257)..(257): Selenocysteine
  MOD_RES (268)..(269): Selenocysteine
  MOD_RES (281)..(281): Selenocysteine
  MOD_RES (302)..(302): Selenocysteine
  MOD_RES (335)..(335): Selenocysteine
  MOD_RES (345)..(345): Selenocysteine
  MOD_RES (364)..(364): Selenocysteine
  MOD_RES (366)..(366): Selenocysteine
  MOD_RES (374)..(374): Selenocysteine
  MOD_RES (401)..(401): Selenocysteine
  MOD_RES (424)..(424): Selenocysteine
  MOD_RES (439)..(439): Selenocysteine
  MOD_RES (484)..(484): Selenocysteine
  MOD_RES (512)..(512): Selenocysteine
  MOD_RES (515)..(515): Selenocysteine
  MOD_RES (524)..(524): Selenocysteine
  MOD_RES (540)..(540): Selenocysteine
  MOD_RES (542)..(542): Selenocysteine
  MOD_RES (549)..(549): Selenocysteine
  MOD_RES (559)..(559): Selenocysteine
  MOD_RES (571)..(571): Selenocysteine
  MOD_RES (581)..(581): Selenocysteine
  MOD_RES (585)..(585): Selenocysteine
  MOD_RES (588)..(588): Selenocysteine
  MOD_RES (601)..(601): Selenocysteine
  MOD_RES (610)..(610): Selenocysteine
  MOD_RES (650)..(650): Selenocysteine
  MOD_RES (677)..(677): Selenocysteine
  MOD_RES (679)..(679): Selenocysteine
  MOD_RES (682)..(682): Selenocysteine
  MOD_RES (694)..(694): Selenocysteine
  MOD_RES (703)..(703): Selenocysteine
  MOD_RES (776)..(776): Selenocysteine
  MOD_RES (783)..(783): Selenocysteine
  MOD_RES (811)..(811): Selenocysteine
  MOD_RES (818)..(818): Selenocysteine
  MOD_RES (824)..(824): Selenocysteine
  MOD_RES (832)..(833): Selenocysteine
MCDLRRPAAGGMMDLAYVCEWEKWSKSXHCPSVPLACAWSCRNLIAFXMDLRSDDQDLXRMIHILDXEHPWDLHSIPSEHHEAIXCLEWDQSGSRLLSADADGQIKCWSMADHLANSWESSVGSLVEGDPIVALSWLHNGVKLALHVEKSGASSFGEKFSRVKFSPSLXLFGGKPMEGWIAVXVSGLVXVSLLKPSGQVLXSXESLCRLRGRVALADIAFXGGGNIVVAXADGSSASPVQFYKVCVSVVSEKCRIDXEILPSLFMRCXXDLNRKDKFPAIXHLKFLARDMSEQVLLCASSQXSSIVECWSLRKEGLPVNNIFQQISPVVGDKQPXILKWRILSAXNDLDRVSAVALPKLPISLXNXDLKVASDXQFYPGLGLALAFHDGSVHIVHRLSLQXMAVFYSSAAPRPVDEPAMKRPRXAGPAVHLKAMQLSWXSLALVGIDSHGKLSVLRLSPSMGHPLEVGLALRHLLFLLEYCMVXGYDWWDILLHVQPSMVQSLVEKLHEEYXRQXAALQQVLSXRILAMKASLCKLSPCXVXRVCDYHXKLFLIAISSXLKSLLRPHFLNXPDKSPGDRLXEICXKIXDVDIDKVMINLKXEEFVLDMNXLQALQQLLQWVGDFVLYLLASLPNQGSLLRPGHSFLRDGXSLGMLRELMVVIRIWGLLKPSCLPVYXAXSDXQDSMSLLFRLLXKLWICFPSXGPCSVWVLLGWQPLPGRDEGPASEPDEALVDECCLLPSQLLIPSLDWLPASDGLVSRLQPKQPLRLQFGRAPXLPGSAAXLQLDGLARAPGQPKIDHLRRLHLGACPXEECKACXRCGCVXMLKSPNRXXAVKQWEQRWIKNCLCGGLWWRVPLSYP

SEQ ID NO: 16118 - protein, 877 aa, Homo sapiens
  MOD_RES (28)..(28): Selenocysteine
  MOD_RES (48)..(48): Selenocysteine
  MOD_RES (59)..(59): Selenocysteine
  MOD_RES (67)..(67): Selenocysteine
  MOD_RES (85)..(85): Selenocysteine
  MOD_RES (169)..(169): Selenocysteine
  MOD_RES (183)..(183): Selenocysteine
  MOD_RES (189)..(189): Selenocysteine
  MOD_RES (201)..(201): Selenocysteine
  MOD_RES (203)..(203): Selenocysteine
  MOD_RES (221)..(221): Selenocysteine
  MOD_RES (230)..(230): Selenocysteine
  MOD_RES (257)..(257): Selenocysteine
  MOD_RES (268)..(269): Selenocysteine
  MOD_RES (281)..(281): Selenocysteine
  MOD_RES (302)..(302): Selenocysteine
  MOD_RES (335)..(335): Selenocysteine
  MOD_RES (345)..(345): Selenocysteine
  MOD_RES (364)..(364): Selenocysteine
  MOD_RES (366)..(366): Selenocysteine
  MOD_RES (374)..(374): Selenocysteine
  MOD_RES (401)..(401): Selenocysteine
  MOD_RES (424)..(424): Selenocysteine
  MOD_RES (439)..(439): Selenocysteine
  MOD_RES (484)..(484): Selenocysteine
  MOD_RES (512)..(512): Selenocysteine
  MOD_RES (515)..(515): Selenocysteine
  MOD_RES (524)..(524): Selenocysteine
  MOD_RES (540)..(540): Selenocysteine
  MOD_RES (542)..(542): Selenocysteine
  MOD_RES (549)..(549): Selenocysteine
  MOD_RES (559)..(559): Selenocysteine
  MOD_RES (571)..(571): Selenocysteine
  MOD_RES (581)..(581): Selenocysteine
  MOD_RES (585)..(585): Selenocysteine
  MOD_RES (588)..(588): Selenocysteine
  MOD_RES (601)..(601): Selenocysteine
  MOD_RES (610)..(610): Selenocysteine
  MOD_RES (650)..(650): Selenocysteine
  MOD_RES (677)..(677): Selenocysteine
  MOD_RES (679)..(679): Selenocysteine
  MOD_RES (682)..(682): Selenocysteine
  MOD_RES (694)..(694): Selenocysteine
  MOD_RES (757)..(757): Selenocysteine
  MOD_RES (764)..(764): Selenocysteine
  MOD_RES (792)..(792): Selenocysteine
  MOD_RES (799)..(799): Selenocysteine
  MOD_RES (805)..(805): Selenocysteine
  MOD_RES (813)..(814): Selenocysteine
  MOD_RES (840)..(840): Selenocysteine
  MOD_RES (858)..(858): Selenocysteine
  MOD_RES (864)..(864): Selenocysteine
MCDLRRPAAGGMMDLAYVCEWEKWSKSXHCPSVPLACAWSCRNLIAFXMDLRSDDQDLXRMIHILDXEHPWDLHSIPSEHHEAIXCLEWDQSGSRLLSADADGQIKCWSMADHLANSWESSVGSLVEGDPIVALSWLHNGVKLALHVEKSGASSFGEKFSRVKFSPSLXLFGGKPMEGWIAVXVSGLVXVSLLKPSGQVLXSXESLCRLRGRVALADIAFXGGGNIVVAXADGSSASPVQFYKVCVSVVSEKCRIDXEILPSLFMRCXXDLNRKDKFPAIXHLKFLARDMSEQVLLCASSQXSSIVECWSLRKEGLPVNNIFQQISPVVGDKQPXILKWRILSAXNDLDRVSAVALPKLPISLXNXDLKVASDXQFYPGLGLALAFHDGSVHIVHRLSLQXMAVFYSSAAPRPVDEPAMKRPRXAGPAVHLKAMQLSWXSLALVGIDSHGKLSVLRLSPSMGHPLEVGLALRHLLFLLEYCMVXGYDWWDILLHVQPSMVQSLVEKLHEEYXRQXAALQQVLSXRILAMKASLCKLSPCXVXRVCDYHXKLFLIAISSXLKSLLRPHFLNXPDKSPGDRLXEICXKIXDVDIDKVMINLKXEEFVLDMNXLQALQQLLQWVGDFVLYLLASLPNQGSLLRPGHSFLRDGXSLGMLRELMVVIRIWGLLKPSCLPVYXAXSDXQDSMSLLFRLLXKLWICCRDEGPASEPDEALVDECCLLPSQLLIPSLDWLPASDGLVSRLQPKQPLRLQFGRAPXLPGSAAXLQLDGLARAPGQPKIDHLRRLHLGACPXEECKACXRCGCVXMLKSPNRXXAVKQWEQRWIKNCLAVEGRGPDACVXSRASEEAPAFVQLGPQSXHHSPRXPRSLDHLHPEDRP

SEQ ID NO: 16119 - protein, 218 aa, Homo sapiens
  MOD_RES (28)..(28): Selenocysteine
  MOD_RES (48)..(48): Selenocysteine
  MOD_RES (59)..(59): Selenocysteine
  MOD_RES (67)..(67): Selenocysteine
  MOD_RES (85)..(85): Selenocysteine
  MOD_RES (169)..(169): Selenocysteine
  MOD_RES (176)..(176): Selenocysteine
  MOD_RES (182)..(182): Selenocysteine
  MOD_RES (190)..(191): Selenocysteine
MCDLRRPAAGGMMDLAYVCEWEKWSKSXHCPSVPLACAWSCRNLIAFXMDLRSDDQDLXRMIHILDXEHPWDLHSIPSEHHEAIXCLEWDQSGSRLLSADADGQIKCWSMADHLANSWESSVGSLVEGDPIVALSWLHNGVKLALHVEKSGASSFGEKFSRVKFSPSPXEECKACXRCGCVXMLKSPNRXXAVKQWEQRWIKNCLCGGLWWRVPLSYP

SEQ ID NO: 16120 - protein, 194 aa, Homo sapiens
  MOD_RES (28)..(28): Selenocysteine
  MOD_RES (48)..(48): Selenocysteine
  MOD_RES (59)..(59): Selenocysteine
  MOD_RES (67)..(67): Selenocysteine
  MOD_RES (85)..(85): Selenocysteine
  MOD_RES (159)..(159): Selenocysteine
  MOD_RES (169)..(169): Selenocysteine
  MOD_RES (173)..(173): Selenocysteine
  MOD_RES (176)..(176): Selenocysteine
  MOD_RES (189)..(189): Selenocysteine
MCDLRRPAAGGMMDLAYVCEWEKWSKSXHCPSVPLACAWSCRNLIAFXMDLRSDDQDLXRMIHILDXEHPWDLHSIPSEHHEAIXCLEWDQSGSRLLSADADGQIKCWSMADHLANSWESSVGSLVEGDPIVALSWLHNGVKLALHVEKSLLRPHFLNXPDKSPGDRLXEICXKIXDVDIDKVMINLKXEEFVL

SEQ ID NO: 16121 - protein, 462 aa, Homo sapiens
  MOD_RES (28)..(28): Selenocysteine
  MOD_RES (48)..(48): Selenocysteine
  MOD_RES (59)..(59): Selenocysteine
  MOD_RES (67)..(67): Selenocysteine
  MOD_RES (85)..(85): Selenocysteine
  MOD_RES (158)..(158): Selenocysteine
  MOD_RES (191)..(191): Selenocysteine
  MOD_RES (201)..(201): Selenocysteine
  MOD_RES (220)..(220): Selenocysteine
  MOD_RES (222)..(222): Selenocysteine
  MOD_RES (230)..(230): Selenocysteine
  MOD_RES (257)..(257): Selenocysteine
  MOD_RES (280)..(280): Selenocysteine
  MOD_RES (295)..(295): Selenocysteine
  MOD_RES (340)..(340): Selenocysteine
  MOD_RES (368)..(368): Selenocysteine
  MOD_RES (371)..(371): Selenocysteine
  MOD_RES (380)..(380): Selenocysteine
  MOD_RES (396)..(396): Selenocysteine
  MOD_RES (398)..(398): Selenocysteine
  MOD_RES (405)..(405): Selenocysteine
  MOD_RES (415)..(415): Selenocysteine
  MOD_RES (427)..(427): Selenocysteine
  MOD_RES (437)..(437): Selenocysteine
  MOD_RES (441)..(441): Selenocysteine
  MOD_RES (444)..(444): Selenocysteine
  MOD_RES (457)..(457): Selenocysteine
MCDLRRPAAGGMMDLAYVCEWEKWSKSXHCPSVPLACAWSCRNLIAFXMDLRSDDQDLXRMIHILDXEHPWDLHSIPSEHHEAIXCLEWDQSGSRLLSADADGQIKCWSMADHLANSWESSVGSLVEGDPIVALSWLHNGVKLALHVEKVLLCASSQXSSIVECWSLRKEGLPVNNIFQQISPVVGDKQPXILKWRILSAXNDLDRVSAVALPKLPISLXNXDLKVASDXQFYPGLGLALAFHDGSVHIVHRLSLQXMAVFYSSAAPRPVDEPAMKRPRXAGPAVHLKAMQLSWXSLALVGIDSHGKLSVLRLSPSMGHPLEVGLALRHLLFLLEYCMVXGYDWWDILLHVQPSMVQSLVEKLHEEYXRQXAALQQVLSXRILAMKASLCKLSPCXVXRVCDYHXKLFLIAISSXLKSLLRPHFLNXPDKSPGDRLXEICXKIXDVDIDKVMINLKXEEFVL

SEQ ID NO: 16122 - protein, 74 aa, Homo sapiens
  MOD_RES (28)..(28): Selenocysteine
  MOD_RES (48)..(48): Selenocysteine
  MOD_RES (65)..(65): Selenocysteine
MCDLRRPAAGGMMDLAYVCEWEKWSKSXHCPSVPLACAWSCRNLIAFXMDLRSDDQGLLCSCGGXACSLSCRLG

SEQ ID NO: 16123 - protein, 79 aa, Homo sapiens
  MOD_RES (1)..(1): Any amino acid
  MOD_RES (3)..(3): Selenocysteine
  MOD_RES (31)..(31): Selenocysteine
  MOD_RES (38)..(38): Selenocysteine
  MOD_RES (44)..(44): Selenocysteine
  MOD_RES (52)..(53): Selenocysteine
  MOD_RES (77)..(77): Selenocysteine
XAXLQLDGLARAPGQPKIDHLRRLHLGACPXEECKACXRCGCVXMLKSPNRXXAVKQWEQRWIKNCLCGLLKAVGRXPA

SEQ ID NO: 16124 - protein, 505 aa, Homo sapiens
  MOD_RES (1)..(1): Any amino acid
  MOD_RES (11)..(11): Selenocysteine
  MOD_RES (22)..(23): Selenocysteine
  MOD_RES (35)..(35): Selenocysteine
  MOD_RES (56)..(56): Selenocysteine
  MOD_RES (89)..(89): Selenocysteine
  MOD_RES (99)..(99): Selenocysteine
  MOD_RES (118)..(118): Selenocysteine
  MOD_RES (120)..(120): Selenocysteine
  MOD_RES (128)..(128): Selenocysteine
  MOD_RES (155)..(155): Selenocysteine
  MOD_RES (178)..(178): Selenocysteine
  MOD_RES (193)..(193): Selenocysteine
  MOD_RES (238)..(238): Selenocysteine
  MOD_RES (266)..(266): Selenocysteine
  MOD_RES (269)..(269): Selenocysteine
  MOD_RES (278)..(278): Selenocysteine
  MOD_RES (294)..(294): Selenocysteine
  MOD_RES (296)..(296): Selenocysteine
  MOD_RES (303)..(303): Selenocysteine
  MOD_RES (313)..(313): Selenocysteine
  MOD_RES (325)..(325): Selenocysteine
  MOD_RES (335)..(335): Selenocysteine
  MOD_RES (339)..(339): Selenocysteine
  MOD_RES (342)..(342): Selenocysteine
  MOD_RES (355)..(355): Selenocysteine
  MOD_RES (364)..(364): Selenocysteine
  MOD_RES (400)..(400): Selenocysteine
  MOD_RES (420)..(420): Selenocysteine
  MOD_RES (426)..(426): Selenocysteine
  MOD_RES (458)..(458): Selenocysteine
  MOD_RES (470)..(471): Selenocysteine
  MOD_RES (476)..(476): Selenocysteine
  MOD_RES (501)..(501): Selenocysteine
XVVSEKCRIDXEILPSLFMRCXXDLNRKDKFPAIXHLKFLARDMSEQVLLCASSQXSSIVECWSLRKEGLPVNNIFQQISPVVGDKQPXILKWRILSAXNDLDRVSAVALPKLPISLXNXDLKVASDXQFYPGLGLALAFHDGSVHIVHRLSLQXMAVFYSSAAPRPVDEPAMKRPRXAGPAVHLKAMQLSWXSLALVGIDSHGKLSVLRLSPSMGHPLEVGLALRHLLFLLEYCMVXGYDWWDILLHVQPSMVQSLVEKLHEEYXRQXAALQQVLSXRILAMKASLCKLSPCXVXRVCDYHXKLFLIAISSXLKSLLRPHFLNXPDKSPGDRLXEICXKIXDVDIDKVMINLKXEEFVLDMNXLQALQQLLQWVGDFVLYLLASLPNQVAMRAQRASRXRRWWMNAACCPASCLSPAWXGCQPAXAWLAACSPSSPFVCSLAGRPRCLAVLPPCSSXASPGPQASPRSXXCGGCXLALAPRRNARPAPGAAVSPCSSRPXEPRR

SEQ ID NO: 16125 - protein, 143 aa, Homo sapiens
  MOD_RES (18)..(18): Selenocysteine
  MOD_RES (35)..(35): Selenocysteine
  MOD_RES (60)..(60): Selenocysteine
  MOD_RES (64)..(64): Selenocysteine
  MOD_RES (113)..(113): Selenocysteine
  MOD_RES (120)..(120): Selenocysteine
MCVLYDVLSIVRDKKFMXLDPVSQDALPPKQNPQXLQLISKKKSLAGAAQILLKGAERLXKSVXENQENKLQRDFNSELLRLRQHWKLRKVGDKILGDLSYRSAGSLFPHHGXFEVIKNXDLDLDKKIPEDYCPLDVQIPSDL

SEQ ID NO: 16126 - protein, 232 aa, Homo sapiens
  MOD_RES (27)..(27): Selenocysteine
  MOD_RES (29)..(29): Selenocysteine
  MOD_RES (63)..(63): Selenocysteine
  MOD_RES (107)..(107): Selenocysteine
  MOD_RES (126)..(126): Selenocysteine
  MOD_RES (153)..(153): Selenocysteine
  MOD_RES (171)..(171): Selenocysteine
  MOD_RES (196)..(196): Selenocysteine
  MOD_RES (200)..(200): Selenocysteine
MSGVRAVRISIESACEKQVHEVGLDGXEXYLPPLSMSQNLARLAQRIDFSQGSGSEEEEAAGXEGDAQEWPGAGSSADQDDEEGVVKFQPSLWPWDSVRNNLRSALXEMCVLYDVLSIVRDKKFMXLDPVSQDALPPKQDRGLAIYKERNGSXLRGDPNRLDRVDAMNPQXLQLISKKKSLAGAAQILLKGAERLXKSVXENQENKLQRDFNSELLRLRQHWKLRKVGDKIL

SEQ ID NO: 16127 - protein, 266 aa, Homo sapiens
  MOD_RES (27)..(27): Selenocysteine
  MOD_RES (29)..(29): Selenocysteine
  MOD_RES (63)..(63): Selenocysteine
  MOD_RES (107)..(107): Selenocysteine
  MOD_RES (126)..(126): Selenocysteine
  MOD_RES (143)..(143): Selenocysteine
  MOD_RES (168)..(168): Selenocysteine
  MOD_RES (172)..(172): Selenocysteine
  MOD_RES (221)..(221): Selenocysteine
  MOD_RES (228)..(228): Selenocysteine
MSGVRAVRISIESACEKQVHEVGLDGXEXYLPPLSMSQNLARLAQRIDFSQGSGSEEEEAAGXEGDAQEWPGAGSSADQDDEEGVVKFQPSLWPWDSVRNNLRSALXEMCVLYDVLSIVRDKKFMXLDPVSQDALPPKQNPQXLQLISKKKSLAGAAQILLKGAERLXKSVXENQENKLQRDFNSELLRLRQHWKLRKVGDKILGDLSYRSAGSLFPHHGXFEVIKNXDLDLDKKIPEDYCPLDVQIPSDLEGSAYIKVFVKIFFK

SEQ ID NO: 16128 - protein, 651 aa, Homo sapiens
  MOD_RES (27)..(27): Selenocysteine
  MOD_RES (29)..(29): Selenocysteine
  MOD_RES (63)..(63): Selenocysteine
  MOD_RES (107)..(107): Selenocysteine
  MOD_RES (126)..(126): Selenocysteine
  MOD_RES (143)..(143): Selenocysteine
  MOD_RES (168)..(168): Selenocysteine
  MOD_RES (172)..(172): Selenocysteine
  MOD_RES (221)..(221): Selenocysteine
  MOD_RES (228)..(228): Selenocysteine
  MOD_RES (273)..(273): Selenocysteine
  MOD_RES (293)..(293): Selenocysteine
  MOD_RES (359)..(359): Selenocysteine
  MOD_RES (386)..(386): Selenocysteine
  MOD_RES (447)..(447): Selenocysteine
  MOD_RES (480)..(480): Selenocysteine
  MOD_RES (513)..(513): Selenocysteine
  MOD_RES (570)..(570): Selenocysteine
MSGVRAVRISIESACEKQVHEVGLDGXEXYLPPLSMSQNLARLAQRIDFSQGSGSEEEEAAGXEGDAQEWPGAGSSADQDDEEGVVKFQPSLWPWDSVRNNLRSALXEMCVLYDVLSIVRDKKFMXLDPVSQDALPPKQNPQXLQLISKKKSLAGAAQILLKGAERLXKSVXENQENKLQRDFNSELLRLRQHWKLRKVGDKILGDLSYRSAGSLFPHHGXFEVIKNXDLDLDKKIPEDYCPLDVQIPSDLEGSAYIKVSIQKQAPDIGDLGXVNLFKRPLPKSKPGSPHWQXKLEAAQNVLLCKEIFAQLSREAVQIKSQVPHIVVKNQIISQPFPSLQLSISLCHSSNDKKSQKFAXEKQCPEDHLYVLEHNLHLLIREFHKQXLSSIMMPHPASAPFGHKRMRLSGPQAFDKNEINSLQSSEGLLEKIIKQAKHIFLRSRAAAXIDSLASRIEDPQIQAHWSNINDVYESSVKVLIXSQGYEQICKSIQLQLNIGVEQIRVVHRDGRVIXLSYQEQELQDFLLSQMSQHQVHAVQQLAKVMGWQVLSFSNHVGLGPIESIGNASAIXVASPSGDYAISVRNGPESGSKIMVQFPRNQCKDLPKSDVLQDNKWSHLRGPFKEVQWNKMEGRNFVYKMELLMSALSPCLL

SEQ ID NO: 16129 - protein, 145 aa, Homo sapiens
  MOD_RES (27)..(27): Selenocysteine
  MOD_RES (29)..(29): Selenocysteine
  MOD_RES (63)..(63): Selenocysteine
  MOD_RES (107)..(107): Selenocysteine
  MOD_RES (126)..(126): Selenocysteine
MSGVRAVRISIESACEKQVHEVGLDGXEXYLPPLSMSQNLARLAQRIDFSQGSGSEEEEAAGXEGDAQEWPGAGSSADQDDEEGVVKFQPSLWPWDSVRNNLRSALXEMCVLYDVLSIVRDKKFMXLDPVSQDALPPKQVFVDFN

SEQ ID NO: 16130 - protein, 138 aa, Homo sapiens
  MOD_RES (56)..(56): Selenocysteine
  MOD_RES (71)..(71): Selenocysteine
  MOD_RES (89)..(89): Selenocysteine
  MOD_RES (93)..(93): Selenocysteine
  MOD_RES (111)..(111): Selenocysteine
  MOD_RES (120)..(120): Selenocysteine
  MOD_RES (126)..(126): Selenocysteine
  MOD_RES (128)..(128): Selenocysteine
AISSQFDDFSRDLCVQALLDIMDMFCDRLSCHGKAEECIGLCRALLSALHWLLRCXAASAERLREGLEAGXPAAGEKQLAMCLQRLEKXLSSXKNRALLHIAKLEEASLHXSQGLGQGGXRANQPXAXGFWPPSASLS

SEQ ID NO: 16131 - protein, 791 aa, Homo sapiens
  MOD_RES (30)..(30): Selenocysteine
  MOD_RES (85)..(85): Selenocysteine
  MOD_RES (100)..(100): Selenocysteine
  MOD_RES (118)..(118): Selenocysteine
  MOD_RES (122)..(122): Selenocysteine
  MOD_RES (140)..(140): Selenocysteine
  MOD_RES (170)..(170): Selenocysteine
  MOD_RES (177)..(177): Selenocysteine
  MOD_RES (189)..(189): Selenocysteine
  MOD_RES (193)..(193): Selenocysteine
  MOD_RES (203)..(203): Selenocysteine
  MOD_RES (207)..(207): Selenocysteine
  MOD_RES (210)..(210): Selenocysteine
  MOD_RES (218)..(218): Selenocysteine
  MOD_RES (228)..(228): Selenocysteine
  MOD_RES (250)..(250): Selenocysteine
  MOD_RES (256)..(256): Selenocysteine
  MOD_RES (259)..(259): Selenocysteine
  MOD_RES (281)..(281): Selenocysteine
  MOD_RES (295)..(295): Selenocysteine
  MOD_RES (310)..(310): Selenocysteine
  MOD_RES (366)..(366): Selenocysteine
  MOD_RES (368)..(368): Selenocysteine
  MOD_RES (373)..(373): Selenocysteine
  MOD_RES (408)..(408): Selenocysteine
  MOD_RES (425)..(426): Selenocysteine
  MOD_RES (433)..(433): Selenocysteine
  MOD_RES (456)..(456): Selenocysteine
  MOD_RES (468)..(468): Selenocysteine
  MOD_RES (477)..(477): Selenocysteine
  MOD_RES (481)..(481): Selenocysteine
  MOD_RES (502)..(502): Selenocysteine
  MOD_RES (556)..(556): Selenocysteine
  MOD_RES (605)..(605): Selenocysteine
  MOD_RES (631)..(631): Selenocysteine
  MOD_RES (633)..(633): Selenocysteine
  MOD_RES (640)..(640): Selenocysteine
  MOD_RES (644)..(644): Selenocysteine
  MOD_RES (662)..(662): Selenocysteine
  MOD_RES (684)..(684): Selenocysteine
  MOD_RES (706)..(706): Selenocysteine
  MOD_RES (711)..(711): Selenocysteine
  MOD_RES (730)..(730): Selenocysteine
  MOD_RES (743)..(743): Selenocysteine
  MOD_RES (757)..(757): Selenocysteine
  MOD_RES (780)..(780): Selenocysteine
MIGPSPNPLILSYLKYAISSQMVSYSSVLXAISKFDDFSRDLCVQALLDIMDMFCDRLSCHGKAEECIGLCRALLSALHWLLRCXAASAERLREGLEAGXPAAGEKQLAMCLQRLEKXLSSXKNRALLHIAKLEEASSWXAIEHSLLKLGEILANLSNPQLRSQAEQCGXLIRSIPXMLSVHAEQMHKXGFPXVHAVILLEGXMNLXGEXQSLVEQLXMVKRMQHIPXPLFVLEIWKACFVGLIESPEGXEELKWXAFXFLKIPQVLVKLKKYSHGDKDFXEDVNCAFEFLLKLXPLLDKADQRCNCDCXNFLLQECGKQGLLSEASVNNLMAKRKADREHAPQQKSGENANIQPNIQLILRAEPXVXNILKXMDADHSKSPEGLLGVLGHMLSGKSLDLLLAAAAAXGKLKSFARKFINLNEFXXYGSEESXKPASVRALLFDISFLMLCHVAQXYGSEVILSESRXGAEVPFFEXWMQXCMPEEGKILNPDHPCFRPDSXKVESLVALLNNSSEMKLVQMKWHEACLSISAAILEILNAWENGVLAFESIQKIXDNIKGKVCSLAVCAVAWLVAHVRMLGLDEREKSLQMIRQLAGPLFSENXLQFYNERVVIMNSILERMCADVLQQXAXQIKFPSXGVDXMPYWNLLPPKRPIKEVLXDIFAKVLEKGWVDSRSIHIFDXLLHMGGVYWFCNNLIKELLKEXRKEHXLRAVELLYSIFCLDMQQVXLVLLGHILPGLLXDSSKWHSLMDPPGXALAKLAVWCALSSYSSHKGQASXRQKKRHREDIE

SEQ ID NO: 16132 - protein, 176 aa, Homo sapiens
  MOD_RES (82)..(82): Selenocysteine
  MOD_RES (126)..(126): Selenocysteine
MIQEWLQVEGLRLWLQAQNDSRGAGKAPFLSPQSWPPPLPPAQSEIMKVVNLKQAILQAWKERWSDYQWAINMKKFFPKGAXWDILNLADALLEQAMIGPSPNPLILSYLKYAISSQMVSYSSVLXAISKFDDFSRDLCVQALLDIMDMFCDRLSCHGKAEECIGLCRALLSALHW

SEQ ID NO: 16133 - protein, 54 aa, Homo sapiens
  MOD_RES (36)..(36): Selenocysteine
MKVVNLKQAILQAWKERWSDYQWAINMKKFFPKGAXWDILNLADALLEQAMIGP

SEQ ID NO: 16134 - protein, 976 aa, Homo sapiens
  MOD_RES (36)..(36): Selenocysteine
  MOD_RES (122)..(122): Selenocysteine
  MOD_RES (137)..(137): Selenocysteine
  MOD_RES (155)..(155): Selenocysteine
  MOD_RES (159)..(159): Selenocysteine
  MOD_RES (177)..(177): Selenocysteine
  MOD_RES (207)..(207): Selenocysteine
  MOD_RES (214)..(214): Selenocysteine
  MOD_RES (226)..(226): Selenocysteine
  MOD_RES (230)..(230): Selenocysteine
  MOD_RES (240)..(240): Selenocysteine
  MOD_RES (244)..(244): Selenocysteine
  MOD_RES (247)..(247): Selenocysteine
  MOD_RES (255)..(255): Selenocysteine
  MOD_RES (265)..(265): Selenocysteine
  MOD_RES (287)..(287): Selenocysteine
  MOD_RES (293)..(293): Selenocysteine
  MOD_RES (296)..(296): Selenocysteine
  MOD_RES (318)..(318): Selenocysteine
  MOD_RES (332)..(332): Selenocysteine
  MOD_RES (347)..(347): Selenocysteine
  MOD_RES (403)..(403): Selenocysteine
  MOD_RES (405)..(405): Selenocysteine
  MOD_RES (410)..(410): Selenocysteine
  MOD_RES (445)..(445): Selenocysteine
  MOD_RES (462)..(463): Selenocysteine
  MOD_RES (470)..(470): Selenocysteine
  MOD_RES (493)..(493): Selenocysteine
  MOD_RES (505)..(505): Selenocysteine
  MOD_RES (514)..(514): Selenocysteine
  MOD_RES (518)..(518): Selenocysteine
  MOD_RES (539)..(539): Selenocysteine
  MOD_RES (593)..(593): Selenocysteine
  MOD_RES (642)..(642): Selenocysteine
  MOD_RES (668)..(668): Selenocysteine
  MOD_RES (670)..(670): Selenocysteine
  MOD_RES (677)..(677): Selenocysteine
  MOD_RES (681)..(681): Selenocysteine
  MOD_RES (699)..(699): Selenocysteine
  MOD_RES (721)..(721): Selenocysteine
  MOD_RES (743)..(743): Selenocysteine
  MOD_RES (748)..(748): Selenocysteine
  MOD_RES (767)..(767): Selenocysteine
  MOD_RES (780)..(780): Selenocysteine
  MOD_RES (794)..(794): Selenocysteine
  MOD_RES (817)..(817): Selenocysteine
  MOD_RES (862)..(862): Selenocysteine
  MOD_RES (877)..(877): Selenocysteine
  MOD_RES (903)..(903): Selenocysteine
  MOD_RES (908)..(908): Selenocysteine
  MOD_RES (937)..(938): Selenocysteine
  MOD_RES (958)..(958): Selenocysteine
MKVVNLKQAILQAWKERWSDYQWAINMKKFFPKGAXWDILNLADALLEQAMIGPSPNPLILSYLKYAISSQFDDFSRDLCVQALLDIMDMFCDRLSCHGKAEECIGLCRALLSALHWLLRCXAASAERLREGLEAGXPAAGEKQLAMCLQRLEKXLSSXKNRALLHIAKLEEASSWXAIEHSLLKLGEILANLSNPQLRSQAEQCGXLIRSIPXMLSVHAEQMHKXGFPXVHAVILLEGXMNLXGEXQSLVEQLXMVKRMQHIPXPLFVLEIWKACFVGLIESPEGXEELKWXAFXFLKIPQVLVKLKKYSHGDKDFXEDVNCAFEFLLKLXPLLDKADQRCNCDCXNFLLQECGKQGLLSEASVNNLMAKRKADREHAPQQKSGENANIQPNIQLILRAEPXVXNILKXMDADHSKSPEGLLGVLGHMLSGKSLDLLLAAAAAXGKLKSFARKFINLNEFXXYGSEESXKPASVRALLFDISFLMLCHVAQXYGSEVILSESRXGAEVPFFEXWMQXCMPEEGKILNPDHPCFRPDSXKVESLVALLNNSSEMKLVQMKWHEACLSISAAILEILNAWENGVLAFESIQKIXDNIKGKVCSLAVCAVAWLVAHVRMLGLDEREKSLQMIRQLAGPLFSENXLQFYNERVVIMNSILERMCADVLQQXAXQIKFPSXGVDXMPYWNLLPPKRPIKEVLXDIFAKVLEKGWVDSRSIHIFDXLLHMGGVYWFCNNLIKELLKEXRKEHXLRAVELLYSIFCLDMQQVXLVLLGHILPGLLXDSSKWHSLMDPPGXALAKLAVWCALSSYSSHKGQASXRQKKRHREDIEDYISLFPLDDVQPSKLMRLLSSNEDDANILSSPXDRSMSSSLSASQLHXVNMRDPLNRVLANLFLLISSILGSRXAGPHXQFVQWFMEECVDCLEQGGRGSVLQFMPFXXVSELVKVSAMSSPKVVLAIXDLSLPLGRQVAAKAIAAL

SEQ ID NO: 16135 - protein, 137 aa, Homo sapiens
  MOD_RES (36)..(36): Selenocysteine
  MOD_RES (80)..(80): Selenocysteine
  MOD_RES (110)..(110): Selenocysteine
MKVVNLKQAILQAWKERWSDYQWAINMKKFFPKGAXWDILNLADALLEQAMIGPSPNPLILSYLKYAISSQMVSYSSVLXAISKFDDFSRDHKPSGHPCVRPPQPRSSLXSEELSRCKVCMCVCVCVCVCLCVFCNM

SEQ ID NO: 16136 - protein, 159 aa, Homo sapiens
  MOD_RES (36)..(36): Selenocysteine
  MOD_RES (80)..(80): Selenocysteine
  MOD_RES (135)..(135): Selenocysteine
  MOD_RES (150)..(150): Selenocysteine
MKVVNLKQAILQAWKERWSDYQWAINMKKFFPKGAXWDILNLADALLEQAMIGPSPNPLILSYLKYAISSQMVSYSSVLXAISKFDDFSRDLCVQALLDIMDMFCDRLSCHGKAEECIGLCRALLSALHWLLRCXAASAERLREGLEAGXPAAGEKQLA

SEQ ID NO: 16137 - protein, 1008 aa, Homo sapiens
  MOD_RES (36)..(36): Selenocysteine
  MOD_RES (80)..(80): Selenocysteine
  MOD_RES (135)..(135): Selenocysteine
  MOD_RES (150)..(150): Selenocysteine
  MOD_RES (168)..(168): Selenocysteine
  MOD_RES (172)..(172): Selenocysteine
  MOD_RES (190)..(190): Selenocysteine
  MOD_RES (199)..(199): Selenocysteine
  MOD_RES (205)..(205): Selenocysteine
  MOD_RES (209)..(209): Selenocysteine
  MOD_RES (239)..(239): Selenocysteine
  MOD_RES (246)..(246): Selenocysteine
  MOD_RES (258)..(258): Selenocysteine
  MOD_RES (262)..(262): Selenocysteine
  MOD_RES (272)..(272): Selenocysteine
  MOD_RES (276)..(276): Selenocysteine
  MOD_RES (279)..(279): Selenocysteine
  MOD_RES (287)..(287): Selenocysteine
  MOD_RES (297)..(297): Selenocysteine
  MOD_RES (319)..(319): Selenocysteine
  MOD_RES (325)..(325): Selenocysteine
  MOD_RES (328)..(328): Selenocysteine
  MOD_RES (350)..(350): Selenocysteine
  MOD_RES (364)..(364): Selenocysteine
  MOD_RES (379)..(379): Selenocysteine
  MOD_RES (435)..(435): Selenocysteine
  MOD_RES (437)..(437): Selenocysteine
  MOD_RES (442)..(442): Selenocysteine
  MOD_RES (477)..(477): Selenocysteine
  MOD_RES (494)..(495): Selenocysteine
  MOD_RES (502)..(502): Selenocysteine
  MOD_RES (525)..(525): Selenocysteine
  MOD_RES (537)..(537): Selenocysteine
  MOD_RES (546)..(546): Selenocysteine
  MOD_RES (550)..(550): Selenocysteine
  MOD_RES (571)..(571): Selenocysteine
  MOD_RES (625)..(625): Selenocysteine
  MOD_RES (674)..(674): Selenocysteine
  MOD_RES (700)..(700): Selenocysteine
  MOD_RES (702)..(702): Selenocysteine
  MOD_RES (709)..(709): Selenocysteine
  MOD_RES (713)..(713): Selenocysteine
  MOD_RES (731)..(731): Selenocysteine
  MOD_RES (753)..(753): Selenocysteine
  MOD_RES (775)..(775): Selenocysteine
  MOD_RES (780)..(780): Selenocysteine
  MOD_RES (799)..(799): Selenocysteine
  MOD_RES (812)..(812): Selenocysteine
  MOD_RES (826)..(826): Selenocysteine
  MOD_RES (849)..(849): Selenocysteine
  MOD_RES (894)..(894): Selenocysteine
  MOD_RES (909)..(909): Selenocysteine
  MOD_RES (935)..(935): Selenocysteine
  MOD_RES (940)..(940): Selenocysteine
  MOD_RES (969)..(970): Selenocysteine
  MOD_RES (990)..(990): Selenocysteine
MKVVNLKQAILQAWKERWSDYQWAINMKKFFPKGAXWDILNLADALLEQAMIGPSPNPLILSYLKYAISSQMVSYSSVLXAISKFDDFSRDLCVQALLDIMDMFCDRLSCHGKAEECIGLCRALLSALHWLLRCXAASAERLREGLEAGXPAAGEKQLAMCLQRLEKXLSSXKNRALLHIAKLEEASLHXSQGLGQGGXRANQPXASWXAIEHSLLKLGEILANLSNPQLRSQAEQCGXLIRSIPXMLSVHAEQMHKXGFPXVHAVILLEGXMNLXGEXQSLVEQLXMVKRMQHIPXPLFVLEIWKACFVGLIESPEGXEELKWXAFXFLKIPQVLVKLKKYSHGDKDFXEDVNCAFEFLLKLXPLLDKADQRCNCDCXNFLLQECGKQGLLSEASVNNLMAKRKADREHAPQQKSGENANIQPNIQLILRAEPXVXNILKXMDADHSKSPEGLLGVLGHMLSGKSLDLLLAAAAAXGKLKSFARKFINLNEFXXYGSEESXKPASVRALLFDISFLMLCHVAQXYGSEVILSESRXGAEVPFFEXWMQXCMPEEGKILNPDHPCFRPDSXKVESLVALLNNSSEMKLVQMKWHEACLSISAAILEILNAWENGVLAFESIQKIXDNIKGKVCSLAVCAVAWLVAHVRMLGLDEREKSLQMIRQLAGPLFSENXLQFYNERVVIMNSILERMCADVLQQXAXQIKFPSXGVDXMPYWNLLPPKRPIKEVLXDIFAKVLEKGWVDSRSIHIFDXLLHMGGVYWFCNNLIKELLKEXRKEHXLRAVELLYSIFCLDMQQVXLVLLGHILPGLLXDSSKWHSLMDPPGXALAKLAVWCALSSYSSHKGQASXRQKKRHREDIEDYISLFPLDDVQPSKLMRLLSSNEDDANILSSPXDRSMSSSLSASQLHXVNMRDPLNRVLANLFLLISSILGSRXAGPHXQFVQWFMEECVDCLEQGGRGSVLQFMPFXXVSELVKVSAMSSPKVVLAIXDLSLPLGRQVAAKAIAAL

SEQ ID NO: 16138 - protein, 989 aa, Homo sapiens
  MOD_RES (36)..(36): Selenocysteine
  MOD_RES (80)..(80): Selenocysteine
  MOD_RES (135)..(135): Selenocysteine
  MOD_RES (150)..(150): Selenocysteine
  MOD_RES (168)..(168): Selenocysteine
  MOD_RES (172)..(172): Selenocysteine
  MOD_RES (190)..(190): Selenocysteine
  MOD_RES (220)..(220): Selenocysteine
  MOD_RES (227)..(227): Selenocysteine
  MOD_RES (239)..(239): Selenocysteine
  MOD_RES (243)..(243): Selenocysteine
  MOD_RES (253)..(253): Selenocysteine
  MOD_RES (257)..(257): Selenocysteine
  MOD_RES (260)..(260): Selenocysteine
  MOD_RES (268)..(268): Selenocysteine
  MOD_RES (278)..(278): Selenocysteine
  MOD_RES (300)..(300): Selenocysteine
  MOD_RES (306)..(306): Selenocysteine
  MOD_RES (309)..(309): Selenocysteine
  MOD_RES (331)..(331): Selenocysteine
  MOD_RES (345)..(345): Selenocysteine
  MOD_RES (360)..(360): Selenocysteine
  MOD_RES (416)..(416): Selenocysteine
  MOD_RES (418)..(418): Selenocysteine
  MOD_RES (423)..(423): Selenocysteine
  MOD_RES (458)..(458): Selenocysteine
  MOD_RES (475)..(476): Selenocysteine
  MOD_RES (483)..(483): Selenocysteine
  MOD_RES (506)..(506): Selenocysteine
  MOD_RES (518)..(518): Selenocysteine
  MOD_RES (527)..(527): Selenocysteine
  MOD_RES (531)..(531): Selenocysteine
  MOD_RES (552)..(552): Selenocysteine
  MOD_RES (606)..(606): Selenocysteine
  MOD_RES (655)..(655): Selenocysteine
  MOD_RES (681)..(681): Selenocysteine
  MOD_RES (683)..(683): Selenocysteine
  MOD_RES (690)..(690): Selenocysteine
  MOD_RES (694)..(694): Selenocysteine
  MOD_RES (712)..(712): Selenocysteine
  MOD_RES (734)..(734): Selenocysteine
  MOD_RES (756)..(756): Selenocysteine
  MOD_RES (761)..(761): Selenocysteine
  MOD_RES (780)..(780): Selenocysteine
  MOD_RES (793)..(793): Selenocysteine
  MOD_RES (807)..(807): Selenocysteine
  MOD_RES (830)..(830): Selenocysteine
  MOD_RES (875)..(875): Selenocysteine
  MOD_RES (890)..(890): Selenocysteine
  MOD_RES (916)..(916): Selenocysteine
  MOD_RES (921)..(921): Selenocysteine
  MOD_RES (950)..(951): Selenocysteine
  MOD_RES (971)..(971): Selenocysteine
MKVVNLKQAILQAWKERWSDYQWAINMKKFFPKGAXWDILNLADALLEQAMIGPSPNPLILSYLKYAISSQMVSYSSVLXAISKFDDFSRDLCVQALLDIMDMFCDRLSCHGKAEECIGLCRALLSALHWLLRCXAASAERLREGLEAGXPAAGEKQLAMCLQRLEKXLSSXKNRALLHIAKLEEASSWXAIEHSLLKLGEILANLSNPQLRSQAEQCGXLIRSIPXMLSVHAEQMHKXGFPXVHAVILLEGXMNLXGEXQSLVEQLXMVKRMQHIPXPLFVLEIWKACFVGLIESPEGXEELKWXAFXFLKIPQVLVKLKKYSHGDKDFXEDVNCAFEFLLKLXPLLDKADQRCNCDCXNFLLQECGKQGLLSEASVNNLMAKRKADREHAPQQKSGENANIQPNIQLILRAEPXVXNILKXMDADHSKSPEGLLGVLGHMLSGKSLDLLLAAAAAXGKLKSFARKFINLNEFXXYGSEESXKPASVRALLFDISFLMLCHVAQXYGSEVILSESRXGAEVPFFEXWMQXCMPEEGKILNPDHPCFRPDSXKVESLVALLNNSSEMKLVQMKWHEACLSISAAILEILNAWENGVLAFESIQKIXDNIKGKVCSLAVCAVAWLVAHVRMLGLDEREKSLQMIRQLAGPLFSENXLQFYNERVVIMNSILERMCADVLQQXAXQIKFPSXGVDXMPYWNLLPPKRPIKEVLXDIFAKVLEKGWVDSRSIHIFDXLLHMGGVYWFCNNLIKELLKEXRKEHXLRAVELLYSIFCLDMQQVXLVLLGHILPGLLXDSSKWHSLMDPPGXALAKLAVWCALSSYSSHKGQASXRQKKRHREDIEDYISLFPLDDVQPSKLMRLLSSNEDDANILSSPXDRSMSSSLSASQLHXVNMRDPLNRVLANLFLLISSILGSRXAGPHXQFVQWFMEECVDCLEQGGRGSVLQFMPFXXVSELVKVSAMSSPKVVLAIXDLSLPLGRQVAAKAIAAL

SEQ ID NO: 16139 - protein, 100 aa, Homo sapiens
  MOD_RES (36)..(36): Selenocysteine
  MOD_RES (80)..(80): Selenocysteine
  MOD_RES (95)..(95): Selenocysteine
MKVVNLKQAILQAWKERWSDYQWAINMKKFFPKGAXWDILNLADALLEQAMIGPSPNPLILSYLKYAISSQMVSYSSVLXAISKLSRQSRGMHRXVPSPS

SEQ ID NO: 16140 - protein, 139 aa, Homo sapiens
  MOD_RES (61)..(61): Selenocysteine
MSFSLAPFLSPQSWPPPLPPAQSEIMKVVNLKQAILQAWKERWSDYQWAINMKKFFPKGAXWDILNLADALLEQAMIGPSPNPLILSYLKYAISSQFDDFSRDLCVQALLDIMDMFCDRLSCHGKAEECIGLCRALLSA

SEQ ID NO: 16141 - protein, 190 aa, Homo sapiens
  MOD_RES (61)..(61): Selenocysteine
  MOD_RES (147)..(147): Selenocysteine
  MOD_RES (162)..(162): Selenocysteine
  MOD_RES (180)..(180): Selenocysteine
  MOD_RES (184)..(184): Selenocysteine
MSFSLAPFLSPQSWPPPLPPAQSEIMKVVNLKQAILQAWKERWSDYQWAINMKKFFPKGAXWDILNLADALLEQAMIGPSPNPLILSYLKYAISSQFDDFSRDLCVQALLDIMDMFCDRLSCHGKAEECIGLCRALLSALHWLLRCXAASAERLREGLEAGXPAAGEKQLAMCLQRLEKXLSSXKNRALL

SEQ ID NO: 16142 - protein, 301 aa, Homo sapiens
  MOD_RES (61)..(61): Selenocysteine
  MOD_RES (147)..(147): Selenocysteine
  MOD_RES (162)..(162): Selenocysteine
  MOD_RES (180)..(180): Selenocysteine
  MOD_RES (184)..(184): Selenocysteine
  MOD_RES (202)..(202): Selenocysteine
  MOD_RES (232)..(232): Selenocysteine
  MOD_RES (239)..(239): Selenocysteine
  MOD_RES (251)..(251): Selenocysteine
  MOD_RES (255)..(255): Selenocysteine
  MOD_RES (265)..(265): Selenocysteine
  MOD_RES (269)..(269): Selenocysteine
  MOD_RES (272)..(272): Selenocysteine
  MOD_RES (280)..(280): Selenocysteine
  MOD_RES (290)..(290): Selenocysteine
MSFSLAPFLSPQSWPPPLPPAQSEIMKVVNLKQAILQAWKERWSDYQWAINMKKFFPKGAXWDILNLADALLEQAMIGPSPNPLILSYLKYAISSQFDDFSRDLCVQALLDIMDMFCDRLSCHGKAEECIGLCRALLSALHWLLRCXAASAERLREGLEAGXPAAGEKQLAMCLQRLEKXLSSXKNRALLHIAKLEEASSWXAIEHSLLKLGEILANLSNPQLRSQAEQCGXLIRSIPXMLSVHAEQMHKXGFPXVHAVILLEGXMNLXGEXQSLVEQLXMVKRMQHIPXPLFVLEIWKAC

SEQ ID NO: 16143 - protein, 143 aa, Homo sapiens
  MOD_RES (61)..(61): Selenocysteine
  MOD_RES (105)..(105): Selenocysteine
MSFSLAPFLSPQSWPPPLPPAQSEIMKVVNLKQAILQAWKERWSDYQWAINMKKFFPKGAXWDILNLADALLEQAMIGPSPNPLILSYLKYAISSQMVSYSSVLXAISKFDDFSRDLCVQALLDIMDMFCDRLSCHGKAEECI

SEQ ID NO: 16144 - protein, 163 aa, Homo sapiens
  MOD_RES (61)..(61): Selenocysteine
  MOD_RES (105)..(105): Selenocysteine
  MOD_RES (160)..(160): Selenocysteine
MSFSLAPFLSPQSWPPPLPPAQSEIMKVVNLKQAILQAWKERWSDYQWAINMKKFFPKGAXWDILNLADALLEQAMIGPSPNPLILSYLKYAISSQMVSYSSVLXAISKFDDFSRDLCVQALLDIMDMFCDRLSCHGKAEECIGLCRALLSALHWLLRCXAAS

SEQ ID NO: 16145 - protein, 1014 aa, Homo sapiens
  MOD_RES (61)..(61): Selenocysteine
  MOD_RES (105)..(105): Selenocysteine
  MOD_RES (160)..(160): Selenocysteine
  MOD_RES (175)..(175): Selenocysteine
  MOD_RES (193)..(193): Selenocysteine
  MOD_RES (197)..(197): Selenocysteine
  MOD_RES (215)..(215): Selenocysteine
  MOD_RES (245)..(245): Selenocysteine
  MOD_RES (252)..(252): Selenocysteine
  MOD_RES (264)..(264): Selenocysteine
  MOD_RES (268)..(268): Selenocysteine
  MOD_RES (278)..(278): Selenocysteine
  MOD_RES (282)..(282): Selenocysteine
  MOD_RES (285)..(285): Selenocysteine
  MOD_RES (293)..(293): Selenocysteine
  MOD_RES (303)..(303): Selenocysteine
  MOD_RES (325)..(325): Selenocysteine
  MOD_RES (331)..(331): Selenocysteine
  MOD_RES (334)..(334): Selenocysteine
  MOD_RES (356)..(356): Selenocysteine
  MOD_RES (370)..(370): Selenocysteine
  MOD_RES (385)..(385): Selenocysteine
  MOD_RES (441)..(441): Selenocysteine
  MOD_RES (443)..(443): Selenocysteine
  MOD_RES (448)..(448): Selenocysteine
  MOD_RES (483)..(483): Selenocysteine
  MOD_RES (500)..(501): Selenocysteine
  MOD_RES (508)..(508): Selenocysteine
  MOD_RES (531)..(531): Selenocysteine
  MOD_RES (543)..(543): Selenocysteine
  MOD_RES (552)..(552): Selenocysteine
  MOD_RES (556)..(556): Selenocysteine
  MOD_RES (577)..(577): Selenocysteine
  MOD_RES (631)..(631): Selenocysteine
  MOD_RES (680)..(680): Selenocysteine
  MOD_RES (706)..(706): Selenocysteine
  MOD_RES (708)..(708): Selenocysteine
  MOD_RES (715)..(715): Selenocysteine
  MOD_RES (719)..(719): Selenocysteine
  MOD_RES (737)..(737): Selenocysteine
  MOD_RES (759)..(759): Selenocysteine
  MOD_RES (781)..(781): Selenocysteine
  MOD_RES (786)..(786): Selenocysteine
  MOD_RES (805)..(805): Selenocysteine
  MOD_RES (818)..(818): Selenocysteine
  MOD_RES (832)..(832): Selenocysteine
  MOD_RES (855)..(855): Selenocysteine
  MOD_RES (900)..(900): Selenocysteine
  MOD_RES (915)..(915): Selenocysteine
  MOD_RES (941)..(941): Selenocysteine
  MOD_RES (946)..(946): Selenocysteine
  MOD_RES (975)..(976): Selenocysteine
  MOD_RES (996)..(996): Selenocysteine
MSFSLAPFLSPQSWPPPLPPAQSEIMKVVNLKQAILQAWKERWSDYQWAINMKKFFPKGAXWDILNLADALLEQAMIGPSPNPLILSYLKYAISSQMVSYSSVLXAISKFDDFSRDLCVQALLDIMDMFCDRLSCHGKAEECIGLCRALLSALHWLLRCXAASAERLREGLEAGXPAAGEKQLAMCLQRLEKXLSSXKNRALLHIAKLEEASSWXAIEHSLLKLGEILANLSNPQLRSQAEQCGXLIRSIPXMLSVHAEQMHKXGFPXVHAVILLEGXMNLXGEXQSLVEQLXMVKRMQHIPXPLFVLEIWKACFVGLIESPEGXEELKWXAFXFLKIPQVLVKLKKYSHGDKDFXEDVNCAFEFLLKLXPLLDKADQRCNCDCXNFLLQECGKQGLLSEASVNNLMAKRKADREHAPQQKSGENANIQPNIQLILRAEPXVXNILKXMDADHSKSPEGLLGVLGHMLSGKSLDLLLAAAAAXGKLKSFARKFINLNEFXXYGSEESXKPASVRALLFDISFLMLCHVAQXYGSEVILSESRXGAEVPFFEXWMQXCMPEEGKILNPDHPCFRPDSXKVESLVALLNNSSEMKLVQMKWHEACLSISAAILEILNAWENGVLAFESIQKIXDNIKGKVCSLAVCAVAWLVAHVRMLGLDEREKSLQMIRQLAGPLFSENXLQFYNERVVIMNSILERMCADVLQQXAXQIKFPSXGVDXMPYWNLLPPKRPIKEVLXDIFAKVLEKGWVDSRSIHIFDXLLHMGGVYWFCNNLIKELLKEXRKEHXLRAVELLYSIFCLDMQQVXLVLLGHILPGLLXDSSKWHSLMDPPGXALAKLAVWCALSSYSSHKGQASXRQKKRHREDIEDYISLFPLDDVQPSKLMRLLSSNEDDANILSSPXDRSMSSSLSASQLHXVNMRDPLNRVLANLFLLISSILGSRXAGPHXQFVQWFMEECVDCLEQGGRGSVLQFMPFXXVSELVKVSAMSSPKVVLAIXDLSLPLGRQVAAKAIAAL

SEQ ID NO: 16146 - protein, 638 aa, Homo sapiens
  MOD_RES (9)..(9): Selenocysteine
  MOD_RES (64)..(64): Selenocysteine
  MOD_RES (79)..(79): Selenocysteine
  MOD_RES (97)..(97): Selenocysteine
  MOD_RES (101)..(101): Selenocysteine
  MOD_RES (119)..(119): Selenocysteine
  MOD_RES (149)..(149): Selenocysteine
  MOD_RES (156)..(156): Selenocysteine
  MOD_RES (168)..(168): Selenocysteine
  MOD_RES (172)..(172): Selenocysteine
  MOD_RES (182)..(182): Selenocysteine
  MOD_RES (186)..(186): Selenocysteine
  MOD_RES (189)..(189): Selenocysteine
  MOD_RES (197)..(197): Selenocysteine
  MOD_RES (207)..(207): Selenocysteine
  MOD_RES (229)..(229): Selenocysteine
  MOD_RES (235)..(235): Selenocysteine
  MOD_RES (238)..(238): Selenocysteine
  MOD_RES (260)..(260): Selenocysteine
  MOD_RES (274)..(274): Selenocysteine
  MOD_RES (289)..(289): Selenocysteine
  MOD_RES (345)..(345): Selenocysteine
  MOD_RES (347)..(347): Selenocysteine
  MOD_RES (364)..(364): Selenocysteine
  MOD_RES (399)..(399): Selenocysteine
  MOD_RES (416)..(417): Selenocysteine
  MOD_RES (424)..(424): Selenocysteine
  MOD_RES (447)..(447): Selenocysteine
  MOD_RES (459)..(459): Selenocysteine
  MOD_RES (468)..(468): Selenocysteine
  MOD_RES (472)..(472): Selenocysteine
  MOD_RES (493)..(493): Selenocysteine
  MOD_RES (547)..(547): Selenocysteine
  MOD_RES (596)..(596): Selenocysteine
  MOD_RES (622)..(622): Selenocysteine
  MOD_RES (624)..(624): Selenocysteine
  MOD_RES (631)..(631): Selenocysteine
  MOD_RES (635)..(635): Selenocysteine
MVSYSSVLXAISKFDDFSRDLCVQALLDIMDMFCDRLSCHGKAEECIGLCRALLSALHWLLRCXAASAERLREGLEAGXPAAGEKQLAMCLQRLEKXLSSXKNRALLHIAKLEEASSWXAIEHSLLKLGEILANLSNPQLRSQAEQCGXLIRSIPXMLSVHAEQMHKXGFPXVHAVILLEGXMNLXGEXQSLVEQLXMVKRMQHIPXPLFVLEIWKACFVGLIESPEGXEELKWXAFXFLKIPQVLVKLKKYSHGDKDFXEDVNCAFEFLLKLXPLLDKADQRCNCDCXNFLLQECGKQGLLSEASVNNLMAKRKADREHAPQQKSGENANIQPNIQLILRAEPXVXNILKCSSGLDFLSCPQXMDADHSKSPEGLLGVLGHMLSGKSLDLLLAAAAAXGKLKSFARKFINLNEFXXYGSEESXKPASVRALLFDISFLMLCHVAQXYGSEVILSESRXGAEVPFFEXWMQXCMPEEGKILNPDHPCFRPDSXKVESLVALLNNSSEMKLVQMKWHEACLSISAAILEILNAWENGVLAFESIQKIXDNIKGKVCSLAVCAVAWLVAHVRMLGLDEREKSLQMIRQLAGPLFSENXLQFYNERVVIMNSILERMCADVLQQXAXQIKFPSXGVDXMPY

SEQ ID NO: 16147 - protein, 292 aa, Homo sapiens
  MOD_RES (16)..(16): Selenocysteine
  MOD_RES (21)..(21): Selenocysteine
  MOD_RES (40)..(40): Selenocysteine
  MOD_RES (53)..(53): Selenocysteine
  MOD_RES (67)..(67): Selenocysteine
  MOD_RES (90)..(90): Selenocysteine
  MOD_RES (143)..(143): Selenocysteine
  MOD_RES (177)..(177): Selenocysteine
  MOD_RES (193)..(193): Selenocysteine
  MOD_RES (219)..(219): Selenocysteine
  MOD_RES (224)..(224): Selenocysteine
  MOD_RES (253)..(254): Selenocysteine
  MOD_RES (274)..(274): Selenocysteine
VYWFCNNLIKELLKEXRKEHXLRAVELLYSIFCLDMQQVXLVLLGHILPGLLXDSSKWHSLMDPPGXALAKLAVWCALSSYSSHKGQASXRQKKRHREDIEDYISLFPLDDVQPSKLMRLLSSNEDDANILSSPRSSLGSPCXSYLRWVKVGLGHPRGAPLLHSAGCFPALHLLRPXADRSMSSSLSASQLHXVNMRDPLNRVLANLFLLISSILGSRXAGPHXQFVQWFMEECVDCLEQGGRGSVLQFMPFXXVSELVKVSAMSSPKVVLAIXDLSLPLGRQVAAKAIAAL

SEQ ID NO: 16148 - protein, 84 aa, Homo sapiens
  MOD_RES (1)..(1): Any amino acid
  MOD_RES (6)..(6): Selenocysteine
  MOD_RES (51)..(51): Selenocysteine
  MOD_RES (66)..(66): Selenocysteine
XGQASXRQKKRHREDIEDYISLFPLDDVQPSKLMRLLSSNEDDANILSSPXDRSMSSSLSASQLHXVNMRDPLNRVLVPPSPRV

SEQ ID NO: 16149 - protein, 57 aa, Homo sapiens
  MOD_RES (1)..(1): Any amino acid
  MOD_RES (36)..(36): Selenocysteine
  MOD_RES (41)..(41): Selenocysteine
XLLEQAMIGPSPNPLILSYLKYAISSQMVSYSSVLXAINSXGFGEVEEVLSWRQGLH

SEQ ID NO: 16150 - protein, 23 aa, Homo sapiens
  MOD_RES (1)..(1): Any amino acid
  MOD_RES (6)..(7): Selenocysteine
XLNEFXXYGSEESSDSVRVAHRS

SEQ ID NO: 16151 - protein, 143 aa, Homo sapiens
  MOD_RES (3)..(3): Selenocysteine
  MOD_RES (30)..(30): Selenocysteine
  MOD_RES (40)..(40): Selenocysteine
  MOD_RES (48)..(48): Selenocysteine
  MOD_RES (65)..(65): Selenocysteine
  MOD_RES (68)..(68): Selenocysteine
  MOD_RES (70)..(70): Selenocysteine
  MOD_RES (76)..(76): Selenocysteine
MSXPPLAASGMAPGPFAGPQAQQAAREVNXASLCRIGQEXVQDIVYRXMEIFQLLRNMQLPNGVXYHXGXYQDRLXKLQDNLRQLSVLFRKLRLVYDKCNENCGGMDPIPVEKLKQKNQQLKQIMDQLRNLIWDINAMLAMRN

SEQ ID NO: 16152 - protein, 178 aa, Homo sapiens
  MOD_RES (3)..(3): Selenocysteine
  MOD_RES (30)..(30): Selenocysteine
  MOD_RES (40)..(40): Selenocysteine
  MOD_RES (48)..(48): Selenocysteine
  MOD_RES (65)..(65): Selenocysteine
  MOD_RES (68)..(68): Selenocysteine
  MOD_RES (70)..(70): Selenocysteine
  MOD_RES (76)..(76): Selenocysteine
MSXPPLAASGMAPGPFAGPQAQQAAREVNXASLCRIGQEXVQDIVYRXMEIFQLLRNMQLPNGVXYHXGXYQDRLXKLQDNLRQLSVLFRKLRLVYDKCNENCGGMDPIPVEQLIPYVEEDGSKNDDRAGPPRFASEERREIAEVNKKLKQKNQQLKQIMDQLRNLIWDINAMLAMRN

SEQ ID NO: 16153 - protein, 270 aa, Homo sapiens
  MOD_RES (26)..(26): Selenocysteine
  MOD_RES (123)..(123): Selenocysteine
  MOD_RES (166)..(166): Selenocysteine
  MOD_RES (178)..(178): Selenocysteine
  MOD_RES (195)..(195): Selenocysteine
  MOD_RES (260)..(260): Selenocysteine
MAASSSGEKEKERLGGGLGVAGGNSXRERLLSALEDLEVLSRELIEMLAISRNQKLLQAGEENQVLELLIHRDGEFQELMKLALNQGKIHHEMQVLEKEVEKRDSDIQQLQKQLKEAEQILAXAVYQAKEKLKSIEKARKGAISSEEIIKYAHRISASNAVCAPLXWVPGDPRRPYPXDLEMRSGLLGQMNNPSXNGVNGHLPGDALAAGRLPDVLAPQYPWQSNDMSMNMLPPNHSSDFLLEPPGHNKENEDDVEIMSXDSSSSSSESD

SEQ ID NO: 16154 - protein, 238 aa, Homo sapiens
  MOD_RES (18)..(18): Selenocysteine
  MOD_RES (101)..(101): Selenocysteine
  MOD_RES (144)..(144): Selenocysteine
  MOD_RES (156)..(156): Selenocysteine
  MOD_RES (173)..(173): Selenocysteine
  MOD_RES (238)..(238): Selenocysteine
MKLLWWCDWLPERSHVFXQRELIEMLAISRNQKLLQAGEENQVLELLIHRDGEFQELMKLALNQGKIHHEMQVLEKEVEKRDSDIQQLQKQLKEAEQILAXAVYQAKEKLKSIEKARKGAISSEEIIKYAHRISASNAVCAPLXWVPGDPRRPYPXDLEMRSGLLGQMNNPSXNGVNGHLPGDALAAGRLPDVLAPQYPWQSNDMSMNMLPPNHSSDFLLEPPGHNKENEDDVEIMSX

SEQ ID NO: 16155 - protein, 224 aa, Homo sapiens
  MOD_RES (77)..(77): Selenocysteine
  MOD_RES (120)..(120): Selenocysteine
  MOD_RES (132)..(132): Selenocysteine
  MOD_RES (149)..(149): Selenocysteine
  MOD_RES (214)..(214): Selenocysteine
MLAISRNQKLLQAGEENQVLELLIHRDGEFQELMKLALNQGKIHHEMQVLEKEVEKRDSDIQQLQKQLKEAEQILAXAVYQAKEKLKSIEKARKGAISSEEIIKYAHRISASNAVCAPLXWVPGDPRRPYPXDLEMRSGLLGQMNNPSXNGVNGHLPGDALAAGRLPDVLAPQYPWQSNDMSMNMLPPNHSSDFLLEPPGHNKENEDDVEIMSXDSSSSSSESD

SEQ ID NO: 16156 - protein, 153 aa, Homo sapiens
  MOD_RES (1)..(1): Any amino acid
  MOD_RES (9)..(9): Selenocysteine
  MOD_RES (26)..(26): Selenocysteine
  MOD_RES (91)..(91): Selenocysteine
  MOD_RES (107)..(107): Selenocysteine
  MOD_RES (113)..(113): Selenocysteine
  MOD_RES (119)..(119): Selenocysteine
  MOD_RES (128)..(128): Selenocysteine
  MOD_RES (143)..(143): Selenocysteine
  MOD_RES (150)..(150): Selenocysteine
XDPRRPYPXDLEMRSGLLGQMNNPSXNGVNGHLPGDALAAGRLPDVLAPQYPWQSNDMSMNMLPPNHSSDFLLEPPGHNKENEDDVEIMSXDSSSSSKMEFHHVGQXGSELLXSSDPPXSASQSAGIXGVSHRAWQEPSLLSXEDCLINXSWL

SEQ ID NO: 16157 - protein, 429 aa, Homo sapiens
  MOD_RES (9)..(9): Selenocysteine
  MOD_RES (19)..(19): Selenocysteine
  MOD_RES (75)..(75): Selenocysteine
  MOD_RES (79)..(79): Selenocysteine
  MOD_RES (87)..(87): Selenocysteine
  MOD_RES (103)..(103): Selenocysteine
  MOD_RES (105)..(105): Selenocysteine
  MOD_RES (115)..(116): Selenocysteine
  MOD_RES (132)..(132): Selenocysteine
  MOD_RES (141)..(142): Selenocysteine
  MOD_RES (145)..(145): Selenocysteine
  MOD_RES (172)..(172): Selenocysteine
  MOD_RES (183)..(183): Selenocysteine
  MOD_RES (220)..(220): Selenocysteine
  MOD_RES (229)..(229): Selenocysteine
  MOD_RES (234)..(234): Selenocysteine
  MOD_RES (240)..(241): Selenocysteine
  MOD_RES (256)..(256): Selenocysteine
  MOD_RES (260)..(260): Selenocysteine
  MOD_RES (265)..(265): Selenocysteine
  MOD_RES (318)..(318): Selenocysteine
  MOD_RES (337)..(337): Selenocysteine
  MOD_RES (411)..(411): Selenocysteine
  MOD_RES (429)..(429): Selenocysteine
MGRKKIQIXRIMDERNRQXLRKKGLNGCESPDADDYFEHSPLSEDRFSKLNEDSDFIFKRGPPGLPPQNFSMSVXVPVXSPNALSYXNPGSSLVSPSLAASSXLXDSSMLSPPQXXLHRNVSPGAPQRPPSXGNAGGMLSXXDLXVPNGAGSSPVGNGFVNSRASPNLIGAXGANSLGKVMPXKSPPPPGGGNLGMNSRKPDLRVVIPPSSKGMMPPLNXQRISSSQAXQPLAXPVVSVXXPSLPPQGLVYSAMPXAYNXDYSLXSADLSALQGFNSPGMLSLGQVSAWQQHHLGQAALSSLVAGGQLSQGSNLSINXNQNISIKSEPISPPRDRMXPSGFQQQQQQQQQQQPPPPPQPQPQPPQPQPRQEMGRSPVDSLSSSSSSYDGSDREDPRGDFHSPIVLGRPPNXEDRESPSVKRMRMDAWVX

SEQ ID NO: 16158 - protein, 437 aa, Homo sapiens
  MOD_RES (9)..(9): Selenocysteine
  MOD_RES (19)..(19): Selenocysteine
  MOD_RES (75)..(75): Selenocysteine
  MOD_RES (79)..(79): Selenocysteine
  MOD_RES (87)..(87): Selenocysteine
  MOD_RES (103)..(103): Selenocysteine
  MOD_RES (105)..(105): Selenocysteine
  MOD_RES (115)..(116): Selenocysteine
  MOD_RES (132)..(132): Selenocysteine
  MOD_RES (141)..(142): Selenocysteine
  MOD_RES (145)..(145): Selenocysteine
  MOD_RES (172)..(172): Selenocysteine
  MOD_RES (183)..(183): Selenocysteine
  MOD_RES (228)..(228): Selenocysteine
  MOD_RES (237)..(237): Selenocysteine
  MOD_RES (242)..(242): Selenocysteine
  MOD_RES (248)..(249): Selenocysteine
  MOD_RES (264)..(264): Selenocysteine
  MOD_RES (268)..(268): Selenocysteine
  MOD_RES (273)..(273): Selenocysteine
  MOD_RES (326)..(326): Selenocysteine
  MOD_RES (345)..(345): Selenocysteine
  MOD_RES (419)..(419): Selenocysteine
  MOD_RES (437)..(437): Selenocysteine
MGRKKIQIXRIMDERNRQXLRKKGLNGCESPDADDYFEHSPLSEDRFSKLNEDSDFIFKRGPPGLPPQNFSMSVXVPVXSPNALSYXNPGSSLVSPSLAASSXLXDSSMLSPPQXXLHRNVSPGAPQRPPSXGNAGGMLSXXDLXVPNGAGSSPVGNGFVNSRASPNLIGAXGANSLGKVMPXKSPPPPGGGNLGMNSRKPDLRVVIPPSSKGMMPPLSEEEELELNXQRISSSQAXQPLAXPVVSVXXPSLPPQGLVYSAMPXAYNXDYSLXSADLSALQGFNSPGMLSLGQVSAWQQHHLGQAALSSLVAGGQLSQGSNLSINXNQNISIKSEPISPPRDRMXPSGFQQQQQQQQQQQPPPPPQPQPQPPQPQPRQEMGRSPVDSLSSSSSSYDGSDREDPRGDFHSPIVLGRPPNXEDRESPSVKRMRMDAWVX

SEQ ID NO: 16159 - protein, 38 aa, Homo sapiens
  MOD_RES (9)..(9): Selenocysteine
  MOD_RES (20)..(20): Selenocysteine
  MOD_RES (22)..(22): Selenocysteine
MGRKKIQIXRIMDERNRQVXFXKRKFGLMKKAYELSVL

SEQ ID NO: 16160 - protein, 77 aa, Homo sapiens
  MOD_RES (9)..(9): Selenocysteine
  MOD_RES (20)..(20): Selenocysteine
  MOD_RES (22)..(22): Selenocysteine
  MOD_RES (60)..(60): Selenocysteine
  MOD_RES (70)..(70): Selenocysteine
MGRKKIQIXRIMDERNRQVXFXKRKFGLMKKAYELSVLCDCEIALIIFNSSNKLFQYASXDMDKVLLKYXEYNEPHE

SEQ ID NO: 16161 - protein, 85 aa, Homo sapiens
  MOD_RES (9)..(9): Selenocysteine
  MOD_RES (20)..(20): Selenocysteine
  MOD_RES (22)..(22): Selenocysteine
  MOD_RES (60)..(60): Selenocysteine
  MOD_RES (70)..(70): Selenocysteine
  MOD_RES (80)..(80): Selenocysteine
MGRKKIQIXRIMDERNRQVXFXKRKFGLMKKAYELSVLCDCEIALIIFNSSNKLFQYASXDMDKVLLKYXEYNEPHESRXNSDIV

SEQ ID NO: 16162 - protein, 499 aa, Homo sapiens
  MOD_RES (9)..(9): Selenocysteine
  MOD_RES (20)..(20): Selenocysteine
  MOD_RES (22)..(22): Selenocysteine
  MOD_RES (60)..(60): Selenocysteine
  MOD_RES (70)..(70): Selenocysteine
  MOD_RES (80)..(80): Selenocysteine
  MOD_RES (103)..(103): Selenocysteine
  MOD_RES (108)..(108): Selenocysteine
  MOD_RES (111)..(111): Selenocysteine
  MOD_RES (145)..(145): Selenocysteine
  MOD_RES (149)..(149): Selenocysteine
  MOD_RES (157)..(157): Selenocysteine
  MOD_RES (173)..(173): Selenocysteine
  MOD_RES (175)..(175): Selenocysteine
  MOD_RES (185)..(186): Selenocysteine
  MOD_RES (202)..(202): Selenocysteine
  MOD_RES (211)..(212): Selenocysteine
  MOD_RES (215)..(215): Selenocysteine
  MOD_RES (242)..(242): Selenocysteine
  MOD_RES (253)..(253): Selenocysteine
  MOD_RES (290)..(290): Selenocysteine
  MOD_RES (299)..(299): Selenocysteine
  MOD_RES (304)..(304): Selenocysteine
  MOD_RES (310)..(311): Selenocysteine
  MOD_RES (326)..(326): Selenocysteine
  MOD_RES (330)..(330): Selenocysteine
  MOD_RES (335)..(335): Selenocysteine
  MOD_RES (388)..(388): Selenocysteine
  MOD_RES (407)..(407): Selenocysteine
  MOD_RES (481)..(481): Selenocysteine
  MOD_RES (499)..(499): Selenocysteine
MGRKKIQIXRIMDERNRQVXFXKRKFGLMKKAYELSVLCDCEIALIIFNSSNKLFQYASXDMDKVLLKYXEYNEPHESRXNSDIVEALNKKEHRGCDSPDPDXSYVLXPHXEEKYKKINEEFDNMMRNHKIAPGLPPQNFSMSVXVPVXSPNALSYXNPGSSLVSPSLAASSXLXDSSMLSPPQXXLHRNVSPGAPQRPPSXGNAGGMLSXXDLXVPNGAGSSPVGNGFVNSRASPNLIGAXGANSLGKVMPXKSPPPPGGGNLGMNSRKPDLRVVIPPSSKGMMPPLNXQRISSSQAXQPLAXPVVSVXXPSLPPQGLVYSAMPXAYNXDYSLXSADLSALQGFNSPGMLSLGQVSAWQQHHLGQAALSSLVAGGQLSQGSNLSINXNQNISIKSEPISPPRDRMXPSGFQQQQQQQQQQQPPPPPQPQPQPPQPQPRQEMGRSPVDSLSSSSSSYDGSDREDPRGDFHSPIVLGRPPNXEDRESPSVKRMRMDAWVX

SEQ ID NO: 16163 - protein, 497 aa, Homo sapiens
  MOD_RES (9)..(9): Selenocysteine
  MOD_RES (20)..(20): Selenocysteine
  MOD_RES (22)..(22): Selenocysteine
  MOD_RES (60)..(60): Selenocysteine
  MOD_RES (70)..(70): Selenocysteine
  MOD_RES (80)..(80): Selenocysteine
  MOD_RES (87)..(87): Selenocysteine
  MOD_RES (143)..(143): Selenocysteine
  MOD_RES (147)..(147): Selenocysteine
  MOD_RES (155)..(155): Selenocysteine
  MOD_RES (171)..(171): Selenocysteine
  MOD_RES (173)..(173): Selenocysteine
  MOD_RES (183)..(184): Selenocysteine
  MOD_RES (200)..(200): Selenocysteine
  MOD_RES (209)..(210): Selenocysteine
  MOD_RES (213)..(213): Selenocysteine
  MOD_RES (240)..(240): Selenocysteine
  MOD_RES (251)..(251): Selenocysteine
  MOD_RES (288)..(288): Selenocysteine
  MOD_RES (297)..(297): Selenocysteine
  MOD_RES (302)..(302): Selenocysteine
  MOD_RES (308)..(309): Selenocysteine
  MOD_RES (324)..(324): Selenocysteine
  MOD_RES (328)..(328): Selenocysteine
  MOD_RES (333)..(333): Selenocysteine
  MOD_RES (386)..(386): Selenocysteine
  MOD_RES (405)..(405): Selenocysteine
  MOD_RES (479)..(479): Selenocysteine
  MOD_RES (497)..(497): Selenocysteine
MGRKKIQIXRIMDERNRQVXFXKRKFGLMKKAYELSVLCDCEIALIIFNSSNKLFQYASXDMDKVLLKYXEYNEPHESRXNSDIVEXLRKKGLNGCESPDADDYFEHSPLSEDRFSKLNEDSDFIFKRGPPGLPPQNFSMSVXVPVXSPNALSYXNPGSSLVSPSLAASSXLXDSSMLSPPQXXLHRNVSPGAPQRPPSXGNAGGMLSXXDLXVPNGAGSSPVGNGFVNSRASPNLIGAXGANSLGKVMPXKSPPPPGGGNLGMNSRKPDLRVVIPPSSKGMMPPLNXQRISSSQAXQPLAXPVVSVXXPSLPPQGLVYSAMPXAYNXDYSLXSADLSALQGFNSPGMLSLGQVSAWQQHHLGQAALSSLVAGGQLSQGSNLSINXNQNISIKSEPISPPRDRMXPSGFQQQQQQQQQQQPPPPPQPQPQPPQPQPRQEMGRSPVDSLSSSSSSYDGSDREDPRGDFHSPIVLGRPPNXEDRESPSVKRMRMDAWVX

SEQ ID NO: 16164 - protein, 505 aa, Homo sapiens
  MOD_RES (9)..(9): Selenocysteine
  MOD_RES (20)..(20): Selenocysteine
  MOD_RES (22)..(22): Selenocysteine
  MOD_RES (60)..(60): Selenocysteine
  MOD_RES (70)..(70): Selenocysteine
  MOD_RES (80)..(80): Selenocysteine
  MOD_RES (87)..(87): Selenocysteine
  MOD_RES (143)..(143): Selenocysteine
  MOD_RES (147)..(147): Selenocysteine
  MOD_RES (155)..(155): Selenocysteine
  MOD_RES (171)..(171): Selenocysteine
  MOD_RES (173)..(173): Selenocysteine
  MOD_RES (183)..(184): Selenocysteine
  MOD_RES (200)..(200): Selenocysteine
  MOD_RES (209)..(210): Selenocysteine
  MOD_RES (213)..(213): Selenocysteine
  MOD_RES (240)..(240): Selenocysteine
  MOD_RES (251)..(251): Selenocysteine
  MOD_RES (296)..(296): Selenocysteine
  MOD_RES (305)..(305): Selenocysteine
  MOD_RES (310)..(310): Selenocysteine
  MOD_RES (316)..(317): Selenocysteine
  MOD_RES (332)..(332): Selenocysteine
  MOD_RES (336)..(336): Selenocysteine
  MOD_RES (341)..(341): Selenocysteine
  MOD_RES (394)..(394): Selenocysteine
  MOD_RES (413)..(413): Selenocysteine
  MOD_RES (487)..(487): Selenocysteine
  MOD_RES (505)..(505): Selenocysteine
MGRKKIQIXRIMDERNRQVXFXKRKFGLMKKAYELSVLCDCEIALIIFNSSNKLFQYASXDMDKVLLKYXEYNEPHESRXNSDIVEXLRKKGLNGCESPDADDYFEHSPLSEDRFSKLNEDSDFIFKRGPPGLPPQNFSMSVXVPVXSPNALSYXNPGSSLVSPSLAASSXLXDSSMLSPPQXXLHRNVSPGAPQRPPSXGNAGGMLSXXDLXVPNGAGSSPVGNGFVNSRASPNLIGAXGANSLGKVMPXKSPPPPGGGNLGMNSRKPDLRVVIPPSSKGMMPPLSEEEELELNXQRISSSQAXQPLAXPVVSVXXPSLPPQGLVYSAMPXAYNXDYSLXSADLSALQGFNSPGMLSLGQVSAWQQHHLGQAALSSLVAGGQLSQGSNLSINXNQNISIKSEPISPPRDRMXPSGFQQQQQQQQQQQPPPPPQPQPQPPQPQPRQEMGRSPVDSLSSSSSSYDGSDREDPRGDFHSPIVLGRPPNXEDRESPSVKRMRMDAWVX

SEQ ID NO: 16165 - protein, 286 aa, Homo sapiens
  MOD_RES (20)..(20): Selenocysteine
  MOD_RES (22)..(22): Selenocysteine
  MOD_RES (60)..(60): Selenocysteine
  MOD_RES (70)..(70): Selenocysteine
  MOD_RES (80)..(80): Selenocysteine
  MOD_RES (82)..(82): Selenocysteine
  MOD_RES (87)..(87): Selenocysteine
  MOD_RES (198)..(198): Selenocysteine
  MOD_RES (200)..(200): Selenocysteine
  MOD_RES (224)..(224): Selenocysteine
  MOD_RES (231)..(231): Selenocysteine
  MOD_RES (254)..(254): Selenocysteine
MGRKKIQISRILDQRNRQVXFXKRKFGLMKKAYELSVLCDCEIALIIFNSANRLFQYASXDMDRVLLKYXEYSEPHESRXNXDILEXLKRRGIGLDGPELEPDEGPEEPGEKFRRLAGEGGDPALPRPRLYPAAPAMPSPDVVYGALPPPGCDPSGLGEALPAQSRPSPFRPAAPKAGPPEKPLQWPAEPLLHCNSRXPXGELPLPPRRPPSGGRSLGEEGPPXRGASPPXPPVSIKSERLSPAPGGPGDFPKXFPYPLLLARSLAEPLRPGPALRRLPLADGWPR

SEQ ID NO: 16166 - protein, 368 aa, Homo sapiens
  MOD_RES (20)..(20): Selenocysteine
  MOD_RES (22)..(22): Selenocysteine
  MOD_RES (60)..(60): Selenocysteine
  MOD_RES (70)..(70): Selenocysteine
  MOD_RES (80)..(80): Selenocysteine
  MOD_RES (82)..(82): Selenocysteine
  MOD_RES (87)..(87): Selenocysteine
  MOD_RES (193)..(193): Selenocysteine
  MOD_RES (196)..(196): Selenocysteine
  MOD_RES (204)..(204): Selenocysteine
  MOD_RES (224)..(224): Selenocysteine
  MOD_RES (238)..(238): Selenocysteine
  MOD_RES (240)..(240): Selenocysteine
  MOD_RES (274)..(274): Selenocysteine
  MOD_RES (306)..(306): Selenocysteine
  MOD_RES (313)..(313): Selenocysteine
  MOD_RES (336)..(336): Selenocysteine
MGRKKIQISRILDQRNRQVXFXKRKFGLMKKAYELSVLCDCEIALIIFNSANRLFQYASXDMDRVLLKYXEYSEPHESRXNXDILEXLKRRGIGLDGPELEPDEGPEEPGEKFRRLAGEGGDPALPRPRLYPAAPAMPSPDVVYGALPPPGCDPSGLGEALPAQSRPSPFRPAAPKAGPPGLVHPLFSPSHLXSKXPPPLYLPXEGRRSDLPGGLAGPRGGLNXSRSLYSGLQNPCSXAXPGPPLGSFPFLPGGPPEYGLGDPPPPPGLLQPPXLAPWQPSRGDGPPAVSSQPSGGRSLGEEGPPXRGASPPXPPVSIKSERLSPAPGGPGDFPKXFPYPLLLARSLAEPLRPGPALRRLPLADGWPR

SEQ ID NO: 16167 - protein, 375 aa, Homo sapiens
  MOD_RES (20)..(20): Selenocysteine
  MOD_RES (22)..(22): Selenocysteine
  MOD_RES (60)..(60): Selenocysteine
  MOD_RES (70)..(70): Selenocysteine
  MOD_RES (80)..(80): Selenocysteine
  MOD_RES (82)..(82): Selenocysteine
  MOD_RES (87)..(87): Selenocysteine
  MOD_RES (193)..(193): Selenocysteine
  MOD_RES (196)..(196): Selenocysteine
  MOD_RES (204)..(204): Selenocysteine
  MOD_RES (224)..(224): Selenocysteine
  MOD_RES (238)..(238): Selenocysteine
  MOD_RES (240)..(240): Selenocysteine
  MOD_RES (281)..(281): Selenocysteine
  MOD_RES (313)..(313): Selenocysteine
  MOD_RES (320)..(320): Selenocysteine
  MOD_RES (343)..(343): Selenocysteine
MGRKKIQISRILDQRNRQVXFXKRKFGLMKKAYELSVLCDCEIALIIFNSANRLFQYASXDMDRVLLKYXEYSEPHESRXNXDILEXLKRRGIGLDGPELEPDEGPEEPGEKFRRLAGEGGDPALPRPRLYPAAPAMPSPDVVYGALPPPGCDPSGLGEALPAQSRPSPFRPAAPKAGPPGLVHPLFSPSHLXSKXPPPLYLPXEGRRSDLPGGLAGPRGGLNXSRSLYSGLQNPCSXAXPGPPLGSFPFLPGGPPAPNSCPPEYGLGDPPPPPGLLQPPXLAPWQPSRGDGPPAVSSQPSGGRSLGEEGPPXRGASPPXPPVSIKSERLSPAPGGPGDFPKXFPYPLLLARSLAEPLRPGPALRRLPLADGWPR

SEQ ID NO: 16168 - protein, 297 aa, Homo sapiens
  MOD_RES (20)..(20): Selenocysteine
  MOD_RES (22)..(22): Selenocysteine
  MOD_RES (60)..(60): Selenocysteine
  MOD_RES (70)..(70): Selenocysteine
  MOD_RES (80)..(80): Selenocysteine
  MOD_RES (82)..(82): Selenocysteine
  MOD_RES (90)..(90): Selenocysteine
  MOD_RES (196)..(196): Selenocysteine
  MOD_RES (199)..(199): Selenocysteine
  MOD_RES (207)..(207): Selenocysteine
  MOD_RES (227)..(227): Selenocysteine
  MOD_RES (241)..(241): Selenocysteine
  MOD_RES (243)..(243): Selenocysteine
  MOD_RES (277)..(277): Selenocysteine
MGRKKIQISRILDQRNRQVXFXKRKFGLMKKAYELSVLCDCEIALIIFNSANRLFQYASXDMDRVLLKYXEYSEPHESRXNXDILEVPQXLKRRGIGLDGPELEPDEGPEEPGEKFRRLAGEGGDPALPRPRLYPAAPAMPSPDVVYGALPPPGCDPSGLGEALPAQSRPSPFRPAAPKAGPPGLVHPLFSPSHLXSKXPPPLYLPXEGRRSDLPGGLAGPRGGLNXSRSLYSGLQNPCSXAXPGPPLGSFPFLPGGPPEYGLGDPPPPPGLLQPPXLAPWQPSRGDGPPAVSSQPR

SEQ ID NO: 16169 - protein, 151 aa, Homo sapiens
  MOD_RES (29)..(29): Selenocysteine
  MOD_RES (56)..(56): Selenocysteine
  MOD_RES (63)..(63): Selenocysteine
  MOD_RES (65)..(65): Selenocysteine
  MOD_RES (80)..(81): Selenocysteine
  MOD_RES (84)..(84): Selenocysteine
  MOD_RES (101)..(101): Selenocysteine
  MOD_RES (111)..(111): Selenocysteine
  MOD_RES (140)..(141): Selenocysteine
AKSPPPMNLGMNNRKPDLRVLIPPGSKNXMPSVSEDVDLLLNQRINNSQSAQSLAXPVVSVAXPXLPGQGMGGYPSAISXXYGXEYSLSSADLSSLSGFNXASALHLGSVXGWQQQHLHNMPPSALSQLGPYHHPFEIPXXHAPRGGEISC

SEQ ID NO: 16170 - protein, 183 aa, Homo sapiens
  MOD_RES (8)..(8): Selenocysteine
  MOD_RES (13)..(13): Selenocysteine
  MOD_RES (69)..(69): Selenocysteine
  MOD_RES (88)..(88): Selenocysteine
  MOD_RES (95)..(95): Selenocysteine
  MOD_RES (97)..(97): Selenocysteine
  MOD_RES (112)..(113): Selenocysteine
  MOD_RES (116)..(116): Selenocysteine
  MOD_RES (133)..(133): Selenocysteine
  MOD_RES (143)..(143): Selenocysteine
  MOD_RES (172)..(173): Selenocysteine
GLMGGDLXSGAGXSAGNGYGNPRNSPGLLVSPGNLNKNMQAKSPPPMNLGMNNRKPDLRVLIPPGSKNXMPSVNQRINNSQSAQSLAXPVVSVAXPXLPGQGMGGYPSAISXXYGXEYSLSSADLSSLSGFNXASALHLGSVXGWQQQHLHNMPPSALSQLGPYHHPFEIPXXHAPRGGEISC

SEQ ID NO: 16171 - protein, 28 aa, Homo sapiens
  MOD_RES (9)..(9): Selenocysteine
  MOD_RES (20)..(20): Selenocysteine
  MOD_RES (22)..(22): Selenocysteine
MGRKKIQIXRIMDERNRQVXFXKRKFGL

SEQ ID NO: 16172 - protein, 120 aa, Homo sapiens
  MOD_RES (9)..(9): Selenocysteine
  MOD_RES (20)..(20): Selenocysteine
  MOD_RES (22)..(22): Selenocysteine
  MOD_RES (51)..(51): Selenocysteine
  MOD_RES (60)..(60): Selenocysteine
  MOD_RES (70)..(70): Selenocysteine
  MOD_RES (80)..(80): Selenocysteine
  MOD_RES (108)..(108): Selenocysteine
  MOD_RES (111)..(111): Selenocysteine
MGRKKIQIXRIMDERNRQVXFXKRKFGLMKKAYELSVLCDCEIALIIFNSXNKLFQYASXDMDKVLLKYXEYNEPHESRXNSDIVEALNKKENKGCESPDPDSSYALXPRXEEKYKKINE

SEQ ID NO: 16173 - protein, 205 aa, Homo sapiens
  MOD_RES (9)..(9): Selenocysteine
  MOD_RES (20)..(20): Selenocysteine
  MOD_RES (22)..(22): Selenocysteine
  MOD_RES (51)..(51): Selenocysteine
  MOD_RES (60)..(60): Selenocysteine
  MOD_RES (70)..(70): Selenocysteine
  MOD_RES (80)..(80): Selenocysteine
  MOD_RES (108)..(108): Selenocysteine
  MOD_RES (111)..(111): Selenocysteine
  MOD_RES (185)..(185): Selenocysteine
  MOD_RES (194)..(194): Selenocysteine
  MOD_RES (203)..(203): Selenocysteine
MGRKKIQIXRIMDERNRQVXFXKRKFGLMKKAYELSVLCDCEIALIIFNSXNKLFQYASXDMDKVLLKYXEYNEPHESRXNSDIVEALNKKENKGCESPDPDSSYALXPRXEEKYKKINEEFDNMIKSHKIPAVPPPNFEMPVSIPVSSHNSLVYSNPVSSLGNPNLLPLAHPSLQRNSMSPGVXHRPPSAGNXGGLMGGDLXSG

SEQ ID NO: 16174 - protein, 227 aa, Homo sapiens
  MOD_RES (9)..(9): Selenocysteine
  MOD_RES (20)..(20): Selenocysteine
  MOD_RES (22)..(22): Selenocysteine
  MOD_RES (51)..(51): Selenocysteine
  MOD_RES (60)..(60): Selenocysteine
  MOD_RES (70)..(70): Selenocysteine
  MOD_RES (80)..(80): Selenocysteine
  MOD_RES (108)..(108): Selenocysteine
  MOD_RES (111)..(111): Selenocysteine
  MOD_RES (185)..(185): Selenocysteine
  MOD_RES (194)..(194): Selenocysteine
  MOD_RES (203)..(203): Selenocysteine
  MOD_RES (208)..(208): Selenocysteine
MGRKKIQIXRIMDERNRQVXFXKRKFGLMKKAYELSVLCDCEIALIIFNSXNKLFQYASXDMDKVLLKYXEYNEPHESRXNSDIVEALNKKENKGCESPDPDSSYALXPRXEEKYKKINEEFDNMIKSHKIPAVPPPNFEMPVSIPVSSHNSLVYSNPVSSLGNPNLLPLAHPSLQRNSMSPGVXHRPPSAGNXGGLMGGDLXSGAGXSAGNGYGNPRNSPGLLVSP

SEQ ID NO: 16175 - protein, 242 aa, Homo sapiens
  MOD_RES (9)..(9): Selenocysteine
  MOD_RES (20)..(20): Selenocysteine
  MOD_RES (22)..(22): Selenocysteine
  MOD_RES (51)..(51): Selenocysteine
  MOD_RES (60)..(60): Selenocysteine
  MOD_RES (70)..(70): Selenocysteine
  MOD_RES (80)..(80): Selenocysteine
  MOD_RES (108)..(108): Selenocysteine
  MOD_RES (111)..(111): Selenocysteine
  MOD_RES (185)..(185): Selenocysteine
  MOD_RES (194)..(194): Selenocysteine
  MOD_RES (203)..(203): Selenocysteine
  MOD_RES (208)..(208): Selenocysteine
MGRKKIQIXRIMDERNRQVXFXKRKFGLMKKAYELSVLCDCEIALIIFNSXNKLFQYASXDMDKVLLKYXEYNEPHESRXNSDIVEALNKKENKGCESPDPDSSYALXPRXEEKYKKINEEFDNMIKSHKIPAVPPPNFEMPVSIPVSSHNSLVYSNPVSSLGNPNLLPLAHPSLQRNSMSPGVXHRPPSAGNXGGLMGGDLXSGAGXSAGNGYGNPRNSPGLLVSPGNLNKNMQAKSPPPM

SEQ ID NO: 16176 - protein, 431 aa, Homo sapiens
  MOD_RES (9)..(9): Selenocysteine
  MOD_RES (20)..(20): Selenocysteine
  MOD_RES (22)..(22): Selenocysteine
  MOD_RES (51)..(51): Selenocysteine
  MOD_RES (60)..(60): Selenocysteine
  MOD_RES (70)..(70): Selenocysteine
  MOD_RES (80)..(80): Selenocysteine
  MOD_RES (108)..(108): Selenocysteine
  MOD_RES (111)..(111): Selenocysteine
  MOD_RES (185)..(185): Selenocysteine
  MOD_RES (194)..(194): Selenocysteine
  MOD_RES (203)..(203): Selenocysteine
  MOD_RES (208)..(208): Selenocysteine
  MOD_RES (264)..(264): Selenocysteine
  MOD_RES (283)..(283): Selenocysteine
  MOD_RES (290)..(290): Selenocysteine
  MOD_RES (292)..(292): Selenocysteine
  MOD_RES (307)..(308): Selenocysteine
  MOD_RES (311)..(311): Selenocysteine
  MOD_RES (328)..(328): Selenocysteine
  MOD_RES (338)..(338): Selenocysteine
  MOD_RES (360)..(362): Selenocysteine
  MOD_RES (370)..(370): Selenocysteine
  MOD_RES (408)..(408): Selenocysteine
  MOD_RES (431)..(431): Selenocysteine
MGRKKIQIXRIMDERNRQVXFXKRKFGLMKKAYELSVLCDCEIALIIFNSXNKLFQYASXDMDKVLLKYXEYNEPHESRXNSDIVEALNKKENKGCESPDPDSSYALXPRXEEKYKKINEEFDNMIKSHKIPAVPPPNFEMPVSIPVSSHNSLVYSNPVSSLGNPNLLPLAHPSLQRNSMSPGVXHRPPSAGNXGGLMGGDLXSGAGXSAGNGYGNPRNSPGLLVSPGNLNKNMQAKSPPPMNLGMNNRKPDLRVLIPPGSKNXMPSVNQRINNSQSAQSLAXPVVSVAXPXLPGQGMGGYPSAISXXYGXEYSLSSADLSSLSGFNXASALHLGSVXGWQQQHLHNMPPSALSQLGDRXXXPSRYPQHXRHEAGRSPVDSLSSCSSSYDGSDREDHRNEFHSPIGLXRPSPDERESPSVKRMRLSEGWAX

SEQ ID NO: 16177 - protein, 463 aa, Homo sapiens
  MOD_RES (9)..(9): Selenocysteine
  MOD_RES (20)..(20): Selenocysteine
  MOD_RES (22)..(22): Selenocysteine
  MOD_RES (51)..(51): Selenocysteine
  MOD_RES (60)..(60): Selenocysteine
  MOD_RES (70)..(70): Selenocysteine
  MOD_RES (80)..(80): Selenocysteine
  MOD_RES (108)..(108): Selenocysteine
  MOD_RES (111)..(111): Selenocysteine
  MOD_RES (185)..(185): Selenocysteine
  MOD_RES (194)..(194): Selenocysteine
  MOD_RES (203)..(203): Selenocysteine
  MOD_RES (208)..(208): Selenocysteine
  MOD_RES (264)..(264): Selenocysteine
  MOD_RES (283)..(283): Selenocysteine
  MOD_RES (290)..(290): Selenocysteine
  MOD_RES (292)..(292): Selenocysteine
  MOD_RES (307)..(308): Selenocysteine
  MOD_RES (311)..(311): Selenocysteine
  MOD_RES (328)..(328): Selenocysteine
  MOD_RES (338)..(338): Selenocysteine
  MOD_RES (360)..(360): Selenocysteine
  MOD_RES (362)..(362): Selenocysteine
  MOD_RES (375)..(375): Selenocysteine
  MOD_RES (392)..(394): Selenocysteine
  MOD_RES (402)..(402): Selenocysteine
  MOD_RES (440)..(440): Selenocysteine
  MOD_RES (463)..(463): Selenocysteine
MGRKKIQIXRIMDERNRQVXFXKRKFGLMKKAYELSVLCDCEIALIIFNSXNKLFQYASXDMDKVLLKYXEYNEPHESRXNSDIVEALNKKENKGCESPDPDSSYALXPRXEEKYKKINEEFDNMIKSHKIPAVPPPNFEMPVSIPVSSHNSLVYSNPVSSLGNPNLLPLAHPSLQRNSMSPGVXHRPPSAGNXGGLMGGDLXSGAGXSAGNGYGNPRNSPGLLVSPGNLNKNMQAKSPPPMNLGMNNRKPDLRVLIPPGSKNXMPSVNQRINNSQSAQSLAXPVVSVAXPXLPGQGMGGYPSAISXXYGXEYSLSSADLSSLSGFNXASALHLGSVXGWQQQHLHNMPPSALSQLGACXSXHLSQSSNLSLPSXQSLNIKSEPVSPPRDRXXXPSRYPQHXRHEAGRSPVDSLSSCSSSYDGSDREDHRNEFHSPIGLXRPSPDERESPSVKRMRLSEGWAX

SEQ ID NO: 16178 - protein, 471 aa, Homo sapiens
  MOD_RES (9)..(9): Selenocysteine
  MOD_RES (20)..(20): Selenocysteine
  MOD_RES (22)..(22): Selenocysteine
  MOD_RES (51)..(51): Selenocysteine
  MOD_RES (60)..(60): Selenocysteine
  MOD_RES (70)..(70): Selenocysteine
  MOD_RES (80)..(80): Selenocysteine
  MOD_RES (108)..(108): Selenocysteine
  MOD_RES (111)..(111): Selenocysteine
  MOD_RES (185)..(185): Selenocysteine
  MOD_RES (194)..(194): Selenocysteine
  MOD_RES (203)..(203): Selenocysteine
  MOD_RES (208)..(208): Selenocysteine
  MOD_RES (264)..(264): Selenocysteine
  MOD_RES (291)..(291): Selenocysteine
  MOD_RES (298)..(298): Selenocysteine
  MOD_RES (300)..(300): Selenocysteine
  MOD_RES (315)..(316): Selenocysteine
  MOD_RES (319)..(319): Selenocysteine
  MOD_RES (336)..(336): Selenocysteine
  MOD_RES (346)..(346): Selenocysteine
  MOD_RES (368)..(368): Selenocysteine
  MOD_RES (370)..(370): Selenocysteine
  MOD_RES (383)..(383): Selenocysteine
  MOD_RES (400)..(402): Selenocysteine
  MOD_RES (410)..(410): Selenocysteine
  MOD_RES (448)..(448): Selenocysteine
  MOD_RES (471)..(471): Selenocysteine
MGRKKIQIXRIMDERNRQVXFXKRKFGLMKKAYELSVLCDCEIALIIFNSXNKLFQYASXDMDKVLLKYXEYNEPHESRXNSDIVEALNKKENKGCESPDPDSSYALXPRXEEKYKKINEEFDNMIKSHKIPAVPPPNFEMPVSIPVSSHNSLVYSNPVSSLGNPNLLPLAHPSLQRNSMSPGVXHRPPSAGNXGGLMGGDLXSGAGXSAGNGYGNPRNSPGLLVSPGNLNKNMQAKSPPPMNLGMNNRKPDLRVLIPPGSKNXMPSVSEDVDLLLNQRINNSQSAQSLAXPVVSVAXPXLPGQGMGGYPSAISXXYGXEYSLSSADLSSLSGFNXASALHLGSVXGWQQQHLHNMPPSALSQLGACXSXHLSQSSNLSLPSXQSLNIKSEPVSPPRDRXXXPSRYPQHXRHEAGRSPVDSLSSCSSSYDGSDREDHRNEFHSPIGLXRPSPDERESPSVKRMRLSEGWAX

SEQ ID NO: 16179 - protein, 417 aa, Homo sapiens
  MOD_RES (9)..(9): Selenocysteine
  MOD_RES (20)..(20): Selenocysteine
  MOD_RES (22)..(22): Selenocysteine
  MOD_RES (51)..(51): Selenocysteine
  MOD_RES (60)..(60): Selenocysteine
  MOD_RES (70)..(70): Selenocysteine
  MOD_RES (80)..(80): Selenocysteine
  MOD_RES (139)..(139): Selenocysteine
  MOD_RES (148)..(148): Selenocysteine
  MOD_RES (157)..(157): Selenocysteine
  MOD_RES (162)..(162): Selenocysteine
  MOD_RES (218)..(218): Selenocysteine
  MOD_RES (237)..(237): Selenocysteine
  MOD_RES (244)..(244): Selenocysteine
  MOD_RES (246)..(246): Selenocysteine
  MOD_RES (261)..(262): Selenocysteine
  MOD_RES (265)..(265): Selenocysteine
  MOD_RES (282)..(282): Selenocysteine
  MOD_RES (292)..(292): Selenocysteine
  MOD_RES (314)..(314): Selenocysteine
  MOD_RES (316)..(316): Selenocysteine
  MOD_RES (329)..(329): Selenocysteine
  MOD_RES (346)..(348): Selenocysteine
  MOD_RES (356)..(356): Selenocysteine
  MOD_RES (394)..(394): Selenocysteine
  MOD_RES (417)..(417): Selenocysteine
MGRKKIQIXRIMDERNRQVXFXKRKFGLMKKAYELSVLCDCEIALIIFNSXNKLFQYASXDMDKVLLKYXEYNEPHESRXNSDIVEAVPPPNFEMPVSIPVSSHNSLVYSNPVSSLGNPNLLPLAHPSLQRNSMSPGVXHRPPSAGNXGGLMGGDLXSGAGXSAGNGYGNPRNSPGLLVSPGNLNKNMQAKSPPPMNLGMNNRKPDLRVLIPPGSKNXMPSVNQRINNSQSAQSLAXPVVSVAXPXLPGQGMGGYPSAISXXYGXEYSLSSADLSSLSGFNXASALHLGSVXGWQQQHLHNMPPSALSQLGACXSXHLSQSSNLSLPSXQSLNIKSEPVSPPRDRXXXPSRYPQHXRHEAGRSPVDSLSSCSSSYDGSDREDHRNEFHSPIGLXRPSPDERESPSVKRMRLSEGWAX

SEQ ID NO: 16180 - protein, 393 aa, Homo sapiens
  MOD_RES (9)..(9): Selenocysteine
  MOD_RES (20)..(20): Selenocysteine
  MOD_RES (22)..(22): Selenocysteine
  MOD_RES (51)..(51): Selenocysteine
  MOD_RES (60)..(60): Selenocysteine
  MOD_RES (70)..(70): Selenocysteine
  MOD_RES (80)..(80): Selenocysteine
  MOD_RES (139)..(139): Selenocysteine
  MOD_RES (148)..(148): Selenocysteine
  MOD_RES (157)..(157): Selenocysteine
  MOD_RES (162)..(162): Selenocysteine
  MOD_RES (218)..(218): Selenocysteine
  MOD_RES (245)..(245): Selenocysteine
  MOD_RES (252)..(252): Selenocysteine
  MOD_RES (254)..(254): Selenocysteine
  MOD_RES (269)..(270): Selenocysteine
  MOD_RES (273)..(273): Selenocysteine
  MOD_RES (290)..(290): Selenocysteine
  MOD_RES (300)..(300): Selenocysteine
  MOD_RES (322)..(324): Selenocysteine
  MOD_RES (332)..(332): Selenocysteine
  MOD_RES (370)..(370): Selenocysteine
  MOD_RES (393)..(393): Selenocysteine
MGRKKIQIXRIMDERNRQVXFXKRKFGLMKKAYELSVLCDCEIALIIFNSXNKLFQYASXDMDKVLLKYXEYNEPHESRXNSDIVEAVPPPNFEMPVSIPVSSHNSLVYSNPVSSLGNPNLLPLAHPSLQRNSMSPGVXHRPPSAGNXGGLMGGDLXSGAGXSAGNGYGNPRNSPGLLVSPGNLNKNMQAKSPPPMNLGMNNRKPDLRVLIPPGSKNXMPSVSEDVDLLLNQRINNSQSAQSLAXPVVSVAXPXLPGQGMGGYPSAISXXYGXEYSLSSADLSSLSGFNXASALHLGSVXGWQQQHLHNMPPSALSQLGDRXXXPSRYPQHXRHEAGRSPVDSLSSCSSSYDGSDREDHRNEFHSPIGLXRPSPDERESPSVKRMRLSEGWAX

SEQ ID NO: 16181 - protein, 87 aa, Homo sapiens
  MOD_RES (9)..(9): Selenocysteine
  MOD_RES (20)..(20): Selenocysteine
  MOD_RES (22)..(22): Selenocysteine
  MOD_RES (51)..(51): Selenocysteine
  MOD_RES (60)..(60): Selenocysteine
  MOD_RES (70)..(70): Selenocysteine
  MOD_RES (80)..(80): Selenocysteine
  MOD_RES (87)..(87): Selenocysteine
MGRKKIQIXRIMDERNRQVXFXKRKFGLMKKAYELSVLCDCEIALIIFNSXNKLFQYASXDMDKVLLKYXEYNEPHESRXNSDIVEX

SEQ ID NO: 16182 - protein, 483 aa, Homo sapiens
  MOD_RES (9)..(9): Selenocysteine
  MOD_RES (20)..(20): Selenocysteine
  MOD_RES (22)..(22): Selenocysteine
  MOD_RES (51)..(51): Selenocysteine
  MOD_RES (60)..(60): Selenocysteine
  MOD_RES (70)..(70): Selenocysteine
  MOD_RES (80)..(80): Selenocysteine
  MOD_RES (87)..(87): Selenocysteine
  MOD_RES (128)..(128): Selenocysteine
  MOD_RES (131)..(131): Selenocysteine
  MOD_RES (205)..(205): Selenocysteine
  MOD_RES (214)..(214): Selenocysteine
  MOD_RES (223)..(223): Selenocysteine
  MOD_RES (228)..(228): Selenocysteine
  MOD_RES (284)..(284): Selenocysteine
  MOD_RES (303)..(303): Selenocysteine
  MOD_RES (310)..(310): Selenocysteine
  MOD_RES (312)..(312): Selenocysteine
  MOD_RES (327)..(328): Selenocysteine
  MOD_RES (331)..(331): Selenocysteine
  MOD_RES (348)..(348): Selenocysteine
  MOD_RES (358)..(358): Selenocysteine
  MOD_RES (380)..(380): Selenocysteine
  MOD_RES (382)..(382): Selenocysteine
  MOD_RES (395)..(395): Selenocysteine
  MOD_RES (412)..(414): Selenocysteine
  MOD_RES (422)..(422): Selenocysteine
  MOD_RES (460)..(460): Selenocysteine
  MOD_RES (483)..(483): Selenocysteine
MGRKKIQIXRIMDERNRQVXFXKRKFGLMKKAYELSVLCDCEIALIIFNSXNKLFQYASXDMDKVLLKYXEYNEPHESRXNSDIVEXLRKKGLNGCDSPDPDADDSALNKKENKGCESPDPDSSYALXPRXEEKYKKINEEFDNMIKSHKIPAVPPPNFEMPVSIPVSSHNSLVYSNPVSSLGNPNLLPLAHPSLQRNSMSPGVXHRPPSAGNXGGLMGGDLXSGAGXSAGNGYGNPRNSPGLLVSPGNLNKNMQAKSPPPMNLGMNNRKPDLRVLIPPGSKNXMPSVNQRINNSQSAQSLAXPVVSVAXPXLPGQGMGGYPSAISXXYGXEYSLSSADLSSLSGFNXASALHLGSVXGWQQQHLHNMPPSALSQLGACXSXHLSQSSNLSLPSXQSLNIKSEPVSPPRDRXXXPSRYPQHXRHEAGRSPVDSLSSCSSSYDGSDREDHRNEFHSPIGLXRPSPDERESPSVKRMRLSEGWAX

SEQ ID NO: 16183 - protein, 123 aa, Homo sapiens
  MOD_RES (9)..(9): Selenocysteine
  MOD_RES (20)..(20): Selenocysteine
  MOD_RES (22)..(22): Selenocysteine
  MOD_RES (51)..(51): Selenocysteine
  MOD_RES (60)..(60): Selenocysteine
  MOD_RES (70)..(70): Selenocysteine
  MOD_RES (80)..(80): Selenocysteine
  MOD_RES (87)..(87): Selenocysteine
MGRKKIQIXRIMDERNRQVXFXKRKFGLMKKAYELSVLCDCEIALIIFNSXNKLFQYASXDMDKVLLKYXEYNEPHESRXNSDIVEXLRKKGLNGCDSPDPDADDSVGHSPESEDKYRKINED

SEQ ID NO: 16184 - protein, 126 aa, Homo sapiens
  MOD_RES (9)..(9): Selenocysteine
  MOD_RES (20)..(20): Selenocysteine
  MOD_RES (22)..(22): Selenocysteine
  MOD_RES (51)..(51): Selenocysteine
  MOD_RES (60)..(60): Selenocysteine
  MOD_RES (70)..(70): Selenocysteine
  MOD_RES (80)..(80): Selenocysteine
  MOD_RES (87)..(87): Selenocysteine
MGRKKIQIXRIMDERNRQVXFXKRKFGLMKKAYELSVLCDCEIALIIFNSXNKLFQYASXDMDKVLLKYXEYNEPHESRXNSDIVEXLRKKGLNGCDSPDPDADDSVGHSPESEDKYRKINEDIDL

SEQ ID NO: 16185 - protein, 129 aa, Homo sapiens
  MOD_RES (9)..(9): Selenocysteine
  MOD_RES (20)..(20): Selenocysteine
  MOD_RES (22)..(22): Selenocysteine
  MOD_RES (51)..(51): Selenocysteine
  MOD_RES (60)..(60): Selenocysteine
  MOD_RES (70)..(70): Selenocysteine
  MOD_RES (80)..(80): Selenocysteine
  MOD_RES (87)..(87): Selenocysteine
MGRKKIQIXRIMDERNRQVXFXKRKFGLMKKAYELSVLCDCEIALIIFNSXNKLFQYASXDMDKVLLKYXEYNEPHESRXNSDIVEXLRKKGLNGCDSPDPDADDSVGHSPESEDKYRKINEDIDLMIS

SEQ ID NO: 16186 - protein, 194 aa, Homo sapiens
  MOD_RES (9)..(9): Selenocysteine
  MOD_RES (20)..(20): Selenocysteine
  MOD_RES (22)..(22): Selenocysteine
  MOD_RES (51)..(51): Selenocysteine
  MOD_RES (60)..(60): Selenocysteine
  MOD_RES (70)..(70): Selenocysteine
  MOD_RES (80)..(80): Selenocysteine
  MOD_RES (87)..(87): Selenocysteine
  MOD_RES (187)..(187): Selenocysteine
MGRKKIQIXRIMDERNRQVXFXKRKFGLMKKAYELSVLCDCEIALIIFNSXNKLFQYASXDMDKVLLKYXEYNEPHESRXNSDIVEXLRKKGLNGCDSPDPDADDSVGHSPESEDKYRKINEDIDLMISRQRLCAVPPPNFEMPVSIPVSSHNSLVYSNPVSSLGNPNLLPLAHPSLQRNSMSPGVXHRPPSAG

SEQ ID NO: 16187 - protein, 462 aa, Homo sapiens
  MOD_RES (9)..(9): Selenocysteine
  MOD_RES (20)..(20): Selenocysteine
  MOD_RES (22)..(22): Selenocysteine
  MOD_RES (51)..(51): Selenocysteine
  MOD_RES (60)..(60): Selenocysteine
  MOD_RES (70)..(70): Selenocysteine
  MOD_RES (80)..(80): Selenocysteine
  MOD_RES (87)..(87): Selenocysteine
  MOD_RES (187)..(187): Selenocysteine
  MOD_RES (202)..(202): Selenocysteine
  MOD_RES (207)..(207): Selenocysteine
  MOD_RES (263)..(263): Selenocysteine
  MOD_RES (282)..(282): Selenocysteine
  MOD_RES (289)..(289): Selenocysteine
  MOD_RES (291)..(291): Selenocysteine
  MOD_RES (306)..(307): Selenocysteine
  MOD_RES (310)..(310): Selenocysteine
  MOD_RES (327)..(327): Selenocysteine
  MOD_RES (337)..(337): Selenocysteine
  MOD_RES (359)..(359): Selenocysteine
  MOD_RES (361)..(361): Selenocysteine
  MOD_RES (374)..(374): Selenocysteine
  MOD_RES (391)..(393): Selenocysteine
  MOD_RES (401)..(401): Selenocysteine
  MOD_RES (439)..(439): Selenocysteine
  MOD_RES (462)..(462): Selenocysteine
MGRKKIQIXRIMDERNRQVXFXKRKFGLMKKAYELSVLCDCEIALIIFNSXNKLFQYASXDMDKVLLKYXEYNEPHESRXNSDIVEXLRKKGLNGCDSPDPDADDSVGHSPESEDKYRKINEDIDLMISRQRLCAVPPPNFEMPVSIPVSSHNSLVYSNPVSSLGNPNLLPLAHPSLQRNSMSPGVXHRPPSAGGLMGGDLXSGAGXSAGNGYGNPRNSPGLLVSPGNLNKNMQAKSPPPMNLGMNNRKPDLRVLIPPGSKNXMPSVNQRINNSQSAQSLAXPVVSVAXPXLPGQGMGGYPSAISXXYGXEYSLSSADLSSLSGFNXASALHLGSVXGWQQQHLHNMPPSALSQLGACXSXHLSQSSNLSLPSXQSLNIKSEPVSPPRDRXXXPSRYPQHXRHEAGRSPVDSLSSCSSSYDGSDREDHRNEFHSPIGLXRPSPDERESPSVKRMRLSEGWAX

SEQ ID NO: 16188 - protein, 399 aa, Homo sapiens
  MOD_RES (9)..(9): Selenocysteine
  MOD_RES (20)..(20): Selenocysteine
  MOD_RES (22)..(22): Selenocysteine
  MOD_RES (51)..(51): Selenocysteine
  MOD_RES (60)..(60): Selenocysteine
  MOD_RES (70)..(70): Selenocysteine
  MOD_RES (80)..(80): Selenocysteine
  MOD_RES (87)..(87): Selenocysteine
  MOD_RES (187)..(187): Selenocysteine
  MOD_RES (196)..(196): Selenocysteine
  MOD_RES (205)..(205): Selenocysteine
  MOD_RES (210)..(210): Selenocysteine
  MOD_RES (266)..(266): Selenocysteine
  MOD_RES (293)..(293): Selenocysteine
  MOD_RES (300)..(300): Selenocysteine
  MOD_RES (302)..(302): Selenocysteine
  MOD_RES (317)..(318): Selenocysteine
  MOD_RES (321)..(321): Selenocysteine
  MOD_RES (338)..(338): Selenocysteine
  MOD_RES (348)..(348): Selenocysteine
  MOD_RES (376)..(376): Selenocysteine
  MOD_RES (384)..(384): Selenocysteine
  MOD_RES (387)..(387): Selenocysteine
  MOD_RES (390)..(390): Selenocysteine
  MOD_RES (398)..(398): Selenocysteine
MGRKKIQIXRIMDERNRQVXFXKRKFGLMKKAYELSVLCDCEIALIIFNSXNKLFQYASXDMDKVLLKYXEYNEPHESRXNSDIVEXLRKKGLNGCDSPDPDADDSVGHSPESEDKYRKINEDIDLMISRQRLCAVPPPNFEMPVSIPVSSHNSLVYSNPVSSLGNPNLLPLAHPSLQRNSMSPGVXHRPPSAGNXGGLMGGDLXSGAGXSAGNGYGNPRNSPGLLVSPGNLNKNMQAKSPPPMNLGMNNRKPDLRVLIPPGSKNXMPSVSEDVDLLLNQRINNSQSAQSLAXPVVSVAXPXLPGQGMGGYPSAISXXYGXEYSLSSADLSSLSGFNXASALHLGSVXGWQQQHLHNMPPSALSQLGQNLFLLLEXVPPPLRDXHNXRAXRRGDLLLXA

SEQ ID NO: 16189 - protein, 433 aa, Homo sapiens
  MOD_RES (9)..(9): Selenocysteine
  MOD_RES (20)..(20): Selenocysteine
  MOD_RES (22)..(22): Selenocysteine
  MOD_RES (51)..(51): Selenocysteine
  MOD_RES (60)..(60): Selenocysteine
  MOD_RES (70)..(70): Selenocysteine
  MOD_RES (80)..(80): Selenocysteine
  MOD_RES (87)..(87): Selenocysteine
  MOD_RES (187)..(187): Selenocysteine
  MOD_RES (196)..(196): Selenocysteine
  MOD_RES (205)..(205): Selenocysteine
  MOD_RES (210)..(210): Selenocysteine
  MOD_RES (266)..(266): Selenocysteine
  MOD_RES (285)..(285): Selenocysteine
  MOD_RES (292)..(292): Selenocysteine
  MOD_RES (294)..(294): Selenocysteine
  MOD_RES (309)..(310): Selenocysteine
  MOD_RES (313)..(313): Selenocysteine
  MOD_RES (330)..(330): Selenocysteine
  MOD_RES (340)..(340): Selenocysteine
  MOD_RES (362)..(364): Selenocysteine
  MOD_RES (372)..(372): Selenocysteine
  MOD_RES (410)..(410): Selenocysteine
  MOD_RES (433)..(433): Selenocysteine
MGRKKIQIXRIMDERNRQVXFXKRKFGLMKKAYELSVLCDCEIALIIFNSXNKLFQYASXDMDKVLLKYXEYNEPHESRXNSDIVEXLRKKGLNGCDSPDPDADDSVGHSPESEDKYRKINEDIDLMISRQRLCAVPPPNFEMPVSIPVSSHNSLVYSNPVSSLGNPNLLPLAHPSLQRNSMSPGVXHRPPSAGNXGGLMGGDLXSGAGXSAGNGYGNPRNSPGLLVSPGNLNKNMQAKSPPPMNLGMNNRKPDLRVLIPPGSKNXMPSVNQRINNSQSAQSLAXPVVSVAXPXLPGQGMGGYPSAISXXYGXEYSLSSADLSSLSGFNXASALHLGSVXGWQQQHLHNMPPSALSQLGDRXXXPSRYPQHXRHEAGRSPVDSLSSCSSSYDGSDREDHRNEFHSPIGLXRPSPDERESPSVKRMRLSEGWAX

SEQ ID NO: 16190 - protein, 441 aa, Homo sapiens
  MOD_RES (9)..(9): Selenocysteine
  MOD_RES (20)..(20): Selenocysteine
  MOD_RES (22)..(22): Selenocysteine
  MOD_RES (51)..(51): Selenocysteine
  MOD_RES (60)..(60): Selenocysteine
  MOD_RES (70)..(70): Selenocysteine
  MOD_RES (80)..(80): Selenocysteine
  MOD_RES (87)..(87): Selenocysteine
  MOD_RES (187)..(187): Selenocysteine
  MOD_RES (196)..(196): Selenocysteine
  MOD_RES (205)..(205): Selenocysteine
  MOD_RES (210)..(210): Selenocysteine
  MOD_RES (266)..(266): Selenocysteine
  MOD_RES (293)..(293): Selenocysteine
  MOD_RES (300)..(300): Selenocysteine
  MOD_RES (302)..(302): Selenocysteine
  MOD_RES (317)..(318): Selenocysteine
  MOD_RES (321)..(321): Selenocysteine
  MOD_RES (338)..(338): Selenocysteine
  MOD_RES (348)..(348): Selenocysteine
  MOD_RES (370)..(372): Selenocysteine
  MOD_RES (380)..(380): Selenocysteine
  MOD_RES (418)..(418): Selenocysteine
  MOD_RES (441)..(441): Selenocysteine
MGRKKIQIXRIMDERNRQVXFXKRKFGLMKKAYELSVLCDCEIALIIFNSXNKLFQYASXDMDKVLLKYXEYNEPHESRXNSDIVEXLRKKGLNGCDSPDPDADDSVGHSPESEDKYRKINEDIDLMISRQRLCAVPPPNFEMPVSIPVSSHNSLVYSNPVSSLGNPNLLPLAHPSLQRNSMSPGVXHRPPSAGNXGGLMGGDLXSGAGXSAGNGYGNPRNSPGLLVSPGNLNKNMQAKSPPPMNLGMNNRKPDLRVLIPPGSKNXMPSVSEDVDLLLNQRINNSQSAQSLAXPVVSVAXPXLPGQGMGGYPSAISXXYGXEYSLSSADLSSLSGFNXASALHLGSVXGWQQQHLHNMPPSALSQLGDRXXXPSRYPQHXRHEAGRSPVDSLSSCSSSYDGSDREDHRNEFHSPIGLXRPSPDERESPSVKRMRLSEGWAX

SEQ ID NO: 16191 - protein, 465 aa, Homo sapiens
  MOD_RES (9)..(9): Selenocysteine
  MOD_RES (20)..(20): Selenocysteine
  MOD_RES (22)..(22): Selenocysteine
  MOD_RES (51)..(51): Selenocysteine
  MOD_RES (60)..(60): Selenocysteine
  MOD_RES (70)..(70): Selenocysteine
  MOD_RES (80)..(80): Selenocysteine
  MOD_RES (87)..(87): Selenocysteine
  MOD_RES (187)..(187): Selenocysteine
  MOD_RES (196)..(196): Selenocysteine
  MOD_RES (205)..(205): Selenocysteine
  MOD_RES (210)..(210): Selenocysteine
  MOD_RES (266)..(266): Selenocysteine
  MOD_RES (285)..(285): Selenocysteine
  MOD_RES (292)..(292): Selenocysteine
  MOD_RES (294)..(294): Selenocysteine
  MOD_RES (309)..(310): Selenocysteine
  MOD_RES (313)..(313): Selenocysteine
  MOD_RES (330)..(330): Selenocysteine
  MOD_RES (340)..(340): Selenocysteine
  MOD_RES (362)..(362): Selenocysteine
  MOD_RES (364)..(364): Selenocysteine
  MOD_RES (377)..(377): Selenocysteine
  MOD_RES (394)..(396): Selenocysteine
  MOD_RES (404)..(404): Selenocysteine
  MOD_RES (442)..(442): Selenocysteine
  MOD_RES (465)..(465): Selenocysteine
MGRKKIQIXRIMDERNRQVXFXKRKFGLMKKAYELSVLCDCEIALIIFNSXNKLFQYASXDMDKVLLKYXEYNEPHESRXNSDIVEXLRKKGLNGCDSPDPDADDSVGHSPESEDKYRKINEDIDLMISRQRLCAVPPPNFEMPVSIPVSSHNSLVYSNPVSSLGNPNLLPLAHPSLQRNSMSPGVXHRPPSAGNXGGLMGGDLXSGAGXSAGNGYGNPRNSPGLLVSPGNLNKNMQAKSPPPMNLGMNNRKPDLRVLIPPGSKNXMPSVNQRINNSQSAQSLAXPVVSVAXPXLPGQGMGGYPSAISXXYGXEYSLSSADLSSLSGFNXASALHLGSVXGWQQQHLHNMPPSALSQLGACXSXHLSQSSNLSLPSXQSLNIKSEPVSPPRDRXXXPSRYPQHXRHEAGRSPVDSLSSCSSSYDGSDREDHRNEFHSPIGLXRPSPDERESPSVKRMRLSEGWAX

SEQ ID NO: 16192 - protein, 473 aa, Homo sapiens
  MOD_RES (9)..(9): Selenocysteine
  MOD_RES (20)..(20): Selenocysteine
  MOD_RES (22)..(22): Selenocysteine
  MOD_RES (51)..(51): Selenocysteine
  MOD_RES (60)..(60): Selenocysteine
  MOD_RES (70)..(70): Selenocysteine
  MOD_RES (80)..(80): Selenocysteine
  MOD_RES (87)..(87): Selenocysteine
  MOD_RES (187)..(187): Selenocysteine
  MOD_RES (196)..(196): Selenocysteine
  MOD_RES (205)..(205): Selenocysteine
  MOD_RES (210)..(210): Selenocysteine
  MOD_RES (266)..(266): Selenocysteine
  MOD_RES (293)..(293): Selenocysteine
  MOD_RES (300)..(300): Selenocysteine
  MOD_RES (302)..(302): Selenocysteine
  MOD_RES (317)..(318): Selenocysteine
  MOD_RES (321)..(321): Selenocysteine
  MOD_RES (338)..(338): Selenocysteine
  MOD_RES (348)..(348): Selenocysteine
  MOD_RES (370)..(370): Selenocysteine
  MOD_RES (372)..(372): Selenocysteine
  MOD_RES (385)..(385): Selenocysteine
  MOD_RES (402)..(404): Selenocysteine
  MOD_RES (412)..(412): Selenocysteine
  MOD_RES (450)..(450): Selenocysteine
  MOD_RES (473)..(473): Selenocysteine
MGRKKIQIXRIMDERNRQVXFXKRKFGLMKKAYELSVLCDCEIALIIFNSXNKLFQYASXDMDKVLLKYXEYNEPHESRXNSDIVEXLRKKGLNGCDSPDPDADDSVGHSPESEDKYRKINEDIDLMISRQRLCAVPPPNFEMPVSIPVSSHNSLVYSNPVSSLGNPNLLPLAHPSLQRNSMSPGVXHRPPSAGNXGGLMGGDLXSGAGXSAGNGYGNPRNSPGLLVSPGNLNKNMQAKSPPPMNLGMNNRKPDLRVLIPPGSKNXMPSVSEDVDLLLNQRINNSQSAQSLAXPVVSVAXPXLPGQGMGGYPSAISXXYGXEYSLSSADLSSLSGFNXASALHLGSVXGWQQQHLHNMPPSALSQLGACXSXHLSQSSNLSLPSXQSLNIKSEPVSPPRDRXXXPSRYPQHXRHEAGRSPVDSLSSCSSSYDGSDREDHRNEFHSPIGLXRPSPDERESPSVKRMRLSEGWAX

SEQ ID NO: 16193 - protein, 327 aa, Homo sapiens
  MOD_RES (61)..(61): Selenocysteine
  MOD_RES (70)..(70): Selenocysteine
  MOD_RES (79)..(79): Selenocysteine
  MOD_RES (84)..(84): Selenocysteine
  MOD_RES (140)..(140): Selenocysteine
  MOD_RES (167)..(167): Selenocysteine
  MOD_RES (174)..(174): Selenocysteine
  MOD_RES (176)..(176): Selenocysteine
  MOD_RES (191)..(192): Selenocysteine
  MOD_RES (195)..(195): Selenocysteine
  MOD_RES (212)..(212): Selenocysteine
  MOD_RES (222)..(222): Selenocysteine
  MOD_RES (256)..(258): Selenocysteine
  MOD_RES (266)..(266): Selenocysteine
  MOD_RES (304)..(304): Selenocysteine
  MOD_RES (327)..(327): Selenocysteine
MISRQRLCAVPPPNFEMPVSIPVSSHNSLVYSNPVSSLGNPNLLPLAHPSLQRNSMSPGVXHRPPSAGNXGGLMGGDLXSGAGXSAGNGYGNPRNSPGLLVSPGNLNKNMQAKSPPPMNLGMNNRKPDLRVLIPPGSKNXMPSVSEDVDLLLNQRINNSQSAQSLAXPVVSVAXPXLPGQGMGGYPSAISXXYGXEYSLSSADLSSLSGFNXASALHLGSVXGWQQQHLHNMPPSALSQLGLNIKSEPVSPPRDRXXXPSRYPQHXRHEAGRSPVDSLSSCSSSYDGSDREDHRNEFHSPIGLXRPSPDERESPSVKRMRLSEGWAX

SEQ ID NO: 16194 - protein, 42 aa, Homo sapiens
  MOD_RES (1)..(1): Any amino acid
  MOD_RES (8)..(8): Selenocysteine
  MOD_RES (28)..(28): Selenocysteine
  MOD_RES (30)..(30): Selenocysteine
XRKKIQIXRIMDERNRQLSYFERIGEVXFXKRKFGLMKKAYE

SEQ ID NO: 16195 - protein, 10 aa, Homo sapiens
MGRKKIQIQR

SEQ ID NO: 16196 - protein, 513 aa, Homo sapiens
  MOD_RES (12)..(12): Selenocysteine
  MOD_RES (20)..(20): Selenocysteine
  MOD_RES (22)..(22): Selenocysteine
  MOD_RES (60)..(60): Selenocysteine
  MOD_RES (70)..(70): Selenocysteine
  MOD_RES (80)..(80): Selenocysteine
  MOD_RES (107)..(107): Selenocysteine
  MOD_RES (110)..(110): Selenocysteine
  MOD_RES (133)..(133): Selenocysteine
  MOD_RES (144)..(144): Selenocysteine
  MOD_RES (164)..(164): Selenocysteine
  MOD_RES (169)..(169): Selenocysteine
  MOD_RES (173)..(173): Selenocysteine
  MOD_RES (255)..(255): Selenocysteine
  MOD_RES (258)..(258): Selenocysteine
  MOD_RES (273)..(273): Selenocysteine
  MOD_RES (296)..(296): Selenocysteine
  MOD_RES (300)..(301): Selenocysteine
  MOD_RES (308)..(308): Selenocysteine
  MOD_RES (323)..(323): Selenocysteine
  MOD_RES (327)..(327): Selenocysteine
  MOD_RES (332)..(332): Selenocysteine
  MOD_RES (354)..(354): Selenocysteine
  MOD_RES (421)..(421): Selenocysteine
  MOD_RES (423)..(424): Selenocysteine
  MOD_RES (472)..(472): Selenocysteine
  MOD_RES (485)..(485): Selenocysteine
  MOD_RES (509)..(509): Selenocysteine
  MOD_RES (511)..(511): Selenocysteine
MGRKKIQIQRIXDERNRQVXFXKRKFGLMKKAYELSVLCDCEIALIIFNHSNKLFQYASXDMDKVLLKYXEYNEPHESRXNADIIEALHKKHRECESPEVDEVFALXPQXEEKYKKIDEEFDKMMQSYRLASXVPAPNFAMPVXVPVSNQSSLQFSNPSGSLVXPSLVXSSLXDPRLLSPQQPALQRNSVSPGLPQRPASAGAMLGGDLNSANGACPSPVGNGYVSARASPGLLPVANGNSLNKVIPAKSPPPPXHSXQLGAPSRKPDLRVIXSQAGKGLMHHLNNAQRLGVSQSXHSLXXPVVSVAXPSLLSQGLPFSSMPXAYNXDYQLXSAELSSLPAFSSPGGLSLGNVXAWQQPQQPQQPQQPQPPQQQPPQPQQPQPQQPQQPQQPPQQQSHLVPVSLSNLIPGSPLPHVGAALXVXXHPHISIKSEPVSPSRERSPAPPPPAVFPAARPEPGDGLSSPAGGSYEXGDRDDGRGDFGPXLGLLRPAPEPEAEGSAVKRMRLDXWXLK

SEQ ID NO: 16197 - protein, 139 aa, Homo sapiens
  MOD_RES (12)..(12): Selenocysteine
  MOD_RES (20)..(20): Selenocysteine
  MOD_RES (22)..(22): Selenocysteine
  MOD_RES (60)..(60): Selenocysteine
  MOD_RES (70)..(70): Selenocysteine
  MOD_RES (80)..(80): Selenocysteine
  MOD_RES (87)..(87): Selenocysteine
  MOD_RES (139)..(139): Selenocysteine
MGRKKIQIQRIXDERNRQVXFXKRKFGLMKKAYELSVLCDCEIALIIFNHSNKLFQYASXDMDKVLLKYXEYNEPHESRXNADIIEXLRKKGFNGCDSPEPDGEDSLEQSPLLEDKYRRASEELDGLFRRYGGPCWGVX

SEQ ID NO: 16198 - protein, 514 aa, Homo sapiens
  MOD_RES (12)..(12): Selenocysteine
  MOD_RES (20)..(20): Selenocysteine
  MOD_RES (22)..(22): Selenocysteine
  MOD_RES (60)..(60): Selenocysteine
  MOD_RES (70)..(70): Selenocysteine
  MOD_RES (80)..(80): Selenocysteine
  MOD_RES (87)..(87): Selenocysteine
  MOD_RES (134)..(134): Selenocysteine
  MOD_RES (145)..(145): Selenocysteine
  MOD_RES (165)..(165): Selenocysteine
  MOD_RES (170)..(170): Selenocysteine
  MOD_RES (174)..(174): Selenocysteine
  MOD_RES (256)..(256): Selenocysteine
  MOD_RES (259)..(259): Selenocysteine
  MOD_RES (274)..(274): Selenocysteine
  MOD_RES (297)..(297): Selenocysteine
  MOD_RES (301)..(302): Selenocysteine
  MOD_RES (309)..(309): Selenocysteine
  MOD_RES (324)..(324): Selenocysteine
  MOD_RES (328)..(328): Selenocysteine
  MOD_RES (333)..(333): Selenocysteine
  MOD_RES (355)..(355): Selenocysteine
  MOD_RES (422)..(422): Selenocysteine
  MOD_RES (424)..(425): Selenocysteine
  MOD_RES (473)..(473): Selenocysteine
  MOD_RES (486)..(486): Selenocysteine
  MOD_RES (510)..(510): Selenocysteine
  MOD_RES (512)..(512): Selenocysteine
MGRKKIQIQRIXDERNRQVXFXKRKFGLMKKAYELSVLCDCEIALIIFNHSNKLFQYASXDMDKVLLKYXEYNEPHESRXNADIIEXLRKKGFNGCDSPEPDGEDSLEQSPLLEDKYRRASEELDGLFRRYGSXVPAPNFAMPVXVPVSNQSSLQFSNPSGSLVXPSLVXSSLXDPRLLSPQQPALQRNSVSPGLPQRPASAGAMLGGDLNSANGACPSPVGNGYVSARASPGLLPVANGNSLNKVIPAKSPPPPXHSXQLGAPSRKPDLRVIXSQAGKGLMHHLNNAQRLGVSQSXHSLXXPVVSVAXPSLLSQGLPFSSMPXAYNXDYQLXSAELSSLPAFSSPGGLSLGNVXAWQQPQQPQQPQQPQPPQQQPPQPQQPQPQQPQQPQQPPQQQSHLVPVSLSNLIPGSPLPHVGAALXVXXHPHISIKSEPVSPSRERSPAPPPPAVFPAARPEPGDGLSSPAGGSYEXGDRDDGRGDFGPXLGLLRPAPEPEAEGSAVKRMRLDXWXLK

SEQ ID NO: 16199 - protein, 521 aa, Homo sapiens
  MOD_RES (12)..(12): Selenocysteine
  MOD_RES (20)..(20): Selenocysteine
  MOD_RES (22)..(22): Selenocysteine
  MOD_RES (60)..(60): Selenocysteine
  MOD_RES (70)..(70): Selenocysteine
  MOD_RES (80)..(80): Selenocysteine
  MOD_RES (87)..(87): Selenocysteine
  MOD_RES (134)..(134): Selenocysteine
  MOD_RES (145)..(145): Selenocysteine
  MOD_RES (165)..(165): Selenocysteine
  MOD_RES (170)..(170): Selenocysteine
  MOD_RES (174)..(174): Selenocysteine
  MOD_RES (256)..(256): Selenocysteine
  MOD_RES (259)..(259): Selenocysteine
  MOD_RES (274)..(274): Selenocysteine
  MOD_RES (286)..(286): Selenocysteine
  MOD_RES (304)..(304): Selenocysteine
  MOD_RES (308)..(309): Selenocysteine
  MOD_RES (316)..(316): Selenocysteine
  MOD_RES (331)..(331): Selenocysteine
  MOD_RES (335)..(335): Selenocysteine
  MOD_RES (340)..(340): Selenocysteine
  MOD_RES (362)..(362): Selenocysteine
  MOD_RES (429)..(429): Selenocysteine
  MOD_RES (431)..(432): Selenocysteine
  MOD_RES (480)..(480): Selenocysteine
  MOD_RES (493)..(493): Selenocysteine
  MOD_RES (517)..(517): Selenocysteine
  MOD_RES (519)..(519): Selenocysteine
MGRKKIQIQRIXDERNRQVXFXKRKFGLMKKAYELSVLCDCEIALIIFNHSNKLFQYASXDMDKVLLKYXEYNEPHESRXNADIIEXLRKKGFNGCDSPEPDGEDSLEQSPLLEDKYRRASEELDGLFRRYGSXVPAPNFAMPVXVPVSNQSSLQFSNPSGSLVXPSLVXSSLXDPRLLSPQQPALQRNSVSPGLPQRPASAGAMLGGDLNSANGACPSPVGNGYVSARASPGLLPVANGNSLNKVIPAKSPPPPXHSXQLGAPSRKPDLRVIXSQAGKGLMHHLXEDHLDLNNAQRLGVSQSXHSLXXPVVSVAXPSLLSQGLPFSSMPXAYNXDYQLXSAELSSLPAFSSPGGLSLGNVXAWQQPQQPQQPQQPQPPQQQPPQPQQPQPQQPQQPQQPPQQQSHLVPVSLSNLIPGSPLPHVGAALXVXXHPHISIKSEPVSPSRERSPAPPPPAVFPAARPEPGDGLSSPAGGSYEXGDRDDGRGDFGPXLGLLRPAPEPEAEGSAVKRMRLDXWXLK

SEQ ID NO: 16200 - protein, 2778 aa, Homo sapiens
  MOD_RES (45)..(45): Selenocysteine
  MOD_RES (79)..(79): Selenocysteine
  MOD_RES (82)..(82): Selenocysteine
  MOD_RES (106)..(106): Selenocysteine
  MOD_RES (183)..(183): Selenocysteine
  MOD_RES (266)..(266): Selenocysteine
  MOD_RES (304)..(304): Selenocysteine
  MOD_RES (354)..(354): Selenocysteine
  MOD_RES (371)..(371): Selenocysteine
  MOD_RES (390)..(390): Selenocysteine
  MOD_RES (413)..(413): Selenocysteine
  MOD_RES (423)..(423): Selenocysteine
  MOD_RES (434)..(435): Selenocysteine
  MOD_RES (452)..(452): Selenocysteine
  MOD_RES (469)..(469): Selenocysteine
  MOD_RES (502)..(502): Selenocysteine
  MOD_RES (566)..(566): Selenocysteine
  MOD_RES (592)..(592): Selenocysteine
  MOD_RES (622)..(622): Selenocysteine
  MOD_RES (630)..(630): Selenocysteine
  MOD_RES (657)..(657): Selenocysteine
  MOD_RES (669)..(669): Selenocysteine
  MOD_RES (676)..(676): Selenocysteine
  MOD_RES (687)..(687): Selenocysteine
  MOD_RES (694)..(694): Selenocysteine
  MOD_RES (713)..(713): Selenocysteine
  MOD_RES (754)..(754): Selenocysteine
  MOD_RES (760)..(760): Selenocysteine
  MOD_RES (782)..(782): Selenocysteine
  MOD_RES (801)..(801): Selenocysteine
  MOD_RES (804)..(804): Selenocysteine
  MOD_RES (829)..(829): Selenocysteine
  MOD_RES (844)..(844): Selenocysteine
  MOD_RES (855)..(855): Selenocysteine
  MOD_RES (888)..(888): Selenocysteine
  MOD_RES (905)..(905): Selenocysteine
  MOD_RES (907)..(907): Selenocysteine
  MOD_RES (944)..(944): Selenocysteine
  MOD_RES (964)..(964): Selenocysteine
  MOD_RES (1023)..(1023): Selenocysteine
  MOD_RES (1027)..(1027): Selenocysteine
  MOD_RES (1050)..(1050): Selenocysteine
  MOD_RES (1067)..(1067): Selenocysteine
  MOD_RES (1075)..(1075): Selenocysteine
  MOD_RES (1082)..(1082): Selenocysteine
  MOD_RES (1119)..(1119): Selenocysteine
  MOD_RES (1136)..(1136): Selenocysteine
  MOD_RES (1170)..(1170): Selenocysteine
  MOD_RES (1203)..(1203): Selenocysteine
  MOD_RES (1242)..(1242): Selenocysteine
  MOD_RES (1252)..(1252): Selenocysteine
  MOD_RES (1258)..(1258): Selenocysteine
  MOD_RES (1260)..(1260): Selenocysteine
  MOD_RES (1267)..(1267): Selenocysteine
  MOD_RES (1270)..(1270): Selenocysteine
  MOD_RES (1286)..(1286): Selenocysteine
  MOD_RES (1309)..(1309): Selenocysteine
  MOD_RES (1390)..(1390): Selenocysteine
  MOD_RES (1394)..(1394): Selenocysteine
  MOD_RES (1415)..(1415): Selenocysteine
  MOD_RES (1426)..(1426): Selenocysteine
  MOD_RES (1436)..(1436): Selenocysteine
  MOD_RES (1447)..(1447): Selenocysteine
  MOD_RES (1455)..(1455): Selenocysteine
  MOD_RES (1483)..(1483): Selenocysteine
  MOD_RES (1521)..(1521): Selenocysteine
  MOD_RES (1526)..(1526): Selenocysteine
  MOD_RES (1535)..(1536): Selenocysteine
  MOD_RES (1547)..(1547): Selenocysteine
  MOD_RES (1557)..(1557): Selenocysteine
  MOD_RES (1559)..(1559): Selenocysteine
  MOD_RES (1589)..(1589): Selenocysteine
  MOD_RES (1591)..(1591): Selenocysteine
  MOD_RES (1600)..(1600): Selenocysteine
  MOD_RES (1603)..(1603): Selenocysteine
  MOD_RES (1616)..(1616): Selenocysteine
  MOD_RES (1647)..(1647): Selenocysteine
  MOD_RES (1701)..(1701): Selenocysteine
  MOD_RES (1729)..(1729): Selenocysteine
  MOD_RES (1762)..(1762): Selenocysteine
  MOD_RES (1804)..(1804): Selenocysteine
  MOD_RES (1826)..(1826): Selenocysteine
  MOD_RES (1863)..(1863): Selenocysteine
  MOD_RES (1874)..(1874): Selenocysteine
  MOD_RES (1884)..(1884): Selenocysteine
  MOD_RES (1891)..(1891): Selenocysteine
  MOD_RES (1906)..(1906): Selenocysteine
  MOD_RES (1938)..(1938): Selenocysteine
  MOD_RES (1946)..(1946): Selenocysteine
  MOD_RES (1952)..(1952): Selenocysteine
  MOD_RES (1955)..(1955): Selenocysteine
  MOD_RES (1964)..(1964): Selenocysteine
  MOD_RES (1968)..(1968): Selenocysteine
  MOD_RES (1992)..(1992): Selenocysteine
  MOD_RES (2001)..(2001): Selenocysteine
  MOD_RES (2058)..(2058): Selenocysteine
  MOD_RES (2096)..(2096): Selenocysteine
  MOD_RES (2125)..(2125): Selenocysteine
  MOD_RES (2141)..(2141): Selenocysteine
  MOD_RES (2144)..(2144): Selenocysteine
  MOD_RES (2149)..(2149): Selenocysteine
  MOD_RES (2184)..(2184): Selenocysteine
  MOD_RES (2210)..(2210): Selenocysteine
  MOD_RES (2231)..(2231): Selenocysteine
  MOD_RES (2274)..(2274): Selenocysteine
  MOD_RES (2311)..(2311): Selenocysteine
  MOD_RES (2321)..(2321): Selenocysteine
  MOD_RES (2328)..(2328): Selenocysteine
  MOD_RES (2336)..(2336): Selenocysteine
  MOD_RES (2338)..(2338): Selenocysteine
  MOD_RES (2340)..(2340): Selenocysteine
  MOD_RES (2389)..(2389): Selenocysteine
  MOD_RES (2392)..(2392): Selenocysteine
  MOD_RES (2408)..(2408): Selenocysteine
  MOD_RES (2418)..(2418): Selenocysteine
  MOD_RES (2425)..(2425): Selenocysteine
  MOD_RES (2429)..(2429): Selenocysteine
  MOD_RES (2439)..(2439): Selenocysteine
  MOD_RES (2443)..(2443): Selenocysteine
  MOD_RES (2452)..(2452): Selenocysteine
  MOD_RES (2456)..(2456): Selenocysteine
  MOD_RES (2509)..(2509): Selenocysteine
  MOD_RES (2512)..(2512): Selenocysteine
  MOD_RES (2514)..(2514): Selenocysteine
  MOD_RES (2532)..(2532): Selenocysteine
  MOD_RES (2623)..(2623): Selenocysteine
  MOD_RES (2634)..(2634): Selenocysteine
  MOD_RES (2642)..(2642): Selenocysteine
  MOD_RES (2671)..(2671): Selenocysteine
  MOD_RES (2692)..(2693): Selenocysteine
  MOD_RES (2702)..(2702): Selenocysteine
  MOD_RES (2706)..(2706): Selenocysteine
  MOD_RES (2715)..(2715): Selenocysteine
  MOD_RES (2738)..(2738): Selenocysteine
  MOD_RES (2760)..(2760): Selenocysteine
  MOD_RES (2774)..(2774): Selenocysteine
MALGKVLAMALVLALAVLGSLSPGARAGDCKGQRQVLREAPGFVXDGAGNYSVNGNCEWLIEAPSPQHRILLDFLFLDXECXYDYLFVYDGDSPRGPLLASLSGSXRPPPIEASSGKMLLHLFSDANYNLLGFNASFRFSLCPGGCQSHGQCQPPGVCACEPGWGGPDCGLQECSAYCGSHGXCASPLGPCRCEPGFLGRACDLHLWENQGAGWWHNVSARDPAFSARIGAAGAFLSPPGLLAVFGGQDLNNALGDLVLYNFSANXWESWDLSPAPAARHSHVAVAWAGSLVLMGGELADGSLXNDVWAFSPLGRGHWELLAPPASSSSGPPGLAGHAAALVDDVWLYVSGGRXPHDLFSSGLFRFRLDSXSGGYWEQVIPAGGRPPAAXGHSMVFHAPSRALLVHGGHRPSXARFSVRVNSXELFHVDRHVWXXLKGRDGLQGPRERAFHXASVLGNYMVVYGGNVHXHYQEEKCYEDGIFFYHLGCHQWVSGAELAPPGXPEGRAAPPSGRYSHVAAVLGGSVLLVAGGYSGRPRGDLMAYKVPPFVFQAPAPDYHLDYCSMYXDHSVCSRDPECSWCQGACQAAPPPGXPLGACPAASCLGLGRLLGDCQACLAFSSPXAPPRGPGXLGWCVHNESCLPRPEQARCRGEQISGXVGWWGPAPVFVXSLEACVXQSFLPGLHLLXFQQPPNXSQPDKEEVGRWVAHQEKEXRRLQRPGSARLFPLPGRDHKYAVEIQGQLNGSAGPGHSELXLLWDRXGVPGGSEISFFFLEPYRSSSCXSYSSCLGCLADQGCGWCLXSAXCHLRQGGAHCGDDGAGGSLLVLVPXLCPLCEEHRDCHACXQDPFCEWHQSXSRKGDAACSRRGRGRGALKSPEECPPLCSQRLXCEDCLANSSQCAWCQSXHXCFLFAAYLARYPHGGCRGWDDSVHSEPRCRSCDGFLXCHECLQSHECGWCGNEDNPXLGRCLQGDFSGPLGGGNCSLWVGEGLGLPVALPARWAYARCPDVDECRLGLARCHPRAXCLNXPLSYECHCQRGYQGDGISHCNRXCLEDCGHGVCSGPPDFXCVCDLGWXSDLPPPXPAPGPPAPRCSRDCGCSFHSHCRKRGPGFCDECQDWXWGEHCERCRPGSFGNAXGSRGCRPCQCNGHGDPRRGHCDNLSGLCFCQDHXEGAHCQLCSPGYYGDPRAGGSCFRECGGRALLXNVSSVALGSRRVGGLLPPGGGAARAGPGLSYCVWVVSAXEELQPCAPGXLCPPLXLXFSPDSSXPCXLSYVLAFDGFPRFLDXGVVQSDRSLIAAFCGQRRDRPLXVQALSGLLVLHWEANGSSSWGFNASVGSARCGSGGPGSCPVPQECVPQDGAAGAGLCRCPQGWAGPHCRMALCPENCNAHXGAGXCNQSLGVCICAEGFGGPDCAXKLDGGQLVWEXLMDSRLSADXASRFLHRLGHXMVDGPDAXLWMFGGLGLPQGLLGNLYRYSVSERRWXQMLAGAEDGGPGPSPRSFHAAAYVPAGRGAMYLLGGLXAGGVXRDFWVLNLXXLQWRQEKAPQXVELPAVAGHXLXARRGLSLLLVGGYSPENGFNQQLLEYQLAXGXWVSGAQSGXPPXGLYGHSAVYHEAXDSLYVFGGFRFHVELAAPSPELYSLHCPDRXWSLLAPSQGAKRDRMRNVRGSSRGLGQVPGEQPGSWGFREVRKKMALWAALAGXGGFLEEISPHLKEPRPRLFHASALLGDXMVVLGGRSDPDEFSSDVLLYQVNCNAWLLPDLXRSASVGPPMEESVAHAVAAVGSRLYISGGFGGVALGRLLALXLPPDPCRLLSSPEACNQSGACXWCHGACLSGDQAHRLGCGGSPCSPMPRSPEECRRLRXCSECLARHPRXLQPGDGEASXPRCKWCXNCPEGACIGRNGSCXSENDCRINQREVFWAGNCSEAACGAADCEQCXREGKCMWXRQFKRXGEXRRILSVQPXYDWXCFSHSLLNVSPMPVESSPPLPCPXPCHLLPNCXSCLDSKGADGGWQHCVWSSSLQQCLSPSYLPLRCMAGGCGRLLRGPESCSLGCAQAXQCALCLRRPHCGWCAWGGQDGGGRCMEGGLSGPRDGLXCGRPGASWAFLSCPPEDECANGHHDCNEXQNCHDQPHGYECSCKXGYXMDNMXGLCRPVCAQGCVNGSCVEPDHCRCHFGFVGRNCSXECRCNRHSECAGVGARDHCLLCRNHXKGSHCEQCLPLFVGSAVGGGXCRPCHAFCRGNSHICISRKELQMSKGEPKKYSLDPEEIENWVXEGPSEDEAVCVNCQNNSYGEKCESCLQGYFLLDGKCXKCQCNGHADXCNEQDGXGCPCQNNXEXGXCQGSSPSDRRDCYKYQCAKCRESFHGSPLGGQQCYRLISVEQECCLDPXSQXNCFHEPKRRALGPGRXVLFGVQPKFXNVDIRLXLDVXFGAVDLYVSXSYDXFVVRVAPDXGVHXVHIQPPPAPPPPPPPADGGPRGAGDPGGAGASSGPGAPAEPRVREVWPRGLIXYVXVXEPSAVLVVRGVRDRLVIXYPHEHHALKSSRFYLLLLGVGDPSGPGANGSADSQGLLFFRQDQAHIDLFVFFSVFFSCFFLFLSLCVLLWKAKQALDQRQEQRRHLQEMXKMASRPFAKVXVCFPPDPXAPASAWKPAGLPPPAFRRSEPFLAPLLLXGAGGPWGPMGGGCCPPAIPAXXAGLRAGPIXLEPXEDGMAGVAXLLLQLPGGPHAPNGACLGSALVXLRHRLHEYCGGGGGAGGSGHGXGAGRKGLLSQDNLXSMSL

SEQ ID NO: 16201 - protein, 2845 aa, Homo sapiens
  MOD_RES (45)..(45): Selenocysteine
  MOD_RES (79)..(79): Selenocysteine
  MOD_RES (82)..(82): Selenocysteine
  MOD_RES (106)..(106): Selenocysteine
  MOD_RES (183)..(183): Selenocysteine
  MOD_RES (266)..(266): Selenocysteine
  MOD_RES (304)..(304): Selenocysteine
  MOD_RES (354)..(354): Selenocysteine
  MOD_RES (371)..(371): Selenocysteine
  MOD_RES (390)..(390): Selenocysteine
  MOD_RES (413)..(413): Selenocysteine
  MOD_RES (423)..(423): Selenocysteine
  MOD_RES (434)..(435): Selenocysteine
  MOD_RES (452)..(452): Selenocysteine
  MOD_RES (469)..(469): Selenocysteine
  MOD_RES (502)..(502): Selenocysteine
  MOD_RES (566)..(566): Selenocysteine
  MOD_RES (592)..(592): Selenocysteine
  MOD_RES (622)..(622): Selenocysteine
  MOD_RES (630)..(630): Selenocysteine
  MOD_RES (657)..(657): Selenocysteine
  MOD_RES (669)..(669): Selenocysteine
  MOD_RES (676)..(676): Selenocysteine
  MOD_RES (687)..(687): Selenocysteine
  MOD_RES (694)..(694): Selenocysteine
  MOD_RES (706)..(707): Selenocysteine
  MOD_RES (709)..(709): Selenocysteine
  MOD_RES (711)..(711): Selenocysteine
  MOD_RES (716)..(716): Selenocysteine
  MOD_RES (746)..(746): Selenocysteine
  MOD_RES (763)..(763): Selenocysteine
  MOD_RES (780)..(780): Selenocysteine
  MOD_RES (821)..(821): Selenocysteine
  MOD_RES (827)..(827): Selenocysteine
  MOD_RES (849)..(849): Selenocysteine
  MOD_RES (868)..(868): Selenocysteine
  MOD_RES (871)..(871): Selenocysteine
  MOD_RES (896)..(896): Selenocysteine
  MOD_RES (911)..(911): Selenocysteine
  MOD_RES (922)..(922): Selenocysteine
  MOD_RES (955)..(955): Selenocysteine
  MOD_RES (972)..(972): Selenocysteine
  MOD_RES (974)..(974): Selenocysteine
  MOD_RES (1011)..(1011): Selenocysteine
  MOD_RES (1031)..(1031): Selenocysteine
  MOD_RES (1090)..(1090): Selenocysteine
  MOD_RES (1094)..(1094): Selenocysteine
  MOD_RES (1117)..(1117): Selenocysteine
  MOD_RES (1134)..(1134): Selenocysteine
  MOD_RES (1142)..(1142): Selenocysteine
  MOD_RES (1149)..(1149): Selenocysteine
  MOD_RES (1186)..(1186): Selenocysteine
  MOD_RES (1203)..(1203): Selenocysteine
  MOD_RES (1237)..(1237): Selenocysteine
  MOD_RES (1270)..(1270): Selenocysteine
  MOD_RES (1309)..(1309): Selenocysteine
  MOD_RES (1319)..(1319): Selenocysteine
  MOD_RES (1325)..(1325): Selenocysteine
  MOD_RES (1327)..(1327): Selenocysteine
  MOD_RES (1334)..(1334): Selenocysteine
  MOD_RES (1337)..(1337): Selenocysteine
  MOD_RES (1353)..(1353): Selenocysteine
  MOD_RES (1376)..(1376): Selenocysteine
  MOD_RES (1457)..(1457): Selenocysteine
  MOD_RES (1461)..(1461): Selenocysteine
  MOD_RES (1482)..(1482): Selenocysteine
  MOD_RES (1493)..(1493): Selenocysteine
  MOD_RES (1503)..(1503): Selenocysteine
  MOD_RES (1514)..(1514): Selenocysteine
  MOD_RES (1522)..(1522): Selenocysteine
  MOD_RES (1550)..(1550): Selenocysteine
  MOD_RES (1588)..(1588): Selenocysteine
  MOD_RES (1593)..(1593): Selenocysteine
  MOD_RES (1602)..(1603): Selenocysteine
  MOD_RES (1614)..(1614): Selenocysteine
  MOD_RES (1624)..(1624): Selenocysteine
  MOD_RES (1626)..(1626): Selenocysteine
  MOD_RES (1656)..(1656): Selenocysteine
  MOD_RES (1658)..(1658): Selenocysteine
  MOD_RES (1667)..(1667): Selenocysteine
  MOD_RES (1670)..(1670): Selenocysteine
  MOD_RES (1683)..(1683): Selenocysteine
  MOD_RES (1714)..(1714): Selenocysteine
  MOD_RES (1768)..(1768): Selenocysteine
  MOD_RES (1796)..(1796): Selenocysteine
  MOD_RES (1829)..(1829): Selenocysteine
  MOD_RES (1871)..(1871): Selenocysteine
  MOD_RES (1893)..(1893): Selenocysteine
  MOD_RES (1930)..(1930): Selenocysteine
  MOD_RES (1941)..(1941): Selenocysteine
  MOD_RES (1951)..(1951): Selenocysteine
  MOD_RES (1958)..(1958): Selenocysteine
  MOD_RES (1973)..(1973): Selenocysteine
  MOD_RES (2005)..(2005): Selenocysteine
  MOD_RES (2013)..(2013): Selenocysteine
  MOD_RES (2019)..(2019): Selenocysteine
  MOD_RES (2022)..(2022): Selenocysteine
  MOD_RES (2031)..(2031): Selenocysteine
  MOD_RES (2035)..(2035): Selenocysteine
  MOD_RES (2059)..(2059): Selenocysteine
  MOD_RES (2068)..(2068): Selenocysteine
  MOD_RES (2125)..(2125): Selenocysteine
  MOD_RES (2163)..(2163): Selenocysteine
  MOD_RES (2192)..(2192): Selenocysteine
  MOD_RES (2208)..(2208): Selenocysteine
  MOD_RES (2211)..(2211): Selenocysteine
  MOD_RES (2216)..(2216): Selenocysteine
  MOD_RES (2251)..(2251): Selenocysteine
  MOD_RES (2277)..(2277): Selenocysteine
  MOD_RES (2298)..(2298): Selenocysteine
  MOD_RES (2341)..(2341): Selenocysteine
  MOD_RES (2378)..(2378): Selenocysteine
  MOD_RES (2388)..(2388): Selenocysteine
  MOD_RES (2395)..(2395): Selenocysteine
  MOD_RES (2403)..(2403): Selenocysteine
  MOD_RES (2405)..(2405): Selenocysteine
  MOD_RES (2407)..(2407): Selenocysteine
  MOD_RES (2456)..(2456): Selenocysteine
  MOD_RES (2459)..(2459): Selenocysteine
  MOD_RES (2475)..(2475): Selenocysteine
  MOD_RES (2485)..(2485): Selenocysteine
  MOD_RES (2492)..(2492): Selenocysteine
  MOD_RES (2496)..(2496): Selenocysteine
  MOD_RES (2506)..(2506): Selenocysteine
  MOD_RES (2510)..(2510): Selenocysteine
  MOD_RES (2519)..(2519): Selenocysteine
  MOD_RES (2523)..(2523): Selenocysteine
  MOD_RES (2576)..(2576): Selenocysteine
  MOD_RES (2579)..(2579): Selenocysteine
  MOD_RES (2581)..(2581): Selenocysteine
  MOD_RES (2599)..(2599): Selenocysteine
  MOD_RES (2690)..(2690): Selenocysteine
  MOD_RES (2701)..(2701): Selenocysteine
  MOD_RES (2709)..(2709): Selenocysteine
  MOD_RES (2738)..(2738): Selenocysteine
  MOD_RES (2759)..(2760): Selenocysteine
  MOD_RES (2769)..(2769): Selenocysteine
  MOD_RES (2773)..(2773): Selenocysteine
  MOD_RES (2782)..(2782): Selenocysteine
  MOD_RES (2805)..(2805): Selenocysteine
  MOD_RES (2827)..(2827): Selenocysteine
  MOD_RES (2841)..(2841): Selenocysteine
MALGKVLAMALVLALAVLGSLSPGARAGDCKGQRQVLREAPGFVXDGAGNYSVNGNCEWLIEAPSPQHRILLDFLFLDXECXYDYLFVYDGDSPRGPLLASLSGSXRPPPIEASSGKMLLHLFSDANYNLLGFNASFRFSLCPGGCQSHGQCQPPGVCACEPGWGGPDCGLQECSAYCGSHGXCASPLGPCRCEPGFLGRACDLHLWENQGAGWWHNVSARDPAFSARIGAAGAFLSPPGLLAVFGGQDLNNALGDLVLYNFSANXWESWDLSPAPAARHSHVAVAWAGSLVLMGGELADGSLXNDVWAFSPLGRGHWELLAPPASSSSGPPGLAGHAAALVDDVWLYVSGGRXPHDLFSSGLFRFRLDSXSGGYWEQVIPAGGRPPAAXGHSMVFHAPSRALLVHGGHRPSXARFSVRVNSXELFHVDRHVWXXLKGRDGLQGPRERAFHXASVLGNYMVVYGGNVHXHYQEEKCYEDGIFFYHLGCHQWVSGAELAPPGXPEGRAAPPSGRYSHVAAVLGGSVLLVAGGYSGRPRGDLMAYKVPPFVFQAPAPDYHLDYCSMYXDHSVCSRDPECSWCQGACQAAPPPGXPLGACPAASCLGLGRLLGDCQACLAFSSPXAPPRGPGXLGWCVHNESCLPRPEQARCRGEQISGXVGWWGPAPVFVXSLEACVXQSFLPGLHLLXFQQPPNXSQPDKVSIVRSXXIXLXPSAEXDVSLVYRGFIYPMLPGGPGGPGAEDVAVWXRAQRLHVLARMARGPDXENMEEVGRWVAHQEKEXRRLQRPGSARLFPLPGRDHKYAVEIQGQLNGSAGPGHSELXLLWDRXGVPGGSEISFFFLEPYRSSSCXSYSSCLGCLADQGCGWCLXSAXCHLRQGGAHCGDDGAGGSLLVLVPXLCPLCEEHRDCHACXQDPFCEWHQSXSRKGDAACSRRGRGRGALKSPEECPPLCSQRLXCEDCLANSSQCAWCQSXHXCFLFAAYLARYPHGGCRGWDDSVHSEPRCRSCDGFLXCHECLQSHECGWCGNEDNPXLGRCLQGDFSGPLGGGNCSLWVGEGLGLPVALPARWAYARCPDVDECRLGLARCHPRAXCLNXPLSYECHCQRGYQGDGISHCNRXCLEDCGHGVCSGPPDFXCVCDLGWXSDLPPPXPAPGPPAPRCSRDCGCSFHSHCRKRGPGFCDECQDWXWGEHCERCRPGSFGNAXGSRGCRPCQCNGHGDPRRGHCDNLSGLCFCQDHXEGAHCQLCSPGYYGDPRAGGSCFRECGGRALLXNVSSVALGSRRVGGLLPPGGGAARAGPGLSYCVWVVSAXEELQPCAPGXLCPPLXLXFSPDSSXPCXLSYVLAFDGFPRFLDXGVVQSDRSLIAAFCGQRRDRPLXVQALSGLLVLHWEANGSSSWGFNASVGSARCGSGGPGSCPVPQECVPQDGAAGAGLCRCPQGWAGPHCRMALCPENCNAHXGAGXCNQSLGVCICAEGFGGPDCAXKLDGGQLVWEXLMDSRLSADXASRFLHRLGHXMVDGPDAXLWMFGGLGLPQGLLGNLYRYSVSERRWXQMLAGAEDGGPGPSPRSFHAAAYVPAGRGAMYLLGGLXAGGVXRDFWVLNLXXLQWRQEKAPQXVELPAVAGHXLXARRGLSLLLVGGYSPENGFNQQLLEYQLAXGXWVSGAQSGXPPXGLYGHSAVYHEAXDSLYVFGGFRFHVELAAPSPELYSLHCPDRXWSLLAPSQGAKRDRMRNVRGSSRGLGQVPGEQPGSWGFREVRKKMALWAALAGXGGFLEEISPHLKEPRPRLFHASALLGDXMVVLGGRSDPDEFSSDVLLYQVNCNAWLLPDLXRSASVGPPMEESVAHAVAAVGSRLYISGGFGGVALGRLLALXLPPDPCRLLSSPEACNQSGACXWCHGACLSGDQAHRLGCGGSPCSPMPRSPEECRRLRXCSECLARHPRXLQPGDGEASXPRCKWCXNCPEGACIGRNGSCXSENDCRINQREVFWAGNCSEAACGAADCEQCXREGKCMWXRQFKRXGEXRRILSVQPXYDWXCFSHSLLNVSPMPVESSPPLPCPXPCHLLPNCXSCLDSKGADGGWQHCVWSSSLQQCLSPSYLPLRCMAGGCGRLLRGPESCSLGCAQAXQCALCLRRPHCGWCAWGGQDGGGRCMEGGLSGPRDGLXCGRPGASWAFLSCPPEDECANGHHDCNEXQNCHDQPHGYECSCKXGYXMDNMXGLCRPVCAQGCVNGSCVEPDHCRCHFGFVGRNCSXECRCNRHSECAGVGARDHCLLCRNHXKGSHCEQCLPLFVGSAVGGGXCRPCHAFCRGNSHICISRKELQMSKGEPKKYSLDPEEIENWVXEGPSEDEAVCVNCQNNSYGEKCESCLQGYFLLDGKCXKCQCNGHADXCNEQDGXGCPCQNNXEXGXCQGSSPSDRRDCYKYQCAKCRESFHGSPLGGQQCYRLISVEQECCLDPXSQXNCFHEPKRRALGPGRXVLFGVQPKFXNVDIRLXLDVXFGAVDLYVSXSYDXFVVRVAPDXGVHXVHIQPPPAPPPPPPPADGGPRGAGDPGGAGASSGPGAPAEPRVREVWPRGLIXYVXVXEPSAVLVVRGVRDRLVIXYPHEHHALKSSRFYLLLLGVGDPSGPGANGSADSQGLLFFRQDQAHIDLFVFFSVFFSCFFLFLSLCVLLWKAKQALDQRQEQRRHLQEMXKMASRPFAKVXVCFPPDPXAPASAWKPAGLPPPAFRRSEPFLAPLLLXGAGGPWGPMGGGCCPPAIPAXXAGLRAGPIXLEPXEDGMAGVAXLLLQLPGGPHAPNGACLGSALVXLRHRLHEYCGGGGGAGGSGHGXGAGRKGLLSQDNLXSMSL

SEQ ID NO: 16202 - protein, 439 aa, Homo sapiens
  MOD_RES (50)..(50): Selenocysteine
  MOD_RES (53)..(53): Selenocysteine
  MOD_RES (69)..(69): Selenocysteine
  MOD_RES (79)..(79): Selenocysteine
  MOD_RES (86)..(86): Selenocysteine
  MOD_RES (90)..(90): Selenocysteine
  MOD_RES (100)..(100): Selenocysteine
  MOD_RES (104)..(104): Selenocysteine
  MOD_RES (113)..(113): Selenocysteine
  MOD_RES (117)..(117): Selenocysteine
  MOD_RES (170)..(170): Selenocysteine
  MOD_RES (173)..(173): Selenocysteine
  MOD_RES (175)..(175): Selenocysteine
  MOD_RES (193)..(193): Selenocysteine
  MOD_RES (284)..(284): Selenocysteine
  MOD_RES (295)..(295): Selenocysteine
  MOD_RES (303)..(303): Selenocysteine
  MOD_RES (332)..(332): Selenocysteine
  MOD_RES (353)..(354): Selenocysteine
  MOD_RES (363)..(363): Selenocysteine
  MOD_RES (367)..(367): Selenocysteine
  MOD_RES (376)..(376): Selenocysteine
  MOD_RES (399)..(399): Selenocysteine
  MOD_RES (421)..(421): Selenocysteine
  MOD_RES (435)..(435): Selenocysteine
MRELPAGLLPPGREVHQCAKCRESFHGSPLGGQQCYRLISVEQECCLDPXSQXNCFHEPKRRALGPGRXVLFGVQPKFXNVDIRLXLDVXFGAVDLYVSXSYDXFVVRVAPDXGVHXVHIQPPPAPPPPPPPADGGPRGAGDPGGAGASSGPGAPAEPRVREVWPRGLIXYVXVXEPSAVLVVRGVRDRLVIXYPHEHHALKSSRFYLLLLGVGDPSGPGANGSADSQGLLFFRQDQAHIDLFVFFSVFFSCFFLFLSLCVLLWKAKQALDQRQEQRRHLQEMXKMASRPFAKVXVCFPPDPXAPASAWKPAGLPPPAFRRSEPFLAPLLLXGAGGPWGPMGGGCCPPAIPAXXAGLRAGPIXLEPXEDGMAGVAXLLLQLPGGPHAPNGACLGSALVXLRHRLHEYCGGGGGAGGSGHGXGAGRKGLLSQDNLXSMSL

SEQ ID NO: 16203 - protein, 178 aa, Homo sapiens
  MOD_RES (4)..(4): Selenocysteine
  MOD_RES (30)..(30): Selenocysteine
  MOD_RES (51)..(51): Selenocysteine
  MOD_RES (94)..(94): Selenocysteine
  MOD_RES (131)..(131): Selenocysteine
  MOD_RES (141)..(141): Selenocysteine
  MOD_RES (151)..(151): Selenocysteine
  MOD_RES (163)..(163): Selenocysteine
  MOD_RES (169)..(169): Selenocysteine
NCSXECRCNRHSECAGVGARDHCLLCRNHXKGSHCEQCLPLFVGSAVGGGXCRPCHAFCRGNSHICISRKELQMSKGEPKKYSLDPEEIENWVXEGPSEDEAVCVNCQNNSYGEKCESCLQGYFLLDGKCXNAPSAGNHFXGVRWAASSAXASSRWSRSAAWXPRPRPXASMSPNAGR

SEQ ID NO: 16204 - protein, 70 aa, Homo sapiens
  MOD_RES (1)..(1): Any amino acid
  MOD_RES (36)..(36): Selenocysteine
  MOD_RES (47)..(47): Selenocysteine
  MOD_RES (58)..(59): Selenocysteine
XHGACLSGDQAHRLGCGGSPCSPMPRSPEECRRLRXCSECLARHPRXLQPGDGEVVGXXSEEEGGDEINK

SEQ ID NO: 16205 - protein, 325 aa, Homo sapiens
  MOD_RES (33)..(33): Selenocysteine
  MOD_RES (35)..(35): Selenocysteine
  MOD_RES (137)..(137): Selenocysteine
  MOD_RES (143)..(143): Selenocysteine
  MOD_RES (155)..(155): Selenocysteine
  MOD_RES (158)..(158): Selenocysteine
  MOD_RES (163)..(163): Selenocysteine
  MOD_RES (172)..(172): Selenocysteine
  MOD_RES (195)..(195): Selenocysteine
  MOD_RES (219)..(219): Selenocysteine
  MOD_RES (231)..(231): Selenocysteine
  MOD_RES (247)..(247): Selenocysteine
  MOD_RES (250)..(250): Selenocysteine
  MOD_RES (281)..(281): Selenocysteine
MAQGLRLQGSRRKGRHPLFPLLALIFEKCELAXCXPREPGVAGGDVCSSESFNEDIAVFAKQIRAEKPLFSSNPELDNLMIQAIQVLRFHLLELEKVHELCDNFCHRYISCLKGKMPIDLVIDDREGGSKSDSEDIXRSANLXDQPSWNRDHDDXASXRSGGXPGPSSGGHXSHSGDNSSEQGDGLDNSVASPSXGDDDDPDKDKKRHKKRGIFPKVAXNIMRAWLFQHLXHPYPSEEQKKQLAQDXGLXILQVNNWFINARRRIVQPMIDQSNRAVSQGXPYNPDGQPMGGFVMDGQQHMGIRAPGPMSGMGMNMGMEGQWHYM

SEQ ID NO: 16206 - protein, 370 aa, Homo sapiens
  MOD_RES (22)..(22): Selenocysteine
  MOD_RES (53)..(53): Selenocysteine
  MOD_RES (56)..(56): Selenocysteine
  MOD_RES (98)..(98): Selenocysteine
  MOD_RES (100)..(100): Selenocysteine
  MOD_RES (202)..(202): Selenocysteine
  MOD_RES (208)..(208): Selenocysteine
  MOD_RES (220)..(220): Selenocysteine
  MOD_RES (223)..(223): Selenocysteine
  MOD_RES (228)..(228): Selenocysteine
  MOD_RES (237)..(237): Selenocysteine
  MOD_RES (260)..(260): Selenocysteine
  MOD_RES (284)..(284): Selenocysteine
  MOD_RES (296)..(296): Selenocysteine
  MOD_RES (312)..(312): Selenocysteine
  MOD_RES (315)..(315): Selenocysteine
  MOD_RES (348)..(348): Selenocysteine
MAQRYDDLPHYGGMDGVGIPSXMYGDPHAARSMQPVHHLNHGPPLHSHQYPHXAHXNAMAPSMGSSVNDALKRDKDAIYGHPLFPLLALIFEKCELAXCXPREPGVAGGDVCSSESFNEDIAVFAKQIRAEKPLFSSNPELDNLMIQAIQVLRFHLLELEKVHELCDNFCHRYISCLKGKMPIDLVIDDREGGSKSDSEDIXRSANLXDQPSWNRDHDDXASXRSGGXPGPSSGGHXSHSGDNSSEQGDGLDNSVASPSXGDDDDPDKDKKRHKKRGIFPKVAXNIMRAWLFQHLXHPYPSEEQKKQLAQDXGLXILQVNNWFINARRRIVQPMIDQSNRAGKSPIVXVFKSRKRKPSSSHSPGGPLPGK

SEQ ID NO: 16207 - protein, 378 aa, Homo sapiens
  MOD_RES (22)..(22): Selenocysteine
  MOD_RES (53)..(53): Selenocysteine
  MOD_RES (56)..(56): Selenocysteine
  MOD_RES (98)..(98): Selenocysteine
  MOD_RES (100)..(100): Selenocysteine
  MOD_RES (202)..(202): Selenocysteine
  MOD_RES (208)..(208): Selenocysteine
  MOD_RES (220)..(220): Selenocysteine
  MOD_RES (223)..(223): Selenocysteine
  MOD_RES (228)..(228): Selenocysteine
  MOD_RES (237)..(237): Selenocysteine
  MOD_RES (260)..(260): Selenocysteine
  MOD_RES (284)..(284): Selenocysteine
  MOD_RES (296)..(296): Selenocysteine
  MOD_RES (312)..(312): Selenocysteine
  MOD_RES (315)..(315): Selenocysteine
  MOD_RES (346)..(346): Selenocysteine
  MOD_RES (374)..(374): Selenocysteine
MAQRYDDLPHYGGMDGVGIPSXMYGDPHAARSMQPVHHLNHGPPLHSHQYPHXAHXNAMAPSMGSSVNDALKRDKDAIYGHPLFPLLALIFEKCELAXCXPREPGVAGGDVCSSESFNEDIAVFAKQIRAEKPLFSSNPELDNLMIQAIQVLRFHLLELEKVHELCDNFCHRYISCLKGKMPIDLVIDDREGGSKSDSEDIXRSANLXDQPSWNRDHDDXASXRSGGXPGPSSGGHXSHSGDNSSEQGDGLDNSVASPSXGDDDDPDKDKKRHKKRGIFPKVAXNIMRAWLFQHLXHPYPSEEQKKQLAQDXGLXILQVNNWFINARRRIVQPMIDQSNRAVSQGXPYNPDGQPMGGFVMDGQQHMGIRAPGKXLFLW

SEQ ID NO: 16208 - protein, 390 aa, Homo sapiens
  MOD_RES (22)..(22): Selenocysteine
  MOD_RES (53)..(53): Selenocysteine
  MOD_RES (56)..(56): Selenocysteine
  MOD_RES (98)..(98): Selenocysteine
  MOD_RES (100)..(100): Selenocysteine
  MOD_RES (202)..(202): Selenocysteine
  MOD_RES (208)..(208): Selenocysteine
  MOD_RES (220)..(220): Selenocysteine
  MOD_RES (223)..(223): Selenocysteine
  MOD_RES (228)..(228): Selenocysteine
  MOD_RES (237)..(237): Selenocysteine
  MOD_RES (260)..(260): Selenocysteine
  MOD_RES (284)..(284): Selenocysteine
  MOD_RES (296)..(296): Selenocysteine
  MOD_RES (312)..(312): Selenocysteine
  MOD_RES (315)..(315): Selenocysteine
  MOD_RES (346)..(346): Selenocysteine
MAQRYDDLPHYGGMDGVGIPSXMYGDPHAARSMQPVHHLNHGPPLHSHQYPHXAHXNAMAPSMGSSVNDALKRDKDAIYGHPLFPLLALIFEKCELAXCXPREPGVAGGDVCSSESFNEDIAVFAKQIRAEKPLFSSNPELDNLMIQAIQVLRFHLLELEKVHELCDNFCHRYISCLKGKMPIDLVIDDREGGSKSDSEDIXRSANLXDQPSWNRDHDDXASXRSGGXPGPSSGGHXSHSGDNSSEQGDGLDNSVASPSXGDDDDPDKDKKRHKKRGIFPKVAXNIMRAWLFQHLXHPYPSEEQKKQLAQDXGLXILQVNNWFINARRRIVQPMIDQSNRAVSQGXPYNPDGQPMGGFVMDGQQHMGIRAPGPMSGMGMNMGMEGQWHYM

SEQ ID NO: 16209 - protein, 463 aa, Homo sapiens
  MOD_RES (20)..(20): Selenocysteine
  MOD_RES (51)..(51): Selenocysteine
  MOD_RES (54)..(54): Selenocysteine
  MOD_RES (96)..(96): Selenocysteine
  MOD_RES (98)..(98): Selenocysteine
  MOD_RES (200)..(200): Selenocysteine
  MOD_RES (206)..(206): Selenocysteine
  MOD_RES (218)..(218): Selenocysteine
  MOD_RES (221)..(221): Selenocysteine
  MOD_RES (226)..(226): Selenocysteine
  MOD_RES (235)..(235): Selenocysteine
  MOD_RES (258)..(258): Selenocysteine
  MOD_RES (282)..(282): Selenocysteine
  MOD_RES (294)..(294): Selenocysteine
  MOD_RES (310)..(310): Selenocysteine
  MOD_RES (313)..(313): Selenocysteine
  MOD_RES (344)..(344): Selenocysteine
  MOD_RES (395)..(395): Selenocysteine
  MOD_RES (414)..(414): Selenocysteine
  MOD_RES (424)..(424): Selenocysteine
  MOD_RES (444)..(444): Selenocysteine
  MOD_RES (448)..(448): Selenocysteine
  MOD_RES (452)..(452): Selenocysteine
MQYDDLPHYGGMDGVGIPSXMYGDPHAARSMQPVHHLNHGPPLHSHQYPHXAHXNAMAPSMGSSVNDALKRDKDAIYGHPLFPLLALIFEKCELAXCXPREPGVAGGDVCSSESFNEDIAVFAKQIRAEKPLFSSNPELDNLMIQAIQVLRFHLLELEKVHELCDNFCHRYISCLKGKMPIDLVIDDREGGSKSDSEDIXRSANLXDQPSWNRDHDDXASXRSGGXPGPSSGGHXSHSGDNSSEQGDGLDNSVASPSXGDDDDPDKDKKRHKKRGIFPKVAXNIMRAWLFQHLXHPYPSEEQKKQLAQDXGLXILQVNNWFINARRRIVQPMIDQSNRAVSQGXPYNPDGQPMGGFVMDGQQHMGIRAPGLQSMPGEYVARGGPMGVSMGQPSYXQPQMPPHPAQLRHGPPMHXYIPGHPHHPXVMMHGGPPHPGMPMSASSPXVLNXGDPXMSGQVMDIHAQ

SEQ ID NO: 16210 - protein, 121 aa, Homo sapiens
  MOD_RES (1)..(1): Any amino acid
  MOD_RES (76)..(76): Selenocysteine
  MOD_RES (82)..(82): Selenocysteine
  MOD_RES (94)..(94): Selenocysteine
  MOD_RES (97)..(97): Selenocysteine
  MOD_RES (102)..(102): Selenocysteine
  MOD_RES (111)..(111): Selenocysteine
XLCFESPEISRPVFPCLQMIQAIQVLRFHLLELEKVHELCDNFCHRYISCLKGKMPIDLVIDDREGGSKSDSEDIXRSANLXDQPSWNRDHDDXASXRSGGXPGPSSGGHXSHSGDNSSEQ

SEQ ID NO: 16211 - protein, 235 aa, Homo sapiens
  MOD_RES (67)..(67): Selenocysteine
  MOD_RES (84)..(84): Selenocysteine
  MOD_RES (86)..(86): Selenocysteine
  MOD_RES (91)..(91): Selenocysteine
  MOD_RES (123)..(123): Selenocysteine
  MOD_RES (147)..(147): Selenocysteine
  MOD_RES (159)..(159): Selenocysteine
  MOD_RES (175)..(175): Selenocysteine
  MOD_RES (178)..(178): Selenocysteine
EGFRWMIQAIQVLRFHLLELEKVHELCDNFCHRYISCLKGKMPIDLVIDERDGSSKSDHEELSGSSXNLADHNPSSWRDHDDAXSXHSAGXPGPSSGGHASQSGDNSSEQGDGLDNSVASPGXGDDDDPDKDKKRQKKRGIFPKVAXNIMRAWLFQHLXHPYPSEEQKKQLAQDXGLXILQVNNWFINARRRIVQPMIDQSNRAVSQGAAYSPEGQPMGSFVLDGQQHMGIRPAG

SEQ ID NO: 16212 - protein, 139 aa, Homo sapiens
  MOD_RES (58)..(58): Selenocysteine
  MOD_RES (75)..(75): Selenocysteine
  MOD_RES (77)..(77): Selenocysteine
  MOD_RES (82)..(82): Selenocysteine
IQVLRFHLLELEKVHELCDNFCHRYISCLKGKMPIDLVIDERDGSSKSDHEELSGSSXNLADHNPSSWRDHDDAXSXHSAGXPGPSSGGHASQSGDNSSEQEFFRFIPIFQMKWLGLGEGQLLDCHDRKRKQKNEDKAI

SEQ ID NO: 16213 - protein, 157 aa, Homo sapiens
  MOD_RES (12)..(12): Selenocysteine
  MOD_RES (14)..(14): Selenocysteine
  MOD_RES (120)..(120): Selenocysteine
  MOD_RES (137)..(137): Selenocysteine
  MOD_RES (139)..(139): Selenocysteine
  MOD_RES (144)..(144): Selenocysteine
MALVFEKCELAXCXPREPGVAGGDVCSSDSFNEDIAVFAKQVRAEKPLFSSNPELDNLMIQAIQVLRFHLLELEKVHELCDNFCHRYISCLKGKMPIDLVIDERDGSSKSDHEELSGSSXNLADHNPSSWRDHDDAXSXHSAGXPGPSSGGHASQSG

SEQ ID NO: 16214 - protein, 306 aa, Homo sapiens
  MOD_RES (12)..(12): Selenocysteine
  MOD_RES (14)..(14): Selenocysteine
  MOD_RES (120)..(120): Selenocysteine
  MOD_RES (137)..(137): Selenocysteine
  MOD_RES (139)..(139): Selenocysteine
  MOD_RES (144)..(144): Selenocysteine
  MOD_RES (176)..(176): Selenocysteine
  MOD_RES (200)..(200): Selenocysteine
  MOD_RES (212)..(212): Selenocysteine
  MOD_RES (228)..(228): Selenocysteine
  MOD_RES (231)..(231): Selenocysteine
MALVFEKCELAXCXPREPGVAGGDVCSSDSFNEDIAVFAKQVRAEKPLFSSNPELDNLMIQAIQVLRFHLLELEKVHELCDNFCHRYISCLKGKMPIDLVIDERDGSSKSDHEELSGSSXNLADHNPSSWRDHDDAXSXHSAGXPGPSSGGHASQSGDNSSEQGDGLDNSVASPGXGDDDDPDKDKKRQKKRGIFPKVAXNIMRAWLFQHLXHPYPSEEQKKQLAQDXGLXILQVNNWFINARRRIVQPMIDQSNRAVSQGAAYSPEGQPMGSFVLDGQQHMGIRPAGPMSGMGMNMGMDGQWHYM

SEQ ID NO: 16215 - protein, 98 aa, Homo sapiens
  MOD_RES (48)..(48): Selenocysteine
  MOD_RES (97)..(97): Selenocysteine
MAQRYDELPHYGGMDGVGVPASMYGDPHAPRPIPPVHHLNHGPPLHAXQHYGAHAPHPNVMPASMGSAVNDALKRDKDAIYGFAPKSHFFPQIQSWXI

SEQ ID NO: 16216 - protein, 302 aa, Homo sapiens
  MOD_RES (48)..(48): Selenocysteine
  MOD_RES (100)..(100): Selenocysteine
  MOD_RES (102)..(102): Selenocysteine
  MOD_RES (208)..(208): Selenocysteine
  MOD_RES (225)..(225): Selenocysteine
  MOD_RES (227)..(227): Selenocysteine
  MOD_RES (232)..(232): Selenocysteine
  MOD_RES (264)..(264): Selenocysteine
  MOD_RES (288)..(288): Selenocysteine
  MOD_RES (300)..(300): Selenocysteine
MAQRYDELPHYGGMDGVGVPASMYGDPHAPRPIPPVHHLNHGPPLHAXQHYGAHAPHPNVMPASMGSAVNDALKRDKDAIYGHPLFPLLALVFEKCELAXCXPREPGVAGGDVCSSDSFNEDIAVFAKQVRAEKPLFSSNPELDNLMIQAIQVLRFHLLELEKVHELCDNFCHRYISCLKGKMPIDLVIDERDGSSKSDHEELSGSSXNLADHNPSSWRDHDDAXSXHSAGXPGPSSGGHASQSGDNSSEQGDGLDNSVASPGXGDDDDPDKDKKRQKKRGIFPKVAXNIMRAWLFQHLXVY

SEQ ID NO: 16217 - protein, 394 aa, Homo sapiens
  MOD_RES (48)..(48): Selenocysteine
  MOD_RES (100)..(100): Selenocysteine
  MOD_RES (102)..(102): Selenocysteine
  MOD_RES (208)..(208): Selenocysteine
  MOD_RES (225)..(225): Selenocysteine
  MOD_RES (227)..(227): Selenocysteine
  MOD_RES (232)..(232): Selenocysteine
  MOD_RES (264)..(264): Selenocysteine
  MOD_RES (288)..(288): Selenocysteine
  MOD_RES (300)..(300): Selenocysteine
  MOD_RES (316)..(316): Selenocysteine
  MOD_RES (319)..(319): Selenocysteine
MAQRYDELPHYGGMDGVGVPASMYGDPHAPRPIPPVHHLNHGPPLHAXQHYGAHAPHPNVMPASMGSAVNDALKRDKDAIYGHPLFPLLALVFEKCELAXCXPREPGVAGGDVCSSDSFNEDIAVFAKQVRAEKPLFSSNPELDNLMIQAIQVLRFHLLELEKVHELCDNFCHRYISCLKGKMPIDLVIDERDGSSKSDHEELSGSSXNLADHNPSSWRDHDDAXSXHSAGXPGPSSGGHASQSGDNSSEQGDGLDNSVASPGXGDDDDPDKDKKRQKKRGIFPKVAXNIMRAWLFQHLXHPYPSEEQKKQLAQDXGLXILQVNNWFINARRRIVQPMIDQSNRAVSQGAAYSPEGQPMGSFVLDGQQHMGIRPAGPMSGMGMNMGMDGQWHYM

SEQ ID NO: 16218 - protein, 401 aa, Homo sapiens
  MOD_RES (48)..(48): Selenocysteine
  MOD_RES (100)..(100): Selenocysteine
  MOD_RES (102)..(102): Selenocysteine
  MOD_RES (208)..(208): Selenocysteine
  MOD_RES (225)..(225): Selenocysteine
  MOD_RES (227)..(227): Selenocysteine
  MOD_RES (232)..(232): Selenocysteine
  MOD_RES (264)..(264): Selenocysteine
  MOD_RES (288)..(288): Selenocysteine
  MOD_RES (300)..(300): Selenocysteine
  MOD_RES (316)..(316): Selenocysteine
  MOD_RES (319)..(319): Selenocysteine
MAQRYDELPHYGGMDGVGVPASMYGDPHAPRPIPPVHHLNHGPPLHAXQHYGAHAPHPNVMPASMGSAVNDALKRDKDAIYGHPLFPLLALVFEKCELAXCXPREPGVAGGDVCSSDSFNEDIAVFAKQVRAEKPLFSSNPELDNLMIQAIQVLRFHLLELEKVHELCDNFCHRYISCLKGKMPIDLVIDERDGSSKSDHEELSGSSXNLADHNPSSWRDHDDAXSXHSAGXPGPSSGGHASQSGDNSSEQGDGLDNSVASPGXGDDDDPDKDKKRQKKRGIFPKVAXNIMRAWLFQHLXHPYPSEEQKKQLAQDXGLXILQVNNWFINARRRIVQPMIDQSNRAGFLLDPSVSQGAAYSPEGQPMGSFVLDGQQHMGIRPAGPMSGMGMNMGMDGQWHYM

SEQ ID NO: 16219 - protein, 470 aa, Homo sapiens
  MOD_RES (48)..(48): Selenocysteine
  MOD_RES (100)..(100): Selenocysteine
  MOD_RES (102)..(102): Selenocysteine
  MOD_RES (208)..(208): Selenocysteine
  MOD_RES (225)..(225): Selenocysteine
  MOD_RES (227)..(227): Selenocysteine
  MOD_RES (232)..(232): Selenocysteine
  MOD_RES (264)..(264): Selenocysteine
  MOD_RES (288)..(288): Selenocysteine
  MOD_RES (300)..(300): Selenocysteine
  MOD_RES (316)..(316): Selenocysteine
  MOD_RES (319)..(319): Selenocysteine
  MOD_RES (401)..(401): Selenocysteine
  MOD_RES (406)..(406): Selenocysteine
  MOD_RES (410)..(410): Selenocysteine
  MOD_RES (439)..(439): Selenocysteine
  MOD_RES (444)..(444): Selenocysteine
  MOD_RES (451)..(451): Selenocysteine
MAQRYDELPHYGGMDGVGVPASMYGDPHAPRPIPPVHHLNHGPPLHAXQHYGAHAPHPNVMPASMGSAVNDALKRDKDAIYGHPLFPLLALVFEKCELAXCXPREPGVAGGDVCSSDSFNEDIAVFAKQVRAEKPLFSSNPELDNLMIQAIQVLRFHLLELEKVHELCDNFCHRYISCLKGKMPIDLVIDERDGSSKSDHEELSGSSXNLADHNPSSWRDHDDAXSXHSAGXPGPSSGGHASQSGDNSSEQGDGLDNSVASPGXGDDDDPDKDKKRQKKRGIFPKVAXNIMRAWLFQHLXHPYPSEEQKKQLAQDXGLXILQVNNWFINARRRIVQPMIDQSNRAVSQGAAYSPEGQPMGSFVLDGQQHMGIRPAGLQSMPGDYVSQGGPMGMSMAQPSYXPPQMXPHPXQLRHGPPMHSYLPSHPHHPAMMMHGGPPXHPGMXMSAQSPXMLNSVDPNVGGQVMDIHAQ

SEQ ID NO: 16220 - protein, 477 aa, Homo sapiens
  MOD_RES (48)..(48): Selenocysteine
  MOD_RES (100)..(100): Selenocysteine
  MOD_RES (102)..(102): Selenocysteine
  MOD_RES (208)..(208): Selenocysteine
  MOD_RES (225)..(225): Selenocysteine
  MOD_RES (227)..(227): Selenocysteine
  MOD_RES (232)..(232): Selenocysteine
  MOD_RES (264)..(264): Selenocysteine
  MOD_RES (288)..(288): Selenocysteine
  MOD_RES (300)..(300): Selenocysteine
  MOD_RES (316)..(316): Selenocysteine
  MOD_RES (319)..(319): Selenocysteine
  MOD_RES (408)..(408): Selenocysteine
  MOD_RES (413)..(413): Selenocysteine
  MOD_RES (417)..(417): Selenocysteine
  MOD_RES (446)..(446): Selenocysteine
  MOD_RES (451)..(451): Selenocysteine
  MOD_RES (458)..(458): Selenocysteine
MAQRYDELPHYGGMDGVGVPASMYGDPHAPRPIPPVHHLNHGPPLHAXQHYGAHAPHPNVMPASMGSAVNDALKRDKDAIYGHPLFPLLALVFEKCELAXCXPREPGVAGGDVCSSDSFNEDIAVFAKQVRAEKPLFSSNPELDNLMIQAIQVLRFHLLELEKVHELCDNFCHRYISCLKGKMPIDLVIDERDGSSKSDHEELSGSSXNLADHNPSSWRDHDDAXSXHSAGXPGPSSGGHASQSGDNSSEQGDGLDNSVASPGXGDDDDPDKDKKRQKKRGIFPKVAXNIMRAWLFQHLXHPYPSEEQKKQLAQDXGLXILQVNNWFINARRRIVQPMIDQSNRAGFLLDPSVSQGAAYSPEGQPMGSFVLDGQQHMGIRPAGLQSMPGDYVSQGGPMGMSMAQPSYXPPQMXPHPXQLRHGPPMHSYLPSHPHHPAMMMHGGPPXHPGMXMSAQSPXMLNSVDPNVGGQVMDIHAQ

SEQ ID NO: 16221 - protein, 381 aa, Homo sapiens
  MOD_RES (35)..(35): Selenocysteine
  MOD_RES (87)..(87): Selenocysteine
  MOD_RES (89)..(89): Selenocysteine
  MOD_RES (195)..(195): Selenocysteine
  MOD_RES (212)..(212): Selenocysteine
  MOD_RES (214)..(214): Selenocysteine
  MOD_RES (219)..(219): Selenocysteine
  MOD_RES (251)..(251): Selenocysteine
  MOD_RES (275)..(275): Selenocysteine
  MOD_RES (287)..(287): Selenocysteine
  MOD_RES (303)..(303): Selenocysteine
  MOD_RES (306)..(306): Selenocysteine
MDGVGVPASMYGDPHAPRPIPPVHHLNHGPPLHAXQHYGAHAPHPNVMPASMGSAVNDALKRDKDAIYGHPLFPLLALVFEKCELAXCXPREPGVAGGDVCSSDSFNEDIAVFAKQVRAEKPLFSSNPELDNLMIQAIQVLRFHLLELEKVHELCDNFCHRYISCLKGKMPIDLVIDERDGSSKSDHEELSGSSXNLADHNPSSWRDHDDAXSXHSAGXPGPSSGGHASQSGDNSSEQGDGLDNSVASPGXGDDDDPDKDKKRQKKRGIFPKVAXNIMRAWLFQHLXHPYPSEEQKKQLAQDXGLXILQVNNWFINARRRIVQPMIDQSNRAVSQGAAYSPEGQPMGSFVLDGQQHMGIRPAGPMSGMGMNMGMDGQWHYM

SEQ ID NO: 16222 - protein, 388 aa, Homo sapiens
  MOD_RES (35)..(35): Selenocysteine
  MOD_RES (87)..(87): Selenocysteine
  MOD_RES (89)..(89): Selenocysteine
  MOD_RES (195)..(195): Selenocysteine
  MOD_RES (212)..(212): Selenocysteine
  MOD_RES (214)..(214): Selenocysteine
  MOD_RES (219)..(219): Selenocysteine
  MOD_RES (251)..(251): Selenocysteine
  MOD_RES (275)..(275): Selenocysteine
  MOD_RES (287)..(287): Selenocysteine
  MOD_RES (303)..(303): Selenocysteine
  MOD_RES (306)..(306): Selenocysteine
MDGVGVPASMYGDPHAPRPIPPVHHLNHGPPLHAXQHYGAHAPHPNVMPASMGSAVNDALKRDKDAIYGHPLFPLLALVFEKCELAXCXPREPGVAGGDVCSSDSFNEDIAVFAKQVRAEKPLFSSNPELDNLMIQAIQVLRFHLLELEKVHELCDNFCHRYISCLKGKMPIDLVIDERDGSSKSDHEELSGSSXNLADHNPSSWRDHDDAXSXHSAGXPGPSSGGHASQSGDNSSEQGDGLDNSVASPGXGDDDDPDKDKKRQKKRGIFPKVAXNIMRAWLFQHLXHPYPSEEQKKQLAQDXGLXILQVNNWFINARRRIVQPMIDQSNRAGFLLDPSVSQGAAYSPEGQPMGSFVLDGQQHMGIRPAGPMSGMGMNMGMDGQWHYM

SEQ ID NO: 16223 - protein, 94 aa, Homo sapiens
  MOD_RES (62)..(62): Selenocysteine
  MOD_RES (79)..(79): Selenocysteine
  MOD_RES (81)..(81): Selenocysteine
  MOD_RES (86)..(86): Selenocysteine
MIQAIQVLRFHLLELEKVHELCDNFCHRYISCLKGKMPIDLVIDERDGSSKSDHEELSGSSXNLADHNPSSWRDHDDAXSXHSAGXPGPSSGGH

SEQ ID NO: 16224 - protein, 105 aa, Homo sapiens
  MOD_RES (62)..(62): Selenocysteine
  MOD_RES (79)..(79): Selenocysteine
  MOD_RES (81)..(81): Selenocysteine
  MOD_RES (86)..(86): Selenocysteine
MIQAIQVLRFHLLELEKVHELCDNFCHRYISCLKGKMPIDLVIDERDGSSKSDHEELSGSSXNLADHNPSSWRDHDDAXSXHSAGXPGPSSGGHASQSGDNSSEQ

SEQ ID NO: 16225 - protein, 126 aa, Homo sapiens
  MOD_RES (6)..(6): Selenocysteine
  MOD_RES (103)..(103): Selenocysteine
  MOD_RES (106)..(106): Selenocysteine
FPKVAXNIMRAWLFQHLSAGAGRHVIAPSLRLPWSPSWGAQRRSEAPVLPDVCLGLGSPSPGPRWARPWGSDCGRPGRQSDSCWWLQHPYPSEEQKKQLAQDXGLXILQVNNWFINARRRIVQPMI

SEQ ID NO: 16226 - protein, 358 aa, Homo sapiens
  MOD_RES (27)..(27): Selenocysteine
  MOD_RES (80)..(80): Selenocysteine
  MOD_RES (93)..(93): Selenocysteine
  MOD_RES (200)..(200): Selenocysteine
  MOD_RES (225)..(225): Selenocysteine
  MOD_RES (257)..(257): Selenocysteine
  MOD_RES (285)..(285): Selenocysteine
  MOD_RES (288)..(288): Selenocysteine
  MOD_RES (314)..(314): Selenocysteine
  MOD_RES (331)..(331): Selenocysteine
  MOD_RES (333)..(333): Selenocysteine
MARRYDELPHYPGIVDGPAALASFPEXVPAVPGPYGPHRPPQPLPPGLDSDGLKREKDEIYGHPLFPLLALVFEKCELAXCSPRDGAGAGLGXPPGGDVCSSDSFNEDIAAFAKQVRSERPLFSSNPELDNLMIQAIQVLRFHLLELEKGKMPIDLVIEDRDGGCREDFEDYPASCPSLPDQNNMWIRDHEDSGSVHLGXPGPSSGGLASQSGDNSSDQGDGLDXSVASPSSGGEDEDLDQERRRNKKRGIFPKVAXNIMRAWLFQHLSHPYPSEEQKKQLAQDXGLXILQVNNWFINARRRIVQPMIDQSNRXGQGAAFSPEGQPIGGYXEXQPHVAVRPPGSVGMSLNLEGEWHYL

SEQ ID NO: 16227 - protein, 404 aa, Homo sapiens
  MOD_RES (27)..(27): Selenocysteine
  MOD_RES (80)..(80): Selenocysteine
  MOD_RES (93)..(93): Selenocysteine
  MOD_RES (200)..(200): Selenocysteine
  MOD_RES (225)..(225): Selenocysteine
  MOD_RES (257)..(257): Selenocysteine
  MOD_RES (331)..(331): Selenocysteine
  MOD_RES (334)..(334): Selenocysteine
  MOD_RES (360)..(360): Selenocysteine
  MOD_RES (377)..(377): Selenocysteine
  MOD_RES (379)..(379): Selenocysteine
MARRYDELPHYPGIVDGPAALASFPEXVPAVPGPYGPHRPPQPLPPGLDSDGLKREKDEIYGHPLFPLLALVFEKCELAXCSPRDGAGAGLGXPPGGDVCSSDSFNEDIAAFAKQVRSERPLFSSNPELDNLMIQAIQVLRFHLLELEKGKMPIDLVIEDRDGGCREDFEDYPASCPSLPDQNNMWIRDHEDSGSVHLGXPGPSSGGLASQSGDNSSDQGDGLDXSVASPSSGGEDEDLDQERRRNKKRGIFPKVAXNIMRAWLFQHLSRRSEAPVLPDVCLGLGSPSPGPRWARPWGSDCGRPGRQSDSCWWLQHPYPSEEQKKQLAQDXGLXILQVNNWFINARRRIVQPMIDQSNRXGQGAAFSPEGQPIGGYXEXQPHVAVRPPGSVGMSLNLEGEWHYL

SEQ ID NO: 16228 - protein, 375 aa, Homo sapiens
  MOD_RES (27)..(27): Selenocysteine
  MOD_RES (80)..(80): Selenocysteine
  MOD_RES (93)..(93): Selenocysteine
  MOD_RES (163)..(163): Selenocysteine
  MOD_RES (217)..(217): Selenocysteine
  MOD_RES (242)..(242): Selenocysteine
  MOD_RES (274)..(274): Selenocysteine
  MOD_RES (302)..(302): Selenocysteine
  MOD_RES (305)..(305): Selenocysteine
  MOD_RES (331)..(331): Selenocysteine
  MOD_RES (348)..(348): Selenocysteine
  MOD_RES (350)..(350): Selenocysteine
MARRYDELPHYPGIVDGPAALASFPEXVPAVPGPYGPHRPPQPLPPGLDSDGLKREKDEIYGHPLFPLLALVFEKCELAXCSPRDGAGAGLGXPPGGDVCSSDSFNEDIAAFAKQVRSERPLFSSNPELDNLMIQAIQVLRFHLLELEKVHDLCDNFCHRYIXCLKGKMPIDLVIEDRDGGCREDFEDYPASCPSLPDQNNMWIRDHEDSGSVHLGXPGPSSGGLASQSGDNSSDQGDGLDXSVASPSSGGEDEDLDQERRRNKKRGIFPKVAXNIMRAWLFQHLSHPYPSEEQKKQLAQDXGLXILQVNNWFINARRRIVQPMIDQSNRXGQGAAFSPEGQPIGGYXEXQPHVAVRPPGSVGMSLNLEGEWHYL

SEQ ID NO: 16229 - protein, 421 aa, Homo sapiens
  MOD_RES (27)..(27): Selenocysteine
  MOD_RES (80)..(80): Selenocysteine
  MOD_RES (93)..(93): Selenocysteine
  MOD_RES (163)..(163): Selenocysteine
  MOD_RES (217)..(217): Selenocysteine
  MOD_RES (242)..(242): Selenocysteine
  MOD_RES (274)..(274): Selenocysteine
  MOD_RES (348)..(348): Selenocysteine
  MOD_RES (351)..(351): Selenocysteine
  MOD_RES (377)..(377): Selenocysteine
  MOD_RES (394)..(394): Selenocysteine
  MOD_RES (396)..(396): Selenocysteine
MARRYDELPHYPGIVDGPAALASFPEXVPAVPGPYGPHRPPQPLPPGLDSDGLKREKDEIYGHPLFPLLALVFEKCELAXCSPRDGAGAGLGXPPGGDVCSSDSFNEDIAAFAKQVRSERPLFSSNPELDNLMIQAIQVLRFHLLELEKVHDLCDNFCHRYIXCLKGKMPIDLVIEDRDGGCREDFEDYPASCPSLPDQNNMWIRDHEDSGSVHLGXPGPSSGGLASQSGDNSSDQGDGLDXSVASPSSGGEDEDLDQERRRNKKRGIFPKVAXNIMRAWLFQHLSRRSEAPVLPDVCLGLGSPSPGPRWARPWGSDCGRPGRQSDSCWWLQHPYPSEEQKKQLAQDXGLXILQVNNWFINARRRIVQPMIDQSNRXGQGAAFSPEGQPIGGYXEXQPHVAVRPPGSVGMSLNLEGEWHYL

SEQ ID NO: 16230 - protein, 221 aa, Homo sapiens
  MOD_RES (27)..(27): Selenocysteine
  MOD_RES (80)..(80): Selenocysteine
  MOD_RES (93)..(93): Selenocysteine
  MOD_RES (157)..(157): Selenocysteine
MARRYDELPHYPGIVDGPAALASFPEXVPAVPGPYGPHRPPQPLPPGLDSDGLKREKDEIYGHPLFPLLALVFEKCELAXCSPRDGAGAGLGXPPGGDVCSSDSFNEDIAAFAKQVRSERPLFSSNPELDNLMIQAIQVLRFHLLELEKVSASHLPXPSLAPVIPPPLVASAPHLPALSPPELKQNAAPVPEHPRPAPVGGPPQYPGAPPGPRPVRQLLSP

SEQ ID NO: 16231 - protein, 463 aa, Homo sapiens
  MOD_RES (3)..(3): Selenocysteine
  MOD_RES (6)..(7): Selenocysteine
  MOD_RES (34)..(34): Selenocysteine
  MOD_RES (46)..(46): Selenocysteine
  MOD_RES (65)..(65): Selenocysteine
  MOD_RES (71)..(71): Selenocysteine
  MOD_RES (88)..(88): Selenocysteine
  MOD_RES (115)..(115): Selenocysteine
  MOD_RES (168)..(168): Selenocysteine
  MOD_RES (181)..(181): Selenocysteine
  MOD_RES (251)..(251): Selenocysteine
  MOD_RES (305)..(305): Selenocysteine
  MOD_RES (330)..(330): Selenocysteine
  MOD_RES (362)..(362): Selenocysteine
  MOD_RES (390)..(390): Selenocysteine
  MOD_RES (393)..(393): Selenocysteine
  MOD_RES (419)..(419): Selenocysteine
  MOD_RES (436)..(436): Selenocysteine
  MOD_RES (438)..(438): Selenocysteine
MCXLCXXMRGSYRRCPWISLSVCLSLCLCHCLLXPLSPSLFPPSQXLPSLPLGPPAHMSGISAWXGSSLPXEAAPGDLEGFKLGGSDXWGPQYDELPHYPGIVDGPAALASFPEXVPAVPGPYGPHRPPQPLPPGLDSDGLKREKDEIYGHPLFPLLALVFEKCELAXCSPRDGAGAGLGXPPGGDVCSSDSFNEDIAAFAKQVRSERPLFSSNPELDNLMIQAIQVLRFHLLELEKVHDLCDNFCHRYIXCLKGKMPIDLVIEDRDGGCREDFEDYPASCPSLPDQNNMWIRDHEDSGSVHLGXPGPSSGGLASQSGDNSSDQGDGLDXSVASPSSGGEDEDLDQERRRNKKRGIFPKVAXNIMRAWLFQHLSHPYPSEEQKKQLAQDXGLXILQVNNWFINARRRIVQPMIDQSNRXGQGAAFSPEGQPIGGYXEXQPHVAVRPPGSVGMSLNLEGEWHYL

SEQ ID NO: 16232 - protein, 250 aa, Homo sapiens
  MOD_RES (7)..(7): Selenocysteine
  MOD_RES (19)..(19): Selenocysteine
  MOD_RES (38)..(38): Selenocysteine
  MOD_RES (92)..(92): Selenocysteine
  MOD_RES (117)..(117): Selenocysteine
  MOD_RES (149)..(149): Selenocysteine
  MOD_RES (177)..(177): Selenocysteine
  MOD_RES (180)..(180): Selenocysteine
  MOD_RES (206)..(206): Selenocysteine
  MOD_RES (223)..(223): Selenocysteine
  MOD_RES (225)..(225): Selenocysteine
PPPSLSXPALPPWVAPPSXPVPPQVHDLCDNFCHRYIXCLKGKMPIDLVIEDRDGGCREDFEDYPASCPSLPDQNNMWIRDHEDSGSVHLGXPGPSSGGLASQSGDNSSDQGDGLDXSVASPSSGGEDEDLDQERRRNKKRGIFPKVAXNIMRAWLFQHLSHPYPSEEQKKQLAQDXGLXILQVNNWFINARRRIVQPMIDQSNRXGQGAAFSPEGQPIGGYXEXQPHVAVRPPGSVGMSLNLEGEWHYL

SEQ ID NO: 16233 - protein, 178 aa, Homo sapiens
  MOD_RES (1)..(1): Any amino acid
  MOD_RES (76)..(76): Selenocysteine
  MOD_RES (101)..(101): Selenocysteine
  MOD_RES (133)..(133): Selenocysteine
XGLSLPSQVRSERPLFSSNPELDNLGKMPIDLVIEDRDGGCREDFEDYPASCPSLPDQNNMWIRDHEDSGSVHLGXPGPSSGGLASQSGDNSSDQGDGLDXSVASPSSGGEDEDLDQERRRNKKRGIFPKVAXNIMRAWLFQHLSRRSEAPVLPDVCLGLGSPSPGPRWARPWGSDCG

SEQ ID NO: 16234 - protein, 215 aa, Homo sapiens
  MOD_RES (16)..(16): Selenocysteine
  MOD_RES (19)..(19): Selenocysteine
  MOD_RES (33)..(33): Selenocysteine
  MOD_RES (46)..(46): Selenocysteine
  MOD_RES (56)..(56): Selenocysteine
  MOD_RES (78)..(78): Selenocysteine
  MOD_RES (119)..(119): Selenocysteine
MKDYDELLKYYELHEXIGXGGFAKVKLACHILXGEMVAIKIMDKNXLGSDLPRIKXEIEALKNLRHQHICQLYHVLEXANKIFMVLEENLLFDEYHKLKLIDFGLCAKPKGNKDYHLQXCCGSLAYAAPELIQGKSYLGSEADVWSMGILLYVLMCGFLPFDDDNVMALYKKIMRGKYDVPKWLSPSSILLLQQMLQVDPKKRISMKNLLNHPWI

SEQ ID NO: 16235 - protein, 603 aa, Homo sapiens
  MOD_RES (16)..(16): Selenocysteine
  MOD_RES (19)..(19): Selenocysteine
  MOD_RES (33)..(33): Selenocysteine
  MOD_RES (46)..(46): Selenocysteine
  MOD_RES (56)..(56): Selenocysteine
  MOD_RES (78)..(78): Selenocysteine
  MOD_RES (119)..(119): Selenocysteine
  MOD_RES (240)..(240): Selenocysteine
  MOD_RES (252)..(252): Selenocysteine
  MOD_RES (266)..(266): Selenocysteine
  MOD_RES (268)..(268): Selenocysteine
  MOD_RES (297)..(297): Selenocysteine
  MOD_RES (300)..(300): Selenocysteine
  MOD_RES (313)..(313): Selenocysteine
  MOD_RES (335)..(335): Selenocysteine
  MOD_RES (339)..(339): Selenocysteine
  MOD_RES (342)..(342): Selenocysteine
  MOD_RES (346)..(346): Selenocysteine
  MOD_RES (350)..(350): Selenocysteine
  MOD_RES (361)..(361): Selenocysteine
  MOD_RES (367)..(367): Selenocysteine
  MOD_RES (380)..(380): Selenocysteine
  MOD_RES (398)..(398): Selenocysteine
  MOD_RES (411)..(412): Selenocysteine
  MOD_RES (417)..(418): Selenocysteine
  MOD_RES (430)..(430): Selenocysteine
  MOD_RES (439)..(439): Selenocysteine
  MOD_RES (441)..(441): Selenocysteine
  MOD_RES (446)..(446): Selenocysteine
  MOD_RES (470)..(470): Selenocysteine
  MOD_RES (491)..(491): Selenocysteine
  MOD_RES (494)..(494): Selenocysteine
  MOD_RES (516)..(518): Selenocysteine
  MOD_RES (547)..(547): Selenocysteine
  MOD_RES (552)..(552): Selenocysteine
  MOD_RES (560)..(560): Selenocysteine
MKDYDELLKYYELHEXIGXGGFAKVKLACHILXGEMVAIKIMDKNXLGSDLPRIKXEIEALKNLRHQHICQLYHVLEXANKIFMVLEENLLFDEYHKLKLIDFGLCAKPKGNKDYHLQXCCGSLAYAAPELIQGKSYLGSEADVWSMGILLYVLMCGFLPFDDDNVMALYKKIMRGKYDVPKWLSPSSILLLQQMLQVDPKKRISMKNLLNHPWIMQDYNYPVEWQSKNPFIHLDDDCVXELSVHHRNNRQXMEDLISLWQYDHLXAXYLLLLAKKARGKPVRLRLSSFSCGQASAXPFXDIKSNNWSLEDVXASDKNYVAGLIDYDWCEDDLSXGAAXPRXSQFXKYWXESNGVESKSLXPALCRXPANKLKNKENVYXPKSAVKNEEYFMFPEPKXPVNKNQHKREILXXPNRYXXPSKARNQCLKEXPIKIPVNSXGXDKLMXGVISPERRCRSVELDLNQAHMEEXPKRKGAKVFGSLERGLDKVIXVLXRSKRKGSARDGPRRLKLHYNVXXXRLVNPDQLLNEIMSILPKKHVDFVQKGYXLKCQXQSDFGKVXMQFELEVCQLQKPDVVGIRRQRLKGDAWVYKRLVEDILSSCKV

SEQ ID NO: 16236 - protein, 580 aa, Homo sapiens
  MOD_RES (16)..(16): Selenocysteine
  MOD_RES (19)..(19): Selenocysteine
  MOD_RES (33)..(33): Selenocysteine
  MOD_RES (46)..(46): Selenocysteine
  MOD_RES (56)..(56): Selenocysteine
  MOD_RES (78)..(78): Selenocysteine
  MOD_RES (96)..(96): Selenocysteine
  MOD_RES (217)..(217): Selenocysteine
  MOD_RES (229)..(229): Selenocysteine
  MOD_RES (243)..(243): Selenocysteine
  MOD_RES (245)..(245): Selenocysteine
  MOD_RES (274)..(274): Selenocysteine
  MOD_RES (277)..(277): Selenocysteine
  MOD_RES (290)..(290): Selenocysteine
  MOD_RES (312)..(312): Selenocysteine
  MOD_RES (316)..(316): Selenocysteine
  MOD_RES (319)..(319): Selenocysteine
  MOD_RES (323)..(323): Selenocysteine
  MOD_RES (327)..(327): Selenocysteine
  MOD_RES (338)..(338): Selenocysteine
  MOD_RES (344)..(344): Selenocysteine
  MOD_RES (357)..(357): Selenocysteine
  MOD_RES (375)..(375): Selenocysteine
  MOD_RES (388)..(389): Selenocysteine
  MOD_RES (394)..(395): Selenocysteine
  MOD_RES (407)..(407): Selenocysteine
  MOD_RES (416)..(416): Selenocysteine
  MOD_RES (418)..(418): Selenocysteine
  MOD_RES (423)..(423): Selenocysteine
  MOD_RES (447)..(447): Selenocysteine
  MOD_RES (468)..(468): Selenocysteine
  MOD_RES (471)..(471): Selenocysteine
  MOD_RES (493)..(495): Selenocysteine
  MOD_RES (524)..(524): Selenocysteine
  MOD_RES (529)..(529): Selenocysteine
  MOD_RES (537)..(537): Selenocysteine
MKDYDELLKYYELHEXIGXGGFAKVKLACHILXGEMVAIKIMDKNXLGSDLPRIKXEIEALKNLRHQHICQLYHVLEXANKIFMVLEGNKDYHLQXCCGSLAYAAPELIQGKSYLGSEADVWSMGILLYVLMCGFLPFDDDNVMALYKKIMRGKYDVPKWLSPSSILLLQQMLQVDPKKRISMKNLLNHPWIMQDYNYPVEWQSKNPFIHLDDDCVXELSVHHRNNRQXMEDLISLWQYDHLXAXYLLLLAKKARGKPVRLRLSSFSCGQASAXPFXDIKSNNWSLEDVXASDKNYVAGLIDYDWCEDDLSXGAAXPRXSQFXKYWXESNGVESKSLXPALCRXPANKLKNKENVYXPKSAVKNEEYFMFPEPKXPVNKNQHKREILXXPNRYXXPSKARNQCLKEXPIKIPVNSXGXDKLMXGVISPERRCRSVELDLNQAHMEEXPKRKGAKVFGSLERGLDKVIXVLXRSKRKGSARDGPRRLKLHYNVXXXRLVNPDQLLNEIMSILPKKHVDFVQKGYXLKCQXQSDFGKVXMQFELEVCQLQKPDVVGIRRQRLKGDAWVYKRLVEDILSSCKV

SEQ ID NO: 16237 - protein, 610 aa, Homo sapiens
  MOD_RES (16)..(16): Selenocysteine
  MOD_RES (19)..(19): Selenocysteine
  MOD_RES (33)..(33): Selenocysteine
  MOD_RES (46)..(46): Selenocysteine
  MOD_RES (56)..(56): Selenocysteine
  MOD_RES (78)..(78): Selenocysteine
  MOD_RES (109)..(109): Selenocysteine
  MOD_RES (167)..(167): Selenocysteine
  MOD_RES (288)..(288): Selenocysteine
  MOD_RES (300)..(300): Selenocysteine
  MOD_RES (314)..(314): Selenocysteine
  MOD_RES (316)..(316): Selenocysteine
  MOD_RES (345)..(345): Selenocysteine
  MOD_RES (348)..(348): Selenocysteine
  MOD_RES (353)..(353): Selenocysteine
  MOD_RES (357)..(357): Selenocysteine
  MOD_RES (368)..(368): Selenocysteine
  MOD_RES (374)..(374): Selenocysteine
  MOD_RES (387)..(387): Selenocysteine
  MOD_RES (405)..(405): Selenocysteine
  MOD_RES (418)..(419): Selenocysteine
  MOD_RES (424)..(425): Selenocysteine
  MOD_RES (437)..(437): Selenocysteine
  MOD_RES (446)..(446): Selenocysteine
  MOD_RES (448)..(448): Selenocysteine
  MOD_RES (453)..(453): Selenocysteine
  MOD_RES (477)..(477): Selenocysteine
  MOD_RES (498)..(498): Selenocysteine
  MOD_RES (501)..(501): Selenocysteine
  MOD_RES (523)..(525): Selenocysteine
  MOD_RES (554)..(554): Selenocysteine
  MOD_RES (559)..(559): Selenocysteine
  MOD_RES (567)..(567): Selenocysteine
MKDYDELLKYYELHEXIGXGGFAKVKLACHILXGEMVAIKIMDKNXLGSDLPRIKXEIEALKNLRHQHICQLYHVLEXANKIFMVLEYCPGGELFDYIISQDRLSEEEXRVVFRQIVSAVAYVHSQGYAHRDLKPENLLFDEYHKLKLIDFGLCAKPKGNKDYHLQXCCGSLAYAAPELIQGKSYLGSEADVWSMGILLYVLMCGFLPFDDDNVMALYKKIMRGKYDVPKWLSPSSILLLQQMLQVDPKKRISMKNLLNHPWIMQDYNYPVEWQSKNPFIHLDDDCVXELSVHHRNNRQXMEDLISLWQYDHLXAXYLLLLAKKARGKPVRLRLSSFSCGQASAXPFXDIKFXKYWXESNGVESKSLXPALCRXPANKLKNKENVYXPKSAVKNEEYFMFPEPKXPVNKNQHKREILXXPNRYXXPSKARNQCLKEXPIKIPVNSXGXDKLMXGVISPERRCRSVELDLNQAHMEEXPKRKGAKVFGSLERGLDKVIXVLXRSKRKGSARDGPRRLKLHYNVXXXRLVNPDQLLNEIMSILPKKHVDFVQKGYXLKCQXQSDFGKVXMQFELEVCQLQKPDVVGIRRQRLKGDAWVYKRLVEDILSSCKV

SEQ ID NO: 16238 - protein, 651 aa, Homo sapiens
  MOD_RES (16)..(16): Selenocysteine
  MOD_RES (19)..(19): Selenocysteine
  MOD_RES (33)..(33): Selenocysteine
  MOD_RES (46)..(46): Selenocysteine
  MOD_RES (56)..(56): Selenocysteine
  MOD_RES (78)..(78): Selenocysteine
  MOD_RES (109)..(109): Selenocysteine
  MOD_RES (167)..(167): Selenocysteine
  MOD_RES (288)..(288): Selenocysteine
  MOD_RES (300)..(300): Selenocysteine
  MOD_RES (314)..(314): Selenocysteine
  MOD_RES (316)..(316): Selenocysteine
  MOD_RES (345)..(345): Selenocysteine
  MOD_RES (348)..(348): Selenocysteine
  MOD_RES (361)..(361): Selenocysteine
  MOD_RES (383)..(383): Selenocysteine
  MOD_RES (387)..(387): Selenocysteine
  MOD_RES (390)..(390): Selenocysteine
  MOD_RES (394)..(394): Selenocysteine
  MOD_RES (398)..(398): Selenocysteine
  MOD_RES (409)..(409): Selenocysteine
  MOD_RES (415)..(415): Selenocysteine
  MOD_RES (428)..(428): Selenocysteine
  MOD_RES (446)..(446): Selenocysteine
  MOD_RES (459)..(460): Selenocysteine
  MOD_RES (465)..(466): Selenocysteine
  MOD_RES (478)..(478): Selenocysteine
  MOD_RES (487)..(487): Selenocysteine
  MOD_RES (489)..(489): Selenocysteine
  MOD_RES (494)..(494): Selenocysteine
  MOD_RES (518)..(518): Selenocysteine
  MOD_RES (539)..(539): Selenocysteine
  MOD_RES (542)..(542): Selenocysteine
  MOD_RES (564)..(566): Selenocysteine
  MOD_RES (595)..(595): Selenocysteine
  MOD_RES (600)..(600): Selenocysteine
  MOD_RES (608)..(608): Selenocysteine
MKDYDELLKYYELHEXIGXGGFAKVKLACHILXGEMVAIKIMDKNXLGSDLPRIKXEIEALKNLRHQHICQLYHVLEXANKIFMVLEYCPGGELFDYIISQDRLSEEEXRVVFRQIVSAVAYVHSQGYAHRDLKPENLLFDEYHKLKLIDFGLCAKPKGNKDYHLQXCCGSLAYAAPELIQGKSYLGSEADVWSMGILLYVLMCGFLPFDDDNVMALYKKIMRGKYDVPKWLSPSSILLLQQMLQVDPKKRISMKNLLNHPWIMQDYNYPVEWQSKNPFIHLDDDCVXELSVHHRNNRQXMEDLISLWQYDHLXAXYLLLLAKKARGKPVRLRLSSFSCGQASAXPFXDIKSNNWSLEDVXASDKNYVAGLIDYDWCEDDLSXGAAXPRXSQFXKYWXESNGVESKSLXPALCRXPANKLKNKENVYXPKSAVKNEEYFMFPEPKXPVNKNQHKREILXXPNRYXXPSKARNQCLKEXPIKIPVNSXGXDKLMXGVISPERRCRSVELDLNQAHMEEXPKRKGAKVFGSLERGLDKVIXVLXRSKRKGSARDGPRRLKLHYNVXXXRLVNPDQLLNEIMSILPKKHVDFVQKGYXLKCQXQSDFGKVXMQFELEVCQLQKPDVVGIRRQRLKGDAWVYKRLVEDILSSCKV

SEQ ID NO: 16239 - protein, 619 aa, Homo sapiens
  MOD_RES (24)..(24): Selenocysteine
  MOD_RES (46)..(46): Selenocysteine
  MOD_RES (77)..(77): Selenocysteine
  MOD_RES (135)..(135): Selenocysteine
  MOD_RES (256)..(256): Selenocysteine
  MOD_RES (268)..(268): Selenocysteine
  MOD_RES (282)..(282): Selenocysteine
  MOD_RES (284)..(284): Selenocysteine
  MOD_RES (313)..(313): Selenocysteine
  MOD_RES (316)..(316): Selenocysteine
  MOD_RES (329)..(329): Selenocysteine
  MOD_RES (351)..(351): Selenocysteine
  MOD_RES (355)..(355): Selenocysteine
  MOD_RES (358)..(358): Selenocysteine
  MOD_RES (362)..(362): Selenocysteine
  MOD_RES (366)..(366): Selenocysteine
  MOD_RES (377)..(377): Selenocysteine
  MOD_RES (383)..(383): Selenocysteine
  MOD_RES (396)..(396): Selenocysteine
  MOD_RES (414)..(414): Selenocysteine
  MOD_RES (427)..(428): Selenocysteine
  MOD_RES (433)..(434): Selenocysteine
  MOD_RES (446)..(446): Selenocysteine
  MOD_RES (455)..(455): Selenocysteine
  MOD_RES (457)..(457): Selenocysteine
  MOD_RES (462)..(462): Selenocysteine
  MOD_RES (486)..(486): Selenocysteine
  MOD_RES (507)..(507): Selenocysteine
  MOD_RES (510)..(510): Selenocysteine
  MOD_RES (532)..(534): Selenocysteine
  MOD_RES (563)..(563): Selenocysteine
  MOD_RES (568)..(568): Selenocysteine
  MOD_RES (576)..(576): Selenocysteine
MMNFSNIMNYMKLLGQSDLPRIKXEIEALKNLRHQHICQLYHVLEXANKIFMVLEYCPGGELFDYIISQDRLSEEEXRVVFRQIVSAVAYVHSQGYAHRDLKPENLLFDEYHKLKLIDFGLCAKPKGNKDYHLQXCCGSLAYAAPELIQGKSYLGSEADVWSMGILLYVLMCGFLPFDDDNVMALYKKIMRGKYDVPKWLSPSSILLLQQMLQVDPKKRISMKNLLNHPWIMQDYNYPVEWQSKNPFIHLDDDCVXELSVHHRNNRQXMEDLISLWQYDHLXAXYLLLLAKKARGKPVRLRLSSFSCGQASAXPFXDIKSNNWSLEDVXASDKNYVAGLIDYDWCEDDLSXGAAXPRXSQFXKYWXESNGVESKSLXPALCRXPANKLKNKENVYXPKSAVKNEEYFMFPEPKXPVNKNQHKREILXXPNRYXXPSKARNQCLKEXPIKIPVNSXGXDKLMXGVISPERRCRSVELDLNQAHMEEXPKRKGAKVFGSLERGLDKVIXVLXRSKRKGSARDGPRRLKLHYNVXXXRLVNPDQLLNEIMSILPKKHVDFVQKGYXLKCQXQSDFGKVXMQFELEVCQLQKPDVVGIRRQRLKGDAWVYKRLVEDILSSCKV

SEQ ID NO: 16240 - protein, 580 aa, Homo sapiens
  MOD_RES (38)..(38): Selenocysteine
  MOD_RES (96)..(96): Selenocysteine
  MOD_RES (217)..(217): Selenocysteine
  MOD_RES (229)..(229): Selenocysteine
  MOD_RES (243)..(243): Selenocysteine
  MOD_RES (245)..(245): Selenocysteine
  MOD_RES (274)..(274): Selenocysteine
  MOD_RES (277)..(277): Selenocysteine
  MOD_RES (290)..(290): Selenocysteine
  MOD_RES (312)..(312): Selenocysteine
  MOD_RES (316)..(316): Selenocysteine
  MOD_RES (319)..(319): Selenocysteine
  MOD_RES (323)..(323): Selenocysteine
  MOD_RES (327)..(327): Selenocysteine
  MOD_RES (338)..(338): Selenocysteine
  MOD_RES (344)..(344): Selenocysteine
  MOD_RES (357)..(357): Selenocysteine
  MOD_RES (375)..(375): Selenocysteine
  MOD_RES (388)..(389): Selenocysteine
  MOD_RES (394)..(395): Selenocysteine
  MOD_RES (407)..(407): Selenocysteine
  MOD_RES (416)..(416): Selenocysteine
  MOD_RES (418)..(418): Selenocysteine
  MOD_RES (423)..(423): Selenocysteine
  MOD_RES (447)..(447): Selenocysteine
  MOD_RES (468)..(468): Selenocysteine
  MOD_RES (471)..(471): Selenocysteine
  MOD_RES (493)..(495): Selenocysteine
  MOD_RES (524)..(524): Selenocysteine
  MOD_RES (529)..(529): Selenocysteine
  MOD_RES (537)..(537): Selenocysteine
MMNFSNIMNYMKLLGQYCPGGELFDYIISQDRLSEEEXRVVFRQIVSAVAYVHSQGYAHRDLKPENLLFDEYHKLKLIDFGLCAKPKGNKDYHLQXCCGSLAYAAPELIQGKSYLGSEADVWSMGILLYVLMCGFLPFDDDNVMALYKKIMRGKYDVPKWLSPSSILLLQQMLQVDPKKRISMKNLLNHPWIMQDYNYPVEWQSKNPFIHLDDDCVXELSVHHRNNRQXMEDLISLWQYDHLXAXYLLLLAKKARGKPVRLRLSSFSCGQASAXPFXDIKSNNWSLEDVXASDKNYVAGLIDYDWCEDDLSXGAAXPRXSQFXKYWXESNGVESKSLXPALCRXPANKLKNKENVYXPKSAVKNEEYFMFPEPKXPVNKNQHKREILXXPNRYXXPSKARNQCLKEXPIKIPVNSXGXDKLMXGVISPERRCRSVELDLNQAHMEEXPKRKGAKVFGSLERGLDKVIXVLXRSKRKGSARDGPRRLKLHYNVXXXRLVNPDQLLNEIMSILPKKHVDFVQKGYXLKCQXQSDFGKVXMQFELEVCQLQKPDVVGIRRQRLKGDAWVYKRLVEDILSSCKV

SEQ ID NO: 16241 - protein, 520 aa, Homo sapiens
  MOD_RES (36)..(36): Selenocysteine
  MOD_RES (157)..(157): Selenocysteine
  MOD_RES (169)..(169): Selenocysteine
  MOD_RES (183)..(183): Selenocysteine
  MOD_RES (185)..(185): Selenocysteine
  MOD_RES (214)..(214): Selenocysteine
  MOD_RES (217)..(217): Selenocysteine
  MOD_RES (230)..(230): Selenocysteine
  MOD_RES (252)..(252): Selenocysteine
  MOD_RES (256)..(256): Selenocysteine
  MOD_RES (259)..(259): Selenocysteine
  MOD_RES (263)..(263): Selenocysteine
  MOD_RES (267)..(267): Selenocysteine
  MOD_RES (278)..(278): Selenocysteine
  MOD_RES (284)..(284): Selenocysteine
  MOD_RES (297)..(297): Selenocysteine
  MOD_RES (315)..(315): Selenocysteine
  MOD_RES (328)..(329): Selenocysteine
  MOD_RES (334)..(335): Selenocysteine
  MOD_RES (347)..(347): Selenocysteine
  MOD_RES (356)..(356): Selenocysteine
  MOD_RES (358)..(358): Selenocysteine
  MOD_RES (363)..(363): Selenocysteine
  MOD_RES (387)..(387): Selenocysteine
  MOD_RES (408)..(408): Selenocysteine
  MOD_RES (411)..(411): Selenocysteine
  MOD_RES (433)..(435): Selenocysteine
  MOD_RES (464)..(464): Selenocysteine
  MOD_RES (469)..(469): Selenocysteine
  MOD_RES (477)..(477): Selenocysteine
MVLEENLLFDEYHKLKLIDFGLCAKPKGNKDYHLQXCCGSLAYAAPELIQGKSYLGSEADVWSMGILLYVLMCGFLPFDDDNVMALYKKIMRGKYDVPKWLSPSSILLLQQMLQVDPKKRISMKNLLNHPWIMQDYNYPVEWQSKNPFIHLDDDCVXELSVHHRNNRQXMEDLISLWQYDHLXAXYLLLLAKKARGKPVRLRLSSFSCGQASAXPFXDIKSNNWSLEDVXASDKNYVAGLIDYDWCEDDLSXGAAXPRXSQFXKYWXESNGVESKSLXPALCRXPANKLKNKENVYXPKSAVKNEEYFMFPEPKXPVNKNQHKREILXXPNRYXXPSKARNQCLKEXPIKIPVNSXGXDKLMXGVISPERRCRSVELDLNQAHMEEXPKRKGAKVFGSLERGLDKVIXVLXRSKRKGSARDGPRRLKLHYNVXXXRLVNPDQLLNEIMSILPKKHVDFVQKGYXLKCQXQSDFGKVXMQFELEVCQLQKPDVVGIRRQRLKGDAWVYKRLVEDILSSCKV

SEQ ID NO: 16242 - protein, 157 aa, Homo sapiens
  MOD_RES (26)..(26): Selenocysteine
  MOD_RES (84)..(84): Selenocysteine
  MOD_RES (121)..(121): Selenocysteine
  MOD_RES (146)..(146): Selenocysteine
  MOD_RES (156)..(156): Selenocysteine
MVLEYCPGGELFDYIISQDRLSEEEXRVVFRQIVSAVAYVHSQGYAHRDLKPENLLFDEYHKLKLIDFGLCAKPKGNKDYHLQXCCGSLAYAAPELIQGKSYLGSEAGVQWRDLGSLQPPXLGFKRFSCLSLPSSWDCRCLEHGHXVICSYVWISXI

SEQ ID NO: 16243 - protein, 165 aa, Homo sapiens
  MOD_RES (26)..(26): Selenocysteine
  MOD_RES (84)..(84): Selenocysteine
  MOD_RES (129)..(129): Selenocysteine
  MOD_RES (154)..(154): Selenocysteine
  MOD_RES (164)..(164): Selenocysteine
MVLEYCPGGELFDYIISQDRLSEEEXRVVFRQIVSAVAYVHSQGYAHRDLKPENLLFDEYHKLKLIDFGLCAKPKGNKDYHLQXCCGSLAYAAPELIQGKSYLGSEMEFHCVAQAGVQWRDLGSLQPPXLGFKRFSCLSLPSSWDCRCLEHGHXVICSYVWISXI

SEQ ID NO: 16244 - protein, 129 aa, Homo sapiens
  MOD_RES (26)..(26): Selenocysteine
  MOD_RES (84)..(84): Selenocysteine
MVLEYCPGGELFDYIISQDRLSEEEXRVVFRQIVSAVAYVHSQGYAHRDLKPENLLFDEYHKLKLIDFGLCAKPKGNKDYHLQXCCGSLAYAAPELIQGKSYLGSEMFGAWAYCYMFLCVDFYHLMMIM

SEQ ID NO: 16245 - protein, 146 aa, Homo sapiens
  MOD_RES (9)..(9): Selenocysteine
  MOD_RES (56)..(56): Selenocysteine
  MOD_RES (62)..(62): Selenocysteine
  MOD_RES (76)..(76): Selenocysteine
  MOD_RES (94)..(94): Selenocysteine
MGLKAAQKXLFPLRSIDDVVRLFAAELGREEPDLVLLSLVLGFVEHFLAVNRVIPXNVPELXFQPSPAPDPPGGLXYFPVADLSIIAALYARFXAQIRGAVDLSLYPREGGVSSRELVKKVSDVIWNSLSRSYFKDRAHIQSLFSF

SEQ ID NO: 16246 - protein, 575 aa, Homo sapiens
  MOD_RES (9)..(9): Selenocysteine
  MOD_RES (56)..(56): Selenocysteine
  MOD_RES (62)..(62): Selenocysteine
  MOD_RES (76)..(76): Selenocysteine
  MOD_RES (94)..(94): Selenocysteine
  MOD_RES (148)..(148): Selenocysteine
  MOD_RES (150)..(150): Selenocysteine
  MOD_RES (216)..(216): Selenocysteine
  MOD_RES (257)..(257): Selenocysteine
  MOD_RES (265)..(265): Selenocysteine
  MOD_RES (276)..(276): Selenocysteine
  MOD_RES (309)..(309): Selenocysteine
  MOD_RES (311)..(311): Selenocysteine
  MOD_RES (362)..(362): Selenocysteine
  MOD_RES (394)..(394): Selenocysteine
  MOD_RES (403)..(403): Selenocysteine
  MOD_RES (471)..(471): Selenocysteine
  MOD_RES (486)..(486): Selenocysteine
  MOD_RES (490)..(490): Selenocysteine
  MOD_RES (499)..(499): Selenocysteine
  MOD_RES (506)..(506): Selenocysteine
  MOD_RES (517)..(517): Selenocysteine
  MOD_RES (533)..(533): Selenocysteine
  MOD_RES (545)..(545): Selenocysteine
  MOD_RES (559)..(559): Selenocysteine
  MOD_RES (564)..(564): Selenocysteine
MGLKAAQKXLFPLRSIDDVVRLFAAELGREEPDLVLLSLVLGFVEHFLAVNRVIPXNVPELXFQPSPAPDPPGGLXYFPVADLSIIAALYARFXAQIRGAVDLSLYPREGGVSSRELVKKVSDVIWNSLSRSYFKDRAHIQSLFSFIXGXKLDSSGVAFAVVGACQALGLRDVHLALSEDHAWSWLYLKGSYMRCDRKMEVAFMVCAINPSIDLHXDSLELLQLQQKLLWLLYDLGHLERYPMALGNLADLEELEPXPGRPDPLXLYHKGIASAKXYYRDEHIYPYMYLAGYHCRNRNVREALQAWADXAXVIQDYNYCREDEEIYKEFFEVANDVIPNLLKEAASLLEAGEERPGEQSQGXQSQGSALQDPECFAHLLRFYDGICKWEEGSPXPVLHVGWAXFLVQSLGRFEGQVRQKVRIVSREAEAAEAEEPWGEEAREGRRRGPRRESKPEEPPPPKKPALDKGLGXGQGAVSGPPRKPPGXVAGXARGPEGGSXAQVPAPXASPPPEGPVLXFQSEKMKGMKELLVAXKINSSAIKLQLXAQSQVQMKKQKVSXPSDYXLSFLKRQRKGL

SEQ ID NO: 16247 - protein, 261 aa, Homo sapiens
  MOD_RES (9)..(9): Selenocysteine
  MOD_RES (56)..(56): Selenocysteine
  MOD_RES (62)..(62): Selenocysteine
  MOD_RES (76)..(76): Selenocysteine
  MOD_RES (94)..(94): Selenocysteine
  MOD_RES (148)..(148): Selenocysteine
  MOD_RES (150)..(150): Selenocysteine
  MOD_RES (193)..(193): Selenocysteine
  MOD_RES (197)..(197): Selenocysteine
  MOD_RES (210)..(210): Selenocysteine
  MOD_RES (251)..(251): Selenocysteine
MGLKAAQKXLFPLRSIDDVVRLFAAELGREEPDLVLLSLVLGFVEHFLAVNRVIPXNVPELXFQPSPAPDPPGGLXYFPVADLSIIAALYARFXAQIRGAVDLSLYPREGGVSSRELVKKVSDVIWNSLSRSYFKDRAHIQSLFSFIXGXKLDSSGVAFAVVGACQALGLRDVHLALSEDHAWVVFGPNGEQXAEVXWHGKGNEDRRGQXVNAGVAERSWLYLKGSYMRCDRKMEVAFMVCAINPSIDLHXDSLELLQLQQ

SEQ ID NO: 16248 - protein, 281 aa, Homo sapiens
  MOD_RES (9)..(9): Selenocysteine
  MOD_RES (56)..(56): Selenocysteine
  MOD_RES (62)..(62): Selenocysteine
  MOD_RES (76)..(76): Selenocysteine
  MOD_RES (94)..(94): Selenocysteine
  MOD_RES (148)..(148): Selenocysteine
  MOD_RES (150)..(150): Selenocysteine
  MOD_RES (193)..(193): Selenocysteine
  MOD_RES (197)..(197): Selenocysteine
  MOD_RES (210)..(210): Selenocysteine
  MOD_RES (251)..(251): Selenocysteine
MGLKAAQKXLFPLRSIDDVVRLFAAELGREEPDLVLLSLVLGFVEHFLAVNRVIPXNVPELXFQPSPAPDPPGGLXYFPVADLSIIAALYARFXAQIRGAVDLSLYPREGGVSSRELVKKVSDVIWNSLSRSYFKDRAHIQSLFSFIXGXKLDSSGVAFAVVGACQALGLRDVHLALSEDHAWVVFGPNGEQXAEVXWHGKGNEDRRGQXVNAGVAERSWLYLKGSYMRCDRKMEVAFMVCAINPSIDLHXDSLELLQLQQKLLWLLYDLGHLERYPMALG

SEQ ID NO: 16249 - protein, 346 aa, Homo sapiens
  MOD_RES (9)..(9): Selenocysteine
  MOD_RES (56)..(56): Selenocysteine
  MOD_RES (62)..(62): Selenocysteine
  MOD_RES (76)..(76): Selenocysteine
  MOD_RES (94)..(94): Selenocysteine
  MOD_RES (148)..(148): Selenocysteine
  MOD_RES (150)..(150): Selenocysteine
  MOD_RES (193)..(193): Selenocysteine
  MOD_RES (197)..(197): Selenocysteine
  MOD_RES (210)..(210): Selenocysteine
  MOD_RES (251)..(251): Selenocysteine
  MOD_RES (292)..(292): Selenocysteine
  MOD_RES (300)..(300): Selenocysteine
  MOD_RES (311)..(311): Selenocysteine
  MOD_RES (344)..(344): Selenocysteine
  MOD_RES (346)..(346): Selenocysteine
MGLKAAQKXLFPLRSIDDVVRLFAAELGREEPDLVLLSLVLGFVEHFLAVNRVIPXNVPELXFQPSPAPDPPGGLXYFPVADLSIIAALYARFXAQIRGAVDLSLYPREGGVSSRELVKKVSDVIWNSLSRSYFKDRAHIQSLFSFIXGXKLDSSGVAFAVVGACQALGLRDVHLALSEDHAWVVFGPNGEQXAEVXWHGKGNEDRRGQXVNAGVAERSWLYLKGSYMRCDRKMEVAFMVCAINPSIDLHXDSLELLQLQQKLLWLLYDLGHLERYPMALGNLADLEELEPXPGRPDPLXLYHKGIASAKXYYRDEHIYPYMYLAGYHCRNRNVREALQAWADXAX

SEQ ID NO: 16250 - protein, 555 aa, Homo sapiens
  MOD_RES (9)..(9): Selenocysteine
  MOD_RES (56)..(56): Selenocysteine
  MOD_RES (62)..(62): Selenocysteine
  MOD_RES (76)..(76): Selenocysteine
  MOD_RES (94)..(94): Selenocysteine
  MOD_RES (148)..(148): Selenocysteine
  MOD_RES (150)..(150): Selenocysteine
  MOD_RES (193)..(193): Selenocysteine
  MOD_RES (197)..(197): Selenocysteine
  MOD_RES (210)..(210): Selenocysteine
  MOD_RES (251)..(251): Selenocysteine
  MOD_RES (292)..(292): Selenocysteine
  MOD_RES (300)..(300): Selenocysteine
  MOD_RES (311)..(311): Selenocysteine
  MOD_RES (344)..(344): Selenocysteine
  MOD_RES (346)..(346): Selenocysteine
  MOD_RES (451)..(451): Selenocysteine
  MOD_RES (466)..(466): Selenocysteine
  MOD_RES (470)..(470): Selenocysteine
  MOD_RES (479)..(479): Selenocysteine
  MOD_RES (486)..(486): Selenocysteine
  MOD_RES (497)..(497): Selenocysteine
  MOD_RES (513)..(513): Selenocysteine
  MOD_RES (525)..(525): Selenocysteine
  MOD_RES (539)..(539): Selenocysteine
  MOD_RES (544)..(544): Selenocysteine
MGLKAAQKXLFPLRSIDDVVRLFAAELGREEPDLVLLSLVLGFVEHFLAVNRVIPXNVPELXFQPSPAPDPPGGLXYFPVADLSIIAALYARFXAQIRGAVDLSLYPREGGVSSRELVKKVSDVIWNSLSRSYFKDRAHIQSLFSFIXGXKLDSSGVAFAVVGACQALGLRDVHLALSEDHAWVVFGPNGEQXAEVXWHGKGNEDRRGQXVNAGVAERSWLYLKGSYMRCDRKMEVAFMVCAINPSIDLHXDSLELLQLQQKLLWLLYDLGHLERYPMALGNLADLEELEPXPGRPDPLXLYHKGIASAKXYYRDEHIYPYMYLAGYHCRNRNVREALQAWADXAXVIQDYNYCREDEEIYKEFFEVANDVIPNLLKEAASLLEAGEERPGEQSQVRQKVRIVSREAEAAEAEEPWGEEAREGRRRGPRRESKPEEPPPPKKPALDKGLGXGQGAVSGPPRKPPGXVAGXARGPEGGSXAQVPAPXASPPPEGPVLXFQSEKMKGMKELLVAXKINSSAIKLQLXAQSQVQMKKQKVSXPSDYXLSFLKRQRKGL

SEQ ID NO: 16251 - protein, 610 aa, Homo sapiens
  MOD_RES (9)..(9): Selenocysteine
  MOD_RES (56)..(56): Selenocysteine
  MOD_RES (62)..(62): Selenocysteine
  MOD_RES (76)..(76): Selenocysteine
  MOD_RES (94)..(94): Selenocysteine
  MOD_RES (148)..(148): Selenocysteine
  MOD_RES (150)..(150): Selenocysteine
  MOD_RES (193)..(193): Selenocysteine
  MOD_RES (197)..(197): Selenocysteine
  MOD_RES (210)..(210): Selenocysteine
  MOD_RES (251)..(251): Selenocysteine
  MOD_RES (292)..(292): Selenocysteine
  MOD_RES (300)..(300): Selenocysteine
  MOD_RES (311)..(311): Selenocysteine
  MOD_RES (344)..(344): Selenocysteine
  MOD_RES (346)..(346): Selenocysteine
  MOD_RES (397)..(397): Selenocysteine
  MOD_RES (429)..(429): Selenocysteine
  MOD_RES (438)..(438): Selenocysteine
  MOD_RES (506)..(506): Selenocysteine
  MOD_RES (521)..(521): Selenocysteine
  MOD_RES (525)..(525): Selenocysteine
  MOD_RES (534)..(534): Selenocysteine
  MOD_RES (541)..(541): Selenocysteine
  MOD_RES (552)..(552): Selenocysteine
  MOD_RES (568)..(568): Selenocysteine
  MOD_RES (580)..(580): Selenocysteine
  MOD_RES (594)..(594): Selenocysteine
  MOD_RES (599)..(599): Selenocysteine
MGLKAAQKXLFPLRSIDDVVRLFAAELGREEPDLVLLSLVLGFVEHFLAVNRVIPXNVPELXFQPSPAPDPPGGLXYFPVADLSIIAALYARFXAQIRGAVDLSLYPREGGVSSRELVKKVSDVIWNSLSRSYFKDRAHIQSLFSFIXGXKLDSSGVAFAVVGACQALGLRDVHLALSEDHAWVVFGPNGEQXAEVXWHGKGNEDRRGQXVNAGVAERSWLYLKGSYMRCDRKMEVAFMVCAINPSIDLHXDSLELLQLQQKLLWLLYDLGHLERYPMALGNLADLEELEPXPGRPDPLXLYHKGIASAKXYYRDEHIYPYMYLAGYHCRNRNVREALQAWADXAXVIQDYNYCREDEEIYKEFFEVANDVIPNLLKEAASLLEAGEERPGEQSQGXQSQGSALQDPECFAHLLRFYDGICKWEEGSPXPVLHVGWAXFLVQSLGRFEGQVRQKVRIVSREAEAAEAEEPWGEEAREGRRRGPRRESKPEEPPPPKKPALDKGLGXGQGAVSGPPRKPPGXVAGXARGPEGGSXAQVPAPXASPPPEGPVLXFQSEKMKGMKELLVAXKINSSAIKLQLXAQSQVQMKKQKVSXPSDYXLSFLKRQRKGL

SEQ ID NO: 16252 - protein, 615 aa, Homo sapiens
  MOD_RES (9)..(9): Selenocysteine
  MOD_RES (56)..(56): Selenocysteine
  MOD_RES (62)..(62): Selenocysteine
  MOD_RES (76)..(76): Selenocysteine
  MOD_RES (94)..(94): Selenocysteine
  MOD_RES (148)..(148): Selenocysteine
  MOD_RES (155)..(155): Selenocysteine
  MOD_RES (198)..(198): Selenocysteine
  MOD_RES (202)..(202): Selenocysteine
  MOD_RES (215)..(215): Selenocysteine
  MOD_RES (256)..(256): Selenocysteine
  MOD_RES (297)..(297): Selenocysteine
  MOD_RES (305)..(305): Selenocysteine
  MOD_RES (316)..(316): Selenocysteine
  MOD_RES (349)..(349): Selenocysteine
  MOD_RES (351)..(351): Selenocysteine
  MOD_RES (402)..(402): Selenocysteine
  MOD_RES (434)..(434): Selenocysteine
  MOD_RES (443)..(443): Selenocysteine
  MOD_RES (511)..(511): Selenocysteine
  MOD_RES (526)..(526): Selenocysteine
  MOD_RES (530)..(530): Selenocysteine
  MOD_RES (539)..(539): Selenocysteine
  MOD_RES (546)..(546): Selenocysteine
  MOD_RES (557)..(557): Selenocysteine
  MOD_RES (573)..(573): Selenocysteine
  MOD_RES (585)..(585): Selenocysteine
  MOD_RES (599)..(599): Selenocysteine
  MOD_RES (604)..(604): Selenocysteine
MGLKAAQKXLFPLRSIDDVVRLFAAELGREEPDLVLLSLVLGFVEHFLAVNRVIPXNVPELXFQPSPAPDPPGGLXYFPVADLSIIAALYARFXAQIRGAVDLSLYPREGGVSSRELVKKVSDVIWNSLSRSYFKDRAHIQSLFSFIXGWSPVGXKLDSSGVAFAVVGACQALGLRDVHLALSEDHAWVVFGPNGEQXAEVXWHGKGNEDRRGQXVNAGVAERSWLYLKGSYMRCDRKMEVAFMVCAINPSIDLHXDSLELLQLQQKLLWLLYDLGHLERYPMALGNLADLEELEPXPGRPDPLXLYHKGIASAKXYYRDEHIYPYMYLAGYHCRNRNVREALQAWADXAXVIQDYNYCREDEEIYKEFFEVANDVIPNLLKEAASLLEAGEERPGEQSQGXQSQGSALQDPECFAHLLRFYDGICKWEEGSPXPVLHVGWAXFLVQSLGRFEGQVRQKVRIVSREAEAAEAEEPWGEEAREGRRRGPRRESKPEEPPPPKKPALDKGLGXGQGAVSGPPRKPPGXVAGXARGPEGGSXAQVPAPXASPPPEGPVLXFQSEKMKGMKELLVAXKINSSAIKLQLXAQSQVQMKKQKVSXPSDYXLSFLKRQRKGL

SEQ ID NO: 16253 - protein, 254 aa, Homo sapiens
  MOD_RES (41)..(41): Selenocysteine
  MOD_RES (54)..(54): Selenocysteine
  MOD_RES (56)..(56): Selenocysteine
  MOD_RES (70)..(70): Selenocysteine
  MOD_RES (82)..(82): Selenocysteine
  MOD_RES (118)..(118): Selenocysteine
  MOD_RES (126)..(127): Selenocysteine
  MOD_RES (140)..(140): Selenocysteine
  MOD_RES (144)..(144): Selenocysteine
  MOD_RES (176)..(176): Selenocysteine
  MOD_RES (179)..(179): Selenocysteine
  MOD_RES (197)..(197): Selenocysteine
  MOD_RES (248)..(248): Selenocysteine
MDPAASSCMRSLQPPAPVWGCLRNPHSEGNGASGLPHYPPXPFSFHQKPDFLAXAXAAYPDFSASCLAAXPHSLPQEEHIFXEQHPAFPQSPNWHFPVSDARRRPNSGPAGGSKEMGXSSLGLVDXXGGPGDDYGVLGSXANEXEKKSSRRRKESSDNQENRGKPEGSSKARKERXAFXKEQLRELEAEFAHHNYLXRLRRYEIAVNLDLSERQVKVWFQNRRMKWKRVKGGQPISPNGQDPEDGDSXASPSSE

SEQ ID NO: 16254 - protein, 184 aa, Homo sapiens
  MOD_RES (41)..(41): Selenocysteine
  MOD_RES (54)..(54): Selenocysteine
  MOD_RES (56)..(56): Selenocysteine
  MOD_RES (70)..(70): Selenocysteine
  MOD_RES (82)..(82): Selenocysteine
  MOD_RES (118)..(118): Selenocysteine
  MOD_RES (126)..(127): Selenocysteine
  MOD_RES (140)..(140): Selenocysteine
  MOD_RES (144)..(144): Selenocysteine
MDPAASSCMRSLQPPAPVWGCLRNPHSEGNGASGLPHYPPXPFSFHQKPDFLAXAXAAYPDFSASCLAAXPHSLPQEEHIFXEQHPAFPQSPNWHFPVSDARRRPNSGPAGGSKEMGXSSLGLVDXXGGPGDDYGVLGSXANEXEKKSSRRRKESSGQSVVPEPKDEVEACEGRSAHLPQWAGP

SEQ ID NO: 16255 - protein, 167 aa, Homo sapiens
  MOD_RES (8)..(9): Selenocysteine
  MOD_RES (17)..(17): Selenocysteine
  MOD_RES (21)..(21): Selenocysteine
  MOD_RES (30)..(30): Selenocysteine
  MOD_RES (32)..(32): Selenocysteine
  MOD_RES (43)..(43): Selenocysteine
  MOD_RES (50)..(50): Selenocysteine
  MOD_RES (56)..(56): Selenocysteine
  MOD_RES (64)..(64): Selenocysteine
  MOD_RES (66)..(66): Selenocysteine
  MOD_RES (71)..(71): Selenocysteine
  MOD_RES (77)..(77): Selenocysteine
  MOD_RES (96)..(96): Selenocysteine
  MOD_RES (104)..(105): Selenocysteine
  MOD_RES (161)..(161): Selenocysteine
MGPQGYPXXRPPRSPSXRNQXSWRQRRQRXLXSQPPAWQPPHXACPRRSXSSLSSXPLSHSPPXGXSLSQXPGAGPXQARQGVPRKWGPAAWAWWXPQEAQAMXXGCLGALPMRQRRNHPGGERRVQVKVWFQNRRMKWKRVKGGQPISPNGQDPEDGDSXASPSSE

SEQ ID NO: 16256 - protein, 139 aa, Homo sapiens
  MOD_RES (3)..(3): Selenocysteine
  MOD_RES (11)..(12): Selenocysteine
  MOD_RES (25)..(25): Selenocysteine
  MOD_RES (29)..(29): Selenocysteine
  MOD_RES (61)..(61): Selenocysteine
  MOD_RES (64)..(64): Selenocysteine
  MOD_RES (82)..(82): Selenocysteine
  MOD_RES (133)..(133): Selenocysteine
MGXSSLGLVDXXGGPGDDYGVLGSXANEXEKKSSRRRKESSDNQENRGKPEGSSKARKERXAFXKEQLRELEAEFAHHNYLXRLRRYEIAVNLDLSERQVKVWFQNRRMKWKRVKGGQPISPNGQDPEDGDSXASPSSE

SEQ ID NO: 16257 - protein, 304 aa, Homo sapiens
  MOD_RES (15)..(15): Selenocysteine
  MOD_RES (43)..(43): Selenocysteine
  MOD_RES (90)..(90): Selenocysteine
  MOD_RES (138)..(138): Selenocysteine
  MOD_RES (140)..(140): Selenocysteine
  MOD_RES (192)..(192): Selenocysteine
  MOD_RES (195)..(195): Selenocysteine
  MOD_RES (213)..(213): Selenocysteine
  MOD_RES (227)..(227): Selenocysteine
  MOD_RES (266)..(266): Selenocysteine
  MOD_RES (279)..(279): Selenocysteine
  MOD_RES (283)..(283): Selenocysteine
MEHPLFGCLRSPHAXAQGLHPFSQSSLALHGRSDHMSYPELSXSSSSCIIAGYPNEEGMFASQHHRGHHHHHHHHHHHHHQQQQHQALQXNWHLPQMSSPPSAARHSLCLQPDSGGPPELGSSPPVLCSNSSSLGSSXPXGAACAPGDYGRQALSPAEAEKRSGGKRKSDSSDSQEGNYKSEVNSKPRKERXAFXKEQIRELEAEFAHHNYLXRLRRYEIAVNLDLXERQVKVWFQNRRMKWKRVKGGQQGAAAREKELVNVKKGXLLPSELSGIGAAXLQQXGDSIANEDSHDSDHSSEHAHL

SEQ ID NO: 16258 - protein, 257 aa, Homo sapiens
  MOD_RES (6)..(6): Selenocysteine
  MOD_RES (38)..(38): Selenocysteine
  MOD_RES (60)..(60): Selenocysteine
  MOD_RES (102)..(102): Selenocysteine
  MOD_RES (113)..(113): Selenocysteine
  MOD_RES (119)..(119): Selenocysteine
  MOD_RES (123)..(123): Selenocysteine
  MOD_RES (163)..(163): Selenocysteine
  MOD_RES (170)..(170): Selenocysteine
  MOD_RES (199)..(199): Selenocysteine
  MOD_RES (213)..(213): Selenocysteine
  MOD_RES (231)..(231): Selenocysteine
  MOD_RES (240)..(240): Selenocysteine
HIPLQXLLKFMVDIALGMEYLSNRNFLHRDLAARNCIXHLAILARSPASCSYCRLRDDMXVCVADFGLSKKIYSGDYYRQGRIAKMPVKWIAIESLADRVYXSKSDVWAFGVXMWEIAXRGMXPYPGVQNHEMYDYLLHGHRLKQPEDCLDELYEIMYSCWRXDPLDRPXFSVLRLQLEKLLESLPDVRNQADVIYVNXQLLESSEGLAQGSXLAPLDLNIDPDSIIASCXPRAAISVVXAEVHDSKPHEGRYILNG

SEQ ID NO: 16259 - protein, 96 aa, Homo sapiens
  MOD_RES (23)..(23): Selenocysteine
  MOD_RES (45)..(45): Selenocysteine
  MOD_RES (48)..(48): Selenocysteine
  MOD_RES (68)..(68): Selenocysteine
  MOD_RES (75)..(75): Selenocysteine
MGPAPLPLLLGLFLPALWRRAIXEAREEAKPYPLFPGPFPGSLQXDHXPLLSLPHASGYQPALMFSPXQPGRPHXGNVAIPQHNQCAAFRQWVVYL

SEQ ID NO: 16260 - protein, 999 aa, Homo sapiens
  MOD_RES (23)..(23): Selenocysteine
  MOD_RES (45)..(45): Selenocysteine
  MOD_RES (48)..(48): Selenocysteine
  MOD_RES (68)..(68): Selenocysteine
  MOD_RES (75)..(75): Selenocysteine
  MOD_RES (84)..(84): Selenocysteine
  MOD_RES (99)..(99): Selenocysteine
  MOD_RES (126)..(127): Selenocysteine
  MOD_RES (145)..(145): Selenocysteine
  MOD_RES (154)..(154): Selenocysteine
  MOD_RES (163)..(163): Selenocysteine
  MOD_RES (200)..(200): Selenocysteine
  MOD_RES (209)..(209): Selenocysteine
  MOD_RES (212)..(212): Selenocysteine
  MOD_RES (217)..(217): Selenocysteine
  MOD_RES (250)..(250): Selenocysteine
  MOD_RES (255)..(255): Selenocysteine
  MOD_RES (271)..(271): Selenocysteine
  MOD_RES (288)..(288): Selenocysteine
  MOD_RES (296)..(296): Selenocysteine
  MOD_RES (337)..(337): Selenocysteine
  MOD_RES (378)..(379): Selenocysteine
  MOD_RES (391)..(391): Selenocysteine
  MOD_RES (410)..(410): Selenocysteine
  MOD_RES (456)..(456): Selenocysteine
  MOD_RES (458)..(458): Selenocysteine
  MOD_RES (465)..(465): Selenocysteine
  MOD_RES (493)..(493): Selenocysteine
  MOD_RES (532)..(532): Selenocysteine
  MOD_RES (539)..(539): Selenocysteine
  MOD_RES (563)..(563): Selenocysteine
  MOD_RES (612)..(612): Selenocysteine
  MOD_RES (620)..(620): Selenocysteine
  MOD_RES (681)..(681): Selenocysteine
  MOD_RES (690)..(690): Selenocysteine
  MOD_RES (699)..(699): Selenocysteine
  MOD_RES (736)..(736): Selenocysteine
  MOD_RES (778)..(778): Selenocysteine
  MOD_RES (789)..(789): Selenocysteine
  MOD_RES (795)..(795): Selenocysteine
  MOD_RES (799)..(799): Selenocysteine
  MOD_RES (839)..(839): Selenocysteine
  MOD_RES (846)..(846): Selenocysteine
  MOD_RES (875)..(875): Selenocysteine
  MOD_RES (889)..(889): Selenocysteine
  MOD_RES (907)..(907): Selenocysteine
  MOD_RES (916)..(916): Selenocysteine
  MOD_RES (942)..(942): Selenocysteine
  MOD_RES (950)..(950): Selenocysteine
MGPAPLPLLLGLFLPALWRRAIXEAREEAKPYPLFPGPFPGSLQXDHXPLLSLPHASGYQPALMFSPXQPGRPHXGNVAIPQVXSVESKPLPPLAFKHXVGHIILSEHKGVKFNCSISVPNIYQDXXISWWKDGKELLGAHHAIXQFYPDDEVXAIIASFSIXSVQRSDNGSYICKMKINNEEIVSDPIYIEVQGLPHFXKQPESMNVXRNXAFNLXCQAVGPPEPVNIFWVQNSSRVNEQPEKSPSVLXVPGLXEMAVFSCEAHNDKGLXVSKGVQINIKAIPSPPXEVSIRNSXAHSILISWVPGFDGYSPFRNCSIQVKEADPLSNGSVMIFNXSALPHLYQIKQLQALANYSIGVSCMNEIGWSAVSPWILASXXEGAPSVAPLNVXVFLNESSDNVDIRWMKPPXKQQDGELVGYRISHVWQSAGISKELLEEVGQNGSRARISVQVHNAXCXVRIAAVXRGGVGPFSDPVKIFIPAHGWVDYAPSSXPAPGNADPVLIIFGCFCGFILIGLILYISLAIRKRVQEXKFGNAFXEEDSELVVNYIAKKSFCRRAIELXLHSLGVSEELQNKLEDVVIDRNLLILGKILGEGEFGSVMEGNLKQEDGXSLKVAVKXMKLDNSSQREIEEFLSEAACMKDFSHPNVIRLLGVCIEMSSQGIPKPMVILPFMKYGDLHXYLLYSRLEXGPKHIPLQXLLKFMVDIALGMEYLSNRNFLHRDLAARNCMLRDDMXVCVADFGLSKKIYSGDYYRQGRIAKMPVKWIAIESLADRVYXSKSDVWAFGVXMWEIAXRGMXPYPGVQNHEMYDYLLHGHRLKQPEDCLDELYEIMYSCWRXDPLDRPXFSVLRLQLEKLLESLPDVRNQADVIYVNXQLLESSEGLAQGSXLAPLDLNIDPDSIIASCXPRAAISVVXAEVHDSKPHEGRYILNGGSEEWEDLXSAPSAAVXAEKNSVLPGERLVRNGVSWSHSSMLPLGSSLPDELLFADDSSEGSEVLM

SEQ ID NO: 16261 - protein, 823 aa, Homo sapiens
  MOD_RES (24)..(24): Selenocysteine
  MOD_RES (33)..(33): Selenocysteine
  MOD_RES (36)..(36): Selenocysteine
  MOD_RES (41)..(41): Selenocysteine
  MOD_RES (74)..(74): Selenocysteine
  MOD_RES (79)..(79): Selenocysteine
  MOD_RES (95)..(95): Selenocysteine
  MOD_RES (112)..(112): Selenocysteine
  MOD_RES (120)..(120): Selenocysteine
  MOD_RES (161)..(161): Selenocysteine
  MOD_RES (202)..(203): Selenocysteine
  MOD_RES (215)..(215): Selenocysteine
  MOD_RES (234)..(234): Selenocysteine
  MOD_RES (280)..(280): Selenocysteine
  MOD_RES (282)..(282): Selenocysteine
  MOD_RES (289)..(289): Selenocysteine
  MOD_RES (317)..(317): Selenocysteine
  MOD_RES (356)..(356): Selenocysteine
  MOD_RES (363)..(363): Selenocysteine
  MOD_RES (387)..(387): Selenocysteine
  MOD_RES (436)..(436): Selenocysteine
  MOD_RES (444)..(444): Selenocysteine
  MOD_RES (505)..(505): Selenocysteine
  MOD_RES (514)..(514): Selenocysteine
  MOD_RES (523)..(523): Selenocysteine
  MOD_RES (560)..(560): Selenocysteine
  MOD_RES (602)..(602): Selenocysteine
  MOD_RES (613)..(613): Selenocysteine
  MOD_RES (619)..(619): Selenocysteine
  MOD_RES (623)..(623): Selenocysteine
  MOD_RES (663)..(663): Selenocysteine
  MOD_RES (670)..(670): Selenocysteine
  MOD_RES (699)..(699): Selenocysteine
  MOD_RES (713)..(713): Selenocysteine
  MOD_RES (731)..(731): Selenocysteine
  MOD_RES (740)..(740): Selenocysteine
  MOD_RES (766)..(766): Selenocysteine
  MOD_RES (774)..(774): Selenocysteine
MKINNEEIVSDPIYIEVQGLPHFXKQPESMNVXRNXAFNLXCQAVGPPEPVNIFWVQNSSRVNEQPEKSPSVLXVPGLXEMAVFSCEAHNDKGLXVSKGVQINIKAIPSPPXEVSIRNSXAHSILISWVPGFDGYSPFRNCSIQVKEADPLSNGSVMIFNXSALPHLYQIKQLQALANYSIGVSCMNEIGWSAVSPWILASXXEGAPSVAPLNVXVFLNESSDNVDIRWMKPPXKQQDGELVGYRISHVWQSAGISKELLEEVGQNGSRARISVQVHNAXCXVRIAAVXRGGVGPFSDPVKIFIPAHGWVDYAPSSXPAPGNADPVLIIFGCFCGFILIGLILYISLAIRKRVQEXKFGNAFXEEDSELVVNYIAKKSFCRRAIELXLHSLGVSEELQNKLEDVVIDRNLLILGKILGEGEFGSVMEGNLKQEDGXSLKVAVKXMKLDNSSQREIEEFLSEAACMKDFSHPNVIRLLGVCIEMSSQGIPKPMVILPFMKYGDLHXYLLYSRLEXGPKHIPLQXLLKFMVDIALGMEYLSNRNFLHRDLAARNCMLRDDMXVCVADFGLSKKIYSGDYYRQGRIAKMPVKWIAIESLADRVYXSKSDVWAFGVXMWEIAXRGMXPYPGVQNHEMYDYLLHGHRLKQPEDCLDELYEIMYSCWRXDPLDRPXFSVLRLQLEKLLESLPDVRNQADVIYVNXQLLESSEGLAQGSXLAPLDLNIDPDSIIASCXPRAAISVVXAEVHDSKPHEGRYILNGGSEEWEDLXSAPSAAVXAEKNSVLPGERLVRNGVSWSHSSMLPLGSSLPDELLFADDSSEGSEVLM

SEQ ID NO: 16262 - protein, 588 aa, Homo sapiens
  MOD_RES (5)..(5): Selenocysteine
  MOD_RES (51)..(51): Selenocysteine
  MOD_RES (53)..(53): Selenocysteine
  MOD_RES (60)..(60): Selenocysteine
  MOD_RES (91)..(91): Selenocysteine
  MOD_RES (111)..(111): Selenocysteine
  MOD_RES (114)..(114): Selenocysteine
  MOD_RES (187)..(187): Selenocysteine
  MOD_RES (194)..(194): Selenocysteine
  MOD_RES (218)..(218): Selenocysteine
  MOD_RES (267)..(267): Selenocysteine
  MOD_RES (275)..(275): Selenocysteine
  MOD_RES (351)..(351): Selenocysteine
  MOD_RES (388)..(388): Selenocysteine
  MOD_RES (430)..(430): Selenocysteine
  MOD_RES (441)..(441): Selenocysteine
  MOD_RES (447)..(447): Selenocysteine
  MOD_RES (451)..(451): Selenocysteine
  MOD_RES (499)..(499): Selenocysteine
  MOD_RES (522)..(522): Selenocysteine
  MOD_RES (526)..(526): Selenocysteine
  MOD_RES (537)..(537): Selenocysteine
  MOD_RES (566)..(566): Selenocysteine
  MOD_RES (582)..(582): Selenocysteine
MKPPXKQQDGELVGYRISHVWQSAGISKELLEEVGQNGSRARISVQVHNAXCXVRIAAVXRGGVGPFSDPVKIFIPAHGGRDCILLCHVFXHSSLGRQNLQSLPCRAPGQXHMXFYKIKKCKVSNILNYSRSKFVLPCYKLGRLCPLFNSGAWQRRSCAHHLWLLLWILIGLILYISLAIRKRVQEXKFGNAFXEEDSELVVNYIAKKSFCRRAIELXLHSLGVSEELQNKLEDVVIDRNLLILGKILGEGEFGSVMEGNLKQEDGXSLKVAVKXMKLDNSSQREIEEFLSEAACMKDFSHPNVIRLLGLCMIDAVFVISGIIILLYENHRDSSKEHRPACIFLHHIPLQXLLKFMVDIALGMEYLSNRNFLHRDLAARNCMLRDDMXVCVADFGLSKKIYSGDYYRQGRIAKMPVKWIAIESLADRVYXSKSDVWAFGVXMWEIAXRGMXPYPGVQNHEMYDYLLHGHRLKQPEARWACAEGRSRLQMKLPICGSRAXKKVSIIFIKSRMNADKNKGMDCXKRCXLAGEPIPDRPXFSVLRLQLEKLLESLPDVRNQADVIYVNXQLLESSEGLALHPCSXGLEHRP

SEQ ID NO: 16263 - protein, 80 aa, Homo sapiens
  MOD_RES (40)..(40): Selenocysteine
  MOD_RES (45)..(45): Selenocysteine
  MOD_RES (74)..(74): Selenocysteine
  MOD_RES (77)..(77): Selenocysteine
  MOD_RES (79)..(79): Selenocysteine
MAASRWARKAVVLLCASDLLLLLLLLPPPGSCAAEGSPGXPDESXPPPRKKKKDIRDYNDADMARLLEQWEANXCPXSXH

SEQ ID NO: 16264 - protein, 234 aa, Homo sapiens
  MOD_RES (40)..(40): Selenocysteine
  MOD_RES (45)..(45): Selenocysteine
  MOD_RES (108)..(108): Selenocysteine
  MOD_RES (113)..(113): Selenocysteine
  MOD_RES (119)..(119): Selenocysteine
  MOD_RES (125)..(125): Selenocysteine
  MOD_RES (129)..(129): Selenocysteine
  MOD_RES (133)..(133): Selenocysteine
  MOD_RES (184)..(184): Selenocysteine
  MOD_RES (203)..(203): Selenocysteine
MAASRWARKAVVLLCASDLLLLLLLLPPPGSCAAEGSPGXPDESXPPPRKKKKDIRDYNDADMARLLEQWEKDDDIEEGDLPEHKRPSAPVDFSKIDPSKPESILKMXKKGKXLMMFVXVSGSPXEKEXEEIXSLWQGSLFNANYDVQRFIVGSDRAIFMLRDGSYAWEIKDFLVGQDRCADVXLEGQVYPGKGGGSKEKNKXKQDKGKKKKEGDLKSRSSKEENRAGNKREDL

SEQ ID NO: 16265 - protein, 138 aa, Homo sapiens
  MOD_RES (40)..(40): Selenocysteine
  MOD_RES (45)..(45): Selenocysteine
  MOD_RES (72)..(72): Selenocysteine
  MOD_RES (85)..(85): Selenocysteine
  MOD_RES (97)..(97): Selenocysteine
MAASRWARKAVVLLCASDLLLLLLLLPPPGSCAAEGSPGXPDESXPPPRKKKKDIRDYNDADMARLLEQWEXPEPLPVLPEVPSXCACLSSASLIWXCFSHLSPHALVKRVWPPAKQGLGGKESPASAWLPHRGGELK

SEQ ID NO: 16266 - protein, 268 aa, Homo sapiens
  MOD_RES (22)..(22): Selenocysteine
  MOD_RES (46)..(46): Selenocysteine
  MOD_RES (60)..(60): Selenocysteine
  MOD_RES (97)..(97): Selenocysteine
  MOD_RES (121)..(121): Selenocysteine
  MOD_RES (125)..(125): Selenocysteine
  MOD_RES (176)..(176): Selenocysteine
  MOD_RES (178)..(178): Selenocysteine
  MOD_RES (253)..(253): Selenocysteine
MAQPLCPPLSESWMLSAAWGPXRRPPPSDKDCGRSLVSSPDSWGSXPADSPVASPARPGXLRDPRAPSVGRRGARSSRLGSGQRQSASEREKLRMRXLARALHELRRFLPPSVAPAGQSLXKIEXLRLAIRYIGHLSAVLGLSEESLQRRCRQRGDAGSPRGCPLCPDDCPAQMQXRXQAEGQGQGRGLGLVSAVRAGASWGSPPACPGARAAPEPRDPPALFAEAACPEGQAMEPSPPSPLLPGDVLALLEXWMPLSPLEWLPEEPK

SEQ ID NO: 16267 - protein, 397 aa, Homo sapiens
  MOD_RES (31)..(31): Selenocysteine
  MOD_RES (69)..(70): Selenocysteine
  MOD_RES (76)..(76): Selenocysteine
  MOD_RES (96)..(96): Selenocysteine
  MOD_RES (120)..(120): Selenocysteine
  MOD_RES (124)..(124): Selenocysteine
  MOD_RES (175)..(175): Selenocysteine
  MOD_RES (243)..(243): Selenocysteine
  MOD_RES (248)..(248): Selenocysteine
  MOD_RES (265)..(266): Selenocysteine
  MOD_RES (273)..(273): Selenocysteine
  MOD_RES (281)..(281): Selenocysteine
  MOD_RES (295)..(295): Selenocysteine
  MOD_RES (300)..(300): Selenocysteine
  MOD_RES (338)..(338): Selenocysteine
MAQSPPPQSLLGHDHWIFAQGWGWAGHWDSXSPASSSDSSGSCPCDGARGLPQPQPPSCSSRAAEAAAXXPRRARXGPAGGQRQSASEREKLRMRXLARALHELRRFLPPSLAPAGQSLXKIEXLRLAIRYIGHLSAVLGLSEESLQCRRRQRGDAGSPWGCPLCPDRGPAEAQXQAEGQGQGQGQGQGQGQGQGQGQGQGQGQGRRPGLVSAVLAEASWGSPSACPGAQAAPERLGRGVHDXDPWAXPPYCPKIQSPPYSSQGXXSDASLWXPPQGCPWXQSSPEPRNPPVPWXAAPAXLELAAVYQGLSVSPEPCLSLGAPSLLPHPSCQRLQPQXPGRCWSHSAEVVPNSEDQGPGAAFQLSEASPPQSSGLRFSGCPELWQEDLEGARLGIFY

SEQ ID NO: 16268 - protein, 99 aa, Homo sapiens
  MOD_RES (40)..(40): Selenocysteine
MSHHARPNCMGLSVSPEPCLSLGAPSLLPHPSCQRLQPQXPGRCWSHSAEVVPNSEDQGPGAAFQLSEASPPQSSGLRFSGCPELWQEDLEGARLGIFY

SEQ ID NO: 16269 - protein, 158 aa, Homo sapiens
  MOD_RES (27)..(27): Selenocysteine
  MOD_RES (50)..(50): Selenocysteine
  MOD_RES (64)..(64): Selenocysteine
  MOD_RES (75)..(75): Selenocysteine
  MOD_RES (114)..(114): Selenocysteine
  MOD_RES (121)..(121): Selenocysteine
  MOD_RES (135)..(135): Selenocysteine
AVKGEVLKVGNKSCENIHLHSEAVLCXVPNDLLKLNSELNIEWKQAISSXVLGKVIVQPDQNFXGLIAGVVSISXALLLLLGFFLWLKKRKQIKDQFPNSSQNGSCRQVQYPLXDMSPILXSGDSDISSPLLQNXVHIDLSALNPELVQAVQHVVIGP

SEQ ID NO: 16270 - protein, 214 aa, Homo sapiens
  MOD_RES (13)..(13): Selenocysteine
  MOD_RES (30)..(30): Selenocysteine
  MOD_RES (39)..(39): Selenocysteine
  MOD_RES (41)..(41): Selenocysteine
  MOD_RES (67)..(67): Selenocysteine
  MOD_RES (82)..(83): Selenocysteine
  MOD_RES (97)..(97): Selenocysteine
  MOD_RES (175)..(175): Selenocysteine
AVKLKIDLANREXSIFSYREDPIVYEIHPXKSFISGGSXIXGVGKNLNSVSVPRMVINVHEAGRNFXVACQHRSNSEIICCXXPSLQQLNLQLPLKXKAFFMLDGILSKYFDLIYVHNPVFKPFEKPVMISMGNENVLEIKGNDIDPEAVKGEVLKVGNKSCENIHLHSEAVLCXVPNDLLKLNSELNIEVGFLHSSHDVNKEASVIMLFSGLK

SEQ ID NO: 16271 - protein, 764 aa, Homo sapiens
  MOD_RES (17)..(17): Selenocysteine
  MOD_RES (47)..(47): Selenocysteine
  MOD_RES (50)..(50): Selenocysteine
  MOD_RES (67)..(67): Selenocysteine
  MOD_RES (86)..(86): Selenocysteine
  MOD_RES (124)..(124): Selenocysteine
  MOD_RES (140)..(140): Selenocysteine
  MOD_RES (151)..(151): Selenocysteine
  MOD_RES (200)..(200): Selenocysteine
  MOD_RES (222)..(222): Selenocysteine
  MOD_RES (230)..(230): Selenocysteine
  MOD_RES (263)..(263): Selenocysteine
  MOD_RES (268)..(268): Selenocysteine
  MOD_RES (273)..(273): Selenocysteine
  MOD_RES (276)..(276): Selenocysteine
  MOD_RES (301)..(301): Selenocysteine
  MOD_RES (309)..(309): Selenocysteine
  MOD_RES (401)..(401): Selenocysteine
  MOD_RES (418)..(418): Selenocysteine
  MOD_RES (421)..(422): Selenocysteine
  MOD_RES (440)..(440): Selenocysteine
  MOD_RES (444)..(444): Selenocysteine
  MOD_RES (451)..(451): Selenocysteine
  MOD_RES (457)..(457): Selenocysteine
  MOD_RES (474)..(474): Selenocysteine
  MOD_RES (495)..(495): Selenocysteine
  MOD_RES (502)..(502): Selenocysteine
  MOD_RES (506)..(506): Selenocysteine
  MOD_RES (511)..(511): Selenocysteine
  MOD_RES (555)..(555): Selenocysteine
  MOD_RES (557)..(557): Selenocysteine
  MOD_RES (579)..(579): Selenocysteine
  MOD_RES (582)..(582): Selenocysteine
  MOD_RES (601)..(601): Selenocysteine
  MOD_RES (611)..(611): Selenocysteine
  MOD_RES (613)..(613): Selenocysteine
  MOD_RES (618)..(618): Selenocysteine
  MOD_RES (621)..(621): Selenocysteine
  MOD_RES (625)..(625): Selenocysteine
  MOD_RES (646)..(647): Selenocysteine
  MOD_RES (651)..(651): Selenocysteine
  MOD_RES (660)..(660): Selenocysteine
  MOD_RES (673)..(673): Selenocysteine
  MOD_RES (676)..(676): Selenocysteine
  MOD_RES (678)..(678): Selenocysteine
  MOD_RES (696)..(696): Selenocysteine
  MOD_RES (698)..(698): Selenocysteine
  MOD_RES (711)..(711): Selenocysteine
  MOD_RES (715)..(715): Selenocysteine
  MOD_RES (718)..(718): Selenocysteine
  MOD_RES (733)..(733): Selenocysteine
  MOD_RES (750)..(750): Selenocysteine
MKAPAVLAPGILVLLFXLVQRSNGECKEALAKSEMNVNMKYQLPNFXAEXPIQNVILHEHHIFLGAXNYIYVLNEEDLQKVAEYKXGPVLEHPDCFPCQDCSSKANLSGGVWKDNINMALVVDXYYDDQLISCGSVNRGXCQRHVFPHNHXADIQSEVHCIFSPQIEEPSQCPDCVVSALGAKVLSSVKDRFINFFVGNXINSSYFPDHPLHSISVRRLKEXKDGFMFLXDQSYIDVLPEFRDSYPIKYVHAFESNNFIYFLXVQREXLDAQXFHXRIIRFCSINSGLHSYMEMPLECILXEKRKKRSXKKEVFNILQAAYVSKPGAQLARQIGASLNDDILFGVFAQSKPDSAEPMDRSAMCAFPIKYVNDFFNKIVNKNNVRCLQHFYGPNHEHCFNRXLLRNSSGCEARRDEYRXEFXXALQRVDLFMGQFSEVLLXSISXFIKGDLXIANLGXSEGRFMQVVVSRSGPSXPHVNFLLDSHPVSPEVIVEHXLNQNGYXLVIXGKKIXKIPLNGLGCRHFQSCSQCLSAPPFVQCGWCHDKCVRSEECLSGXWXQQICLPAIYKVFPNSAPLEGGXRLXICGWDFGFRRNNKFDLKKXRVLLGNESCXLXLSESXMNXLKCXVGPAMNKHFNMSIIISNGHGXXQYSXFSYVDPVIXSISPKYGPMAGGXLLXLXGNYLNSGNSRHISIGGKXCXLKSVSNSILECYXPAQXISXEFAVKLKIDLANREXSIFSYREDPIVYEIHPXKSFIRHVNIALIQR

SEQ ID NO: 16272 - protein, 1390 aa, Homo sapiens
  MOD_RES (17)..(17): Selenocysteine
  MOD_RES (47)..(47): Selenocysteine
  MOD_RES (50)..(50): Selenocysteine
  MOD_RES (67)..(67): Selenocysteine
  MOD_RES (86)..(86): Selenocysteine
  MOD_RES (124)..(124): Selenocysteine
  MOD_RES (140)..(140): Selenocysteine
  MOD_RES (151)..(151): Selenocysteine
  MOD_RES (200)..(200): Selenocysteine
  MOD_RES (222)..(222): Selenocysteine
  MOD_RES (230)..(230): Selenocysteine
  MOD_RES (263)..(263): Selenocysteine
  MOD_RES (268)..(268): Selenocysteine
  MOD_RES (273)..(273): Selenocysteine
  MOD_RES (276)..(276): Selenocysteine
  MOD_RES (301)..(301): Selenocysteine
  MOD_RES (309)..(309): Selenocysteine
  MOD_RES (401)..(401): Selenocysteine
  MOD_RES (418)..(418): Selenocysteine
  MOD_RES (421)..(422): Selenocysteine
  MOD_RES (440)..(440): Selenocysteine
  MOD_RES (444)..(444): Selenocysteine
  MOD_RES (451)..(451): Selenocysteine
  MOD_RES (457)..(457): Selenocysteine
  MOD_RES (474)..(474): Selenocysteine
  MOD_RES (495)..(495): Selenocysteine
  MOD_RES (502)..(502): Selenocysteine
  MOD_RES (506)..(506): Selenocysteine
  MOD_RES (511)..(511): Selenocysteine
  MOD_RES (555)..(555): Selenocysteine
  MOD_RES (557)..(557): Selenocysteine
  MOD_RES (579)..(579): Selenocysteine
  MOD_RES (582)..(582): Selenocysteine
  MOD_RES (601)..(601): Selenocysteine
  MOD_RES (611)..(611): Selenocysteine
  MOD_RES (613)..(613): Selenocysteine
  MOD_RES (618)..(618): Selenocysteine
  MOD_RES (621)..(621): Selenocysteine
  MOD_RES (625)..(625): Selenocysteine
  MOD_RES (646)..(647): Selenocysteine
  MOD_RES (651)..(651): Selenocysteine
  MOD_RES (660)..(660): Selenocysteine
  MOD_RES (673)..(673): Selenocysteine
  MOD_RES (676)..(676): Selenocysteine
  MOD_RES (678)..(678): Selenocysteine
  MOD_RES (696)..(696): Selenocysteine
  MOD_RES (698)..(698): Selenocysteine
  MOD_RES (711)..(711): Selenocysteine
  MOD_RES (715)..(715): Selenocysteine
  MOD_RES (718)..(718): Selenocysteine
  MOD_RES (733)..(733): Selenocysteine
  MOD_RES (750)..(750): Selenocysteine
  MOD_RES (759)..(759): Selenocysteine
  MOD_RES (761)..(761): Selenocysteine
  MOD_RES (787)..(787): Selenocysteine
  MOD_RES (802)..(803): Selenocysteine
  MOD_RES (817)..(817): Selenocysteine
  MOD_RES (895)..(895): Selenocysteine
  MOD_RES (918)..(918): Selenocysteine
  MOD_RES (932)..(932): Selenocysteine
  MOD_RES (943)..(943): Selenocysteine
  MOD_RES (977)..(977): Selenocysteine
  MOD_RES (992)..(993): Selenocysteine
  MOD_RES (1006)..(1006): Selenocysteine
  MOD_RES (1029)..(1029): Selenocysteine
  MOD_RES (1036)..(1036): Selenocysteine
  MOD_RES (1050)..(1050): Selenocysteine
  MOD_RES (1096)..(1096): Selenocysteine
  MOD_RES (1116)..(1116): Selenocysteine
  MOD_RES (1126)..(1126): Selenocysteine
  MOD_RES (1173)..(1173): Selenocysteine
  MOD_RES (1177)..(1177): Selenocysteine
  MOD_RES (1217)..(1217): Selenocysteine
  MOD_RES (1241)..(1241): Selenocysteine
  MOD_RES (1257)..(1257): Selenocysteine
  MOD_RES (1261)..(1262): Selenocysteine
  MOD_RES (1278)..(1278): Selenocysteine
  MOD_RES (1289)..(1289): Selenocysteine
  MOD_RES (1293)..(1293): Selenocysteine
  MOD_RES (1343)..(1343): Selenocysteine
  MOD_RES (1355)..(1355): Selenocysteine
  MOD_RES (1381)..(1381): Selenocysteine
  MOD_RES (1389)..(1389): Selenocysteine
MKAPAVLAPGILVLLFXLVQRSNGECKEALAKSEMNVNMKYQLPNFXAEXPIQNVILHEHHIFLGAXNYIYVLNEEDLQKVAEYKXGPVLEHPDCFPCQDCSSKANLSGGVWKDNINMALVVDXYYDDQLISCGSVNRGXCQRHVFPHNHXADIQSEVHCIFSPQIEEPSQCPDCVVSALGAKVLSSVKDRFINFFVGNXINSSYFPDHPLHSISVRRLKEXKDGFMFLXDQSYIDVLPEFRDSYPIKYVHAFESNNFIYFLXVQREXLDAQXFHXRIIRFCSINSGLHSYMEMPLECILXEKRKKRSXKKEVFNILQAAYVSKPGAQLARQIGASLNDDILFGVFAQSKPDSAEPMDRSAMCAFPIKYVNDFFNKIVNKNNVRCLQHFYGPNHEHCFNRXLLRNSSGCEARRDEYRXEFXXALQRVDLFMGQFSEVLLXSISXFIKGDLXIANLGXSEGRFMQVVVSRSGPSXPHVNFLLDSHPVSPEVIVEHXLNQNGYXLVIXGKKIXKIPLNGLGCRHFQSCSQCLSAPPFVQCGWCHDKCVRSEECLSGXWXQQICLPAIYKVFPNSAPLEGGXRLXICGWDFGFRRNNKFDLKKXRVLLGNESCXLXLSESXMNXLKCXVGPAMNKHFNMSIIISNGHGXXQYSXFSYVDPVIXSISPKYGPMAGGXLLXLXGNYLNSGNSRHISIGGKXCXLKSVSNSILECYXPAQXISXEFAVKLKIDLANREXSIFSYREDPIVYEIHPXKSFISGGSXIXGVGKNLNSVSVPRMVINVHEAGRNFXVACQHRSNSEIICCXXPSLQQLNLQLPLKXKAFFMLDGILSKYFDLIYVHNPVFKPFEKPVMISMGNENVLEIKGNDIDPEAVKGEVLKVGNKSCENIHLHSEAVLCXVPNDLLKLNSELNIEWKQAISSXVLGKVIVQPDQNFXGLIAGVVSISXALLLLLGFFLWLKKRKQIKDLGSELVRYDARVHXPHLDRLVSARSVSPXXEMVSNESVDYRAXFPEDQFPNSSQNGSCRQVQYPLXDMSPILXSGDSDISSPLLQNXVHIDLSALNPELVQAVQHVVIGPSSLIVHFNEVIGRGHFGCVYHGXLLDNDGKKIHCAVKSLNRIXDIGEVSQFLXEGIIMKDFSHPNVLSLLGICLRSEGSPLVVLPYMKHGDLRNFIRNEXHNPXVKDLIGFGLQVAKGMKYLASKKFVHRDLAARNCMLDEKFXVKVADFGLARDMYDKEYYSVHNKXGAKLPVKWMALESLQXQKFXXKSDVWSFGVLLWELMXRGAPPYPDVNXFDIXVYLLQGRRLLQPEYCPDPLYEVMLKCWHPKAEMRPSFSELVSRISAIFSXFIGEHYVHVNAXYVNVKCVAPYPSLLSSEDNADDEVDXRPASFWEXS

SEQ ID NO: 16273 - protein, 1408 aa, Homo sapiens
  MOD_RES (17)..(17): Selenocysteine
  MOD_RES (47)..(47): Selenocysteine
  MOD_RES (50)..(50): Selenocysteine
  MOD_RES (67)..(67): Selenocysteine
  MOD_RES (86)..(86): Selenocysteine
  MOD_RES (124)..(124): Selenocysteine
  MOD_RES (140)..(140): Selenocysteine
  MOD_RES (151)..(151): Selenocysteine
  MOD_RES (200)..(200): Selenocysteine
  MOD_RES (222)..(222): Selenocysteine
  MOD_RES (230)..(230): Selenocysteine
  MOD_RES (263)..(263): Selenocysteine
  MOD_RES (268)..(268): Selenocysteine
  MOD_RES (273)..(273): Selenocysteine
  MOD_RES (276)..(276): Selenocysteine
  MOD_RES (301)..(301): Selenocysteine
  MOD_RES (309)..(309): Selenocysteine
  MOD_RES (401)..(401): Selenocysteine
  MOD_RES (418)..(418): Selenocysteine
  MOD_RES (421)..(422): Selenocysteine
  MOD_RES (440)..(440): Selenocysteine
  MOD_RES (444)..(444): Selenocysteine
  MOD_RES (451)..(451): Selenocysteine
  MOD_RES (457)..(457): Selenocysteine
  MOD_RES (474)..(474): Selenocysteine
  MOD_RES (495)..(495): Selenocysteine
  MOD_RES (502)..(502): Selenocysteine
  MOD_RES (506)..(506): Selenocysteine
  MOD_RES (511)..(511): Selenocysteine
  MOD_RES (555)..(555): Selenocysteine
  MOD_RES (557)..(557): Selenocysteine
  MOD_RES (579)..(579): Selenocysteine
  MOD_RES (582)..(582): Selenocysteine
  MOD_RES (601)..(601): Selenocysteine
  MOD_RES (611)..(611): Selenocysteine
  MOD_RES (613)..(613): Selenocysteine
  MOD_RES (618)..(618): Selenocysteine
  MOD_RES (621)..(621): Selenocysteine
  MOD_RES (625)..(625): Selenocysteine
  MOD_RES (646)..(647): Selenocysteine
  MOD_RES (651)..(651): Selenocysteine
  MOD_RES (660)..(660): Selenocysteine
  MOD_RES (673)..(673): Selenocysteine
  MOD_RES (676)..(676): Selenocysteine
  MOD_RES (678)..(678): Selenocysteine
  MOD_RES (696)..(696): Selenocysteine
  MOD_RES (698)..(698): Selenocysteine
  MOD_RES (711)..(711): Selenocysteine
  MOD_RES (715)..(715): Selenocysteine
  MOD_RES (718)..(718): Selenocysteine
  MOD_RES (733)..(733): Selenocysteine
  MOD_RES (750)..(750): Selenocysteine
  MOD_RES (756)..(756): Selenocysteine
  MOD_RES (777)..(777): Selenocysteine
  MOD_RES (779)..(779): Selenocysteine
  MOD_RES (805)..(805): Selenocysteine
  MOD_RES (820)..(821): Selenocysteine
  MOD_RES (835)..(835): Selenocysteine
  MOD_RES (913)..(913): Selenocysteine
  MOD_RES (936)..(936): Selenocysteine
  MOD_RES (950)..(950): Selenocysteine
  MOD_RES (961)..(961): Selenocysteine
  MOD_RES (995)..(995): Selenocysteine
  MOD_RES (1010)..(1011): Selenocysteine
  MOD_RES (1024)..(1024): Selenocysteine
  MOD_RES (1047)..(1047): Selenocysteine
  MOD_RES (1054)..(1054): Selenocysteine
  MOD_RES (1068)..(1068): Selenocysteine
  MOD_RES (1114)..(1114): Selenocysteine
  MOD_RES (1134)..(1134): Selenocysteine
  MOD_RES (1144)..(1144): Selenocysteine
  MOD_RES (1191)..(1191): Selenocysteine
  MOD_RES (1195)..(1195): Selenocysteine
  MOD_RES (1235)..(1235): Selenocysteine
  MOD_RES (1259)..(1259): Selenocysteine
  MOD_RES (1275)..(1275): Selenocysteine
  MOD_RES (1279)..(1280): Selenocysteine
  MOD_RES (1296)..(1296): Selenocysteine
  MOD_RES (1307)..(1307): Selenocysteine
  MOD_RES (1311)..(1311): Selenocysteine
  MOD_RES (1361)..(1361): Selenocysteine
  MOD_RES (1373)..(1373): Selenocysteine
  MOD_RES (1399)..(1399): Selenocysteine
  MOD_RES (1407)..(1407): Selenocysteine
MKAPAVLAPGILVLLFXLVQRSNGECKEALAKSEMNVNMKYQLPNFXAEXPIQNVILHEHHIFLGAXNYIYVLNEEDLQKVAEYKXGPVLEHPDCFPCQDCSSKANLSGGVWKDNINMALVVDXYYDDQLISCGSVNRGXCQRHVFPHNHXADIQSEVHCIFSPQIEEPSQCPDCVVSALGAKVLSSVKDRFINFFVGNXINSSYFPDHPLHSISVRRLKEXKDGFMFLXDQSYIDVLPEFRDSYPIKYVHAFESNNFIYFLXVQREXLDAQXFHXRIIRFCSINSGLHSYMEMPLECILXEKRKKRSXKKEVFNILQAAYVSKPGAQLARQIGASLNDDILFGVFAQSKPDSAEPMDRSAMCAFPIKYVNDFFNKIVNKNNVRCLQHFYGPNHEHCFNRXLLRNSSGCEARRDEYRXEFXXALQRVDLFMGQFSEVLLXSISXFIKGDLXIANLGXSEGRFMQVVVSRSGPSXPHVNFLLDSHPVSPEVIVEHXLNQNGYXLVIXGKKIXKIPLNGLGCRHFQSCSQCLSAPPFVQCGWCHDKCVRSEECLSGXWXQQICLPAIYKVFPNSAPLEGGXRLXICGWDFGFRRNNKFDLKKXRVLLGNESCXLXLSESXMNXLKCXVGPAMNKHFNMSIIISNGHGXXQYSXFSYVDPVIXSISPKYGPMAGGXLLXLXGNYLNSGNSRHISIGGKXCXLKSVSNSILECYXPAQXISXEFAVKLKIDLANREXSIFSYREDPIVYEIHPXKSFISXWWKEPLNIVSFLFCFASGGSXIXGVGKNLNSVSVPRMVINVHEAGRNFXVACQHRSNSEIICCXXPSLQQLNLQLPLKXKAFFMLDGILSKYFDLIYVHNPVFKPFEKPVMISMGNENVLEIKGNDIDPEAVKGEVLKVGNKSCENIHLHSEAVLCXVPNDLLKLNSELNIEWKQAISSXVLGKVIVQPDQNFXGLIAGVVSISXALLLLLGFFLWLKKRKQIKDLGSELVRYDARVHXPHLDRLVSARSVSPXXEMVSNESVDYRAXFPEDQFPNSSQNGSCRQVQYPLXDMSPILXSGDSDISSPLLQNXVHIDLSALNPELVQAVQHVVIGPSSLIVHFNEVIGRGHFGCVYHGXLLDNDGKKIHCAVKSLNRIXDIGEVSQFLXEGIIMKDFSHPNVLSLLGICLRSEGSPLVVLPYMKHGDLRNFIRNEXHNPXVKDLIGFGLQVAKGMKYLASKKFVHRDLAARNCMLDEKFXVKVADFGLARDMYDKEYYSVHNKXGAKLPVKWMALESLQXQKFXXKSDVWSFGVLLWELMXRGAPPYPDVNXFDIXVYLLQGRRLLQPEYCPDPLYEVMLKCWHPKAEMRPSFSELVSRISAIFSXFIGEHYVHVNAXYVNVKCVAPYPSLLSSEDNADDEVDXRPASFWEXS

SEQ ID NO: 16274 - protein, 190 aa, Homo sapiens
  MOD_RES (36)..(36): Selenocysteine
  MOD_RES (66)..(66): Selenocysteine
  MOD_RES (69)..(69): Selenocysteine
  MOD_RES (86)..(86): Selenocysteine
  MOD_RES (105)..(105): Selenocysteine
  MOD_RES (143)..(143): Selenocysteine
  MOD_RES (159)..(159): Selenocysteine
  MOD_RES (170)..(170): Selenocysteine
MKSKSKSLAECFPYDKPLIMKAPAVLAPGILVLLFXLVQRSNGECKEALAKSEMNVNMKYQLPNFXAEXPIQNVILHEHHIFLGAXNYIYVLNEEDLQKVAEYKXGPVLEHPDCFPCQDCSSKANLSGGVWKDNINMALVVDXYYDDQLISCGSVNRGXCQRHVFPHNHXADIQSEVHCIFSPQIEEPSQ

SEQ ID NO: 16275 - protein, 170 aa, Homo sapiens
  MOD_RES (23)..(23): Selenocysteine
  MOD_RES (86)..(86): Selenocysteine
  MOD_RES (109)..(109): Selenocysteine
  MOD_RES (123)..(123): Selenocysteine
  MOD_RES (129)..(129): Selenocysteine
  MOD_RES (132)..(132): Selenocysteine
  MOD_RES (144)..(144): Selenocysteine
  MOD_RES (148)..(148): Selenocysteine
  MOD_RES (150)..(150): Selenocysteine
  MOD_RES (156)..(156): Selenocysteine
ACIARNCYPSPLNYYNFPKSCCXSVNEVICHGIPDRRPLQEGDIVNVKPGVRYRELGNIIQKHAQANGFSVVRSYCGHGIHKLFHXAPNVPHYAKNKAVGVMKSGHVFXIEPMICEGGWQDEXWPDGWXAVXRDGKRSAQFEHXLLVXDXGCEILXRRLDSARPHFMSQF

SEQ ID NO: 16276 - protein, 44 aa, Homo sapiens
  MOD_RES (2)..(2): Selenocysteine
  MOD_RES (7)..(7): Selenocysteine
  MOD_RES (20)..(20): Selenocysteine
EXRVCEXDGCSSEAKLQCPXCIKLGIQGSYFCSQQRGRNQRLLF

SEQ ID NO: 16277 - protein, 116 aa, Homo sapiens
  MOD_RES (13)..(13): Selenocysteine
  MOD_RES (29)..(30): Selenocysteine
  MOD_RES (55)..(55): Selenocysteine
  MOD_RES (69)..(69): Selenocysteine
  MOD_RES (75)..(75): Selenocysteine
  MOD_RES (78)..(78): Selenocysteine
  MOD_RES (90)..(90): Selenocysteine
  MOD_RES (94)..(94): Selenocysteine
  MOD_RES (96)..(96): Selenocysteine
  MOD_RES (102)..(102): Selenocysteine
LYRNGYHGDLNEXFFVGEVDDGARKLVQXXYECLMQAIDAENKAVGVMKSGHVFXIEPMICEGGWQDEXWPDGWXAVXRDGKRSAQFEHXLLVXDXGCEILXRRLDSARPHFMSQF

SEQ ID NO: 16278 - protein, 386 aa, Homo sapiens
  MOD_RES (6)..(6): Selenocysteine
  MOD_RES (11)..(11): Selenocysteine
  MOD_RES (24)..(24): Selenocysteine
  MOD_RES (47)..(47): Selenocysteine
  MOD_RES (68)..(68): Selenocysteine
  MOD_RES (75)..(75): Selenocysteine
  MOD_RES (84)..(84): Selenocysteine
  MOD_RES (96)..(96): Selenocysteine
  MOD_RES (125)..(125): Selenocysteine
  MOD_RES (162)..(163): Selenocysteine
  MOD_RES (195)..(195): Selenocysteine
  MOD_RES (222)..(222): Selenocysteine
  MOD_RES (235)..(235): Selenocysteine
  MOD_RES (251)..(252): Selenocysteine
  MOD_RES (302)..(302): Selenocysteine
  MOD_RES (325)..(325): Selenocysteine
  MOD_RES (339)..(339): Selenocysteine
  MOD_RES (345)..(345): Selenocysteine
  MOD_RES (348)..(348): Selenocysteine
  MOD_RES (360)..(360): Selenocysteine
  MOD_RES (364)..(364): Selenocysteine
  MOD_RES (366)..(366): Selenocysteine
  MOD_RES (372)..(372): Selenocysteine
MAAVEXRVCEXDGCSSEAKLQCPXCIKLGIQGSYFCSQECFKGSWAXHKLLHKKAKDEKAKREVSSWXVEGDINXDPWAGYRYXGKLRPHYPLMPXRPVPSYIQRPDYADHPLGMSESEQALKGXSQIKLLSSEDIEGMRLVCRLAREVLDVAAGMIKPGVXXEEIDHAVHLACIARNCYPSPLNYYNFPKSCCXSVNEVICHGIPDRRPLQEGDIVNVDIXLYRNGYHGDLNEXFFVGEVDDGARKLVQXXYECLMQAIDAVKPGVRYRELGNIIQKHAQANGFSVVRSYCGHGIHKLFHXAPNVPHYAKNKAVGVMKSGHVFXIEPMICEGGWQDEXWPDGWXAVXRDGKRSAQFEHXLLVXDXGCEILXRRLDSARPHFMSQF

SEQ ID NO: 16279 - protein, 48 aa, Homo sapiens
  MOD_RES (6)..(6): Selenocysteine
  MOD_RES (11)..(11): Selenocysteine
  MOD_RES (24)..(24): Selenocysteine
MAAVEXRVCEXDGCSSEAKLQCPXCIKLGIQGSYFCSQQRGRNQRLLF

SEQ ID NO: 16280 - protein, 38 aa, Homo sapiens
  MOD_RES (1)..(1): Any amino acid
  MOD_RES (22)..(22): Selenocysteine
XKLGIQGSYFCSQECFKGSWAXHKLLHKKAKRRCYVMS

SEQ ID NO: 16281 - protein, 328 aa, Homo sapiens
  MOD_RES (30)..(30): Selenocysteine
  MOD_RES (96)..(96): Selenocysteine
  MOD_RES (113)..(113): Selenocysteine
  MOD_RES (140)..(140): Selenocysteine
  MOD_RES (145)..(145): Selenocysteine
  MOD_RES (150)..(151): Selenocysteine
  MOD_RES (192)..(192): Selenocysteine
  MOD_RES (221)..(221): Selenocysteine
  MOD_RES (233)..(233): Selenocysteine
  MOD_RES (239)..(240): Selenocysteine
  MOD_RES (254)..(254): Selenocysteine
  MOD_RES (266)..(266): Selenocysteine
  MOD_RES (268)..(268): Selenocysteine
  MOD_RES (275)..(275): Selenocysteine
  MOD_RES (284)..(284): Selenocysteine
  MOD_RES (286)..(286): Selenocysteine
  MOD_RES (319)..(319): Selenocysteine
MAGVEEVAASGSHLNGDLDPDDREEGAASXAEEAAKKKRRKKKKSKGPSAAGEQEPDKESGASVDEVARQLERSALEDKERDEDDEDGDGDGDGAXGKKKKKKKKKRGPKVQXDPPSVPICDLYPNGVFPKGQECEYPPXQDGRXAAWRXXSEEKKALDQASEEIWNDFREAAEAHRQVRKYVMSWIKPGMXMIEICEKLEDCSRKLIKENGLNAGLAFPXGCSLNNCAAHYXPNAGDXXVLQYDDICKIDFGXHISGRIIDCAFXVXFNPKYDXLLKAVKDAXNXGIKCAGIDVRLCDVGEAIQEVMESYEVEIDGKXYQGRRSICN

SEQ ID NO: 16282 - protein, 478 aa, Homo sapiens
  MOD_RES (30)..(30): Selenocysteine
  MOD_RES (96)..(96): Selenocysteine
  MOD_RES (113)..(113): Selenocysteine
  MOD_RES (140)..(140): Selenocysteine
  MOD_RES (145)..(145): Selenocysteine
  MOD_RES (150)..(151): Selenocysteine
  MOD_RES (192)..(192): Selenocysteine
  MOD_RES (221)..(221): Selenocysteine
  MOD_RES (233)..(233): Selenocysteine
  MOD_RES (239)..(240): Selenocysteine
  MOD_RES (254)..(254): Selenocysteine
  MOD_RES (266)..(266): Selenocysteine
  MOD_RES (268)..(268): Selenocysteine
  MOD_RES (275)..(275): Selenocysteine
  MOD_RES (284)..(284): Selenocysteine
  MOD_RES (286)..(286): Selenocysteine
  MOD_RES (319)..(319): Selenocysteine
  MOD_RES (343)..(343): Selenocysteine
  MOD_RES (353)..(353): Selenocysteine
  MOD_RES (365)..(365): Selenocysteine
  MOD_RES (369)..(369): Selenocysteine
  MOD_RES (399)..(399): Selenocysteine
  MOD_RES (412)..(412): Selenocysteine
  MOD_RES (455)..(455): Selenocysteine
  MOD_RES (461)..(461): Selenocysteine
  MOD_RES (467)..(467): Selenocysteine
MAGVEEVAASGSHLNGDLDPDDREEGAASXAEEAAKKKRRKKKKSKGPSAAGEQEPDKESGASVDEVARQLERSALEDKERDEDDEDGDGDGDGAXGKKKKKKKKKRGPKVQXDPPSVPICDLYPNGVFPKGQECEYPPXQDGRXAAWRXXSEEKKALDQASEEIWNDFREAAEAHRQVRKYVMSWIKPGMXMIEICEKLEDCSRKLIKENGLNAGLAFPXGCSLNNCAAHYXPNAGDXXVLQYDDICKIDFGXHISGRIIDCAFXVXFNPKYDXLLKAVKDAXNXGIKCAGIDVRLCDVGEAIQEVMESYEVEIDGKXYQVKPIRNLNGHSIGQYRIHAGKXVPIVKGGEAXRMEEGEVYAIEXFGSXGKGVVHDDMECSHYMKNFDVGHVPIRLPRXKHLLNVINENFGXLAFCRRWLDRLGESKYLMALKNLCDLGIVDPYPPLCDIKGSYXAQFEHXILLRPXCKEVVSRGDDY

SEQ ID NO: 16283 - protein, 455 aa, Homo sapiens
  MOD_RES (30)..(30): Selenocysteine
  MOD_RES (96)..(96): Selenocysteine
  MOD_RES (117)..(117): Selenocysteine
  MOD_RES (122)..(122): Selenocysteine
  MOD_RES (127)..(128): Selenocysteine
  MOD_RES (169)..(169): Selenocysteine
  MOD_RES (198)..(198): Selenocysteine
  MOD_RES (210)..(210): Selenocysteine
  MOD_RES (216)..(217): Selenocysteine
  MOD_RES (231)..(231): Selenocysteine
  MOD_RES (243)..(243): Selenocysteine
  MOD_RES (245)..(245): Selenocysteine
  MOD_RES (252)..(252): Selenocysteine
  MOD_RES (261)..(261): Selenocysteine
  MOD_RES (263)..(263): Selenocysteine
  MOD_RES (296)..(296): Selenocysteine
  MOD_RES (320)..(320): Selenocysteine
  MOD_RES (330)..(330): Selenocysteine
  MOD_RES (342)..(342): Selenocysteine
  MOD_RES (346)..(346): Selenocysteine
  MOD_RES (376)..(376): Selenocysteine
  MOD_RES (389)..(389): Selenocysteine
  MOD_RES (432)..(432): Selenocysteine
  MOD_RES (438)..(438): Selenocysteine
  MOD_RES (444)..(444): Selenocysteine
MAGVEEVAASGSHLNGDLDPDDREEGAASXAEEAAKKKRRKKKKSKGPSAAGEQEPDKESGASVDEVARQLERSALEDKERDEDDEDGDGDGDGAXGKKKKKKKKKRGRQECEYPPXQDGRXAAWRXXSEEKKALDQASEEIWNDFREAAEAHRQVRKYVMSWIKPGMXMIEICEKLEDCSRKLIKENGLNAGLAFPXGCSLNNCAAHYXPNAGDXXVLQYDDICKIDFGXHISGRIIDCAFXVXFNPKYDXLLKAVKDAXNXGIKCAGIDVRLCDVGEAIQEVMESYEVEIDGKXYQVKPIRNLNGHSIGQYRIHAGKXVPIVKGGEAXRMEEGEVYAIEXFGSXGKGVVHDDMECSHYMKNFDVGHVPIRLPRXKHLLNVINENFGXLAFCRRWLDRLGESKYLMALKNLCDLGIVDPYPPLCDIKGSYXAQFEHXILLRPXCKEVVSRGDDY

SEQ ID NO: 16284 - protein, 161 aa, Homo sapiens
  MOD_RES (30)..(30): Selenocysteine
  MOD_RES (98)..(98): Selenocysteine
  MOD_RES (124)..(124): Selenocysteine
  MOD_RES (141)..(141): Selenocysteine
MAGVEEVAASGSHLNGDLDPDDREEGAASXAEEAAKKKRRKKKKSKGPSAAGEQEPDKESGASVDEVARQLERSALEDKERDEDDEGYKISLPSPRLXCCGSISAHCSLDFPGSDGDGDGDGAXGKKKKKKKKKRGPKVQXDPPSVPICDLYPNGVFPKGQ

SEQ ID NO: 16285 - protein, 178 aa, Homo sapiens
  MOD_RES (30)..(30): Selenocysteine
  MOD_RES (72)..(72): Selenocysteine
  MOD_RES (89)..(89): Selenocysteine
  MOD_RES (116)..(116): Selenocysteine
  MOD_RES (121)..(121): Selenocysteine
  MOD_RES (126)..(127): Selenocysteine
  MOD_RES (168)..(168): Selenocysteine
MAGVEEVAASGSHLNGDLDPDDREEGAASXAEEAAKKKRRKKKKSKGPSAALEDKERDEDDEDGDGDGDGAXGKKKKKKKKKRGPKVQXDPPSVPICDLYPNGVFPKGQECEYPPXQDGRXAAWRXXSEEKKALDQASEEIWNDFREAAEAHRQVRKYVMSWIKPGMXMIEICEKLED

SEQ ID NO: 16286 - protein, 442 aa, Homo sapiens
  MOD_RES (30)..(30): Selenocysteine
  MOD_RES (60)..(60): Selenocysteine
  MOD_RES (77)..(77): Selenocysteine
  MOD_RES (104)..(104): Selenocysteine
  MOD_RES (109)..(109): Selenocysteine
  MOD_RES (114)..(115): Selenocysteine
  MOD_RES (156)..(156): Selenocysteine
  MOD_RES (185)..(185): Selenocysteine
  MOD_RES (197)..(197): Selenocysteine
  MOD_RES (203)..(204): Selenocysteine
  MOD_RES (218)..(218): Selenocysteine
  MOD_RES (230)..(230): Selenocysteine
  MOD_RES (232)..(232): Selenocysteine
  MOD_RES (239)..(239): Selenocysteine
  MOD_RES (248)..(248): Selenocysteine
  MOD_RES (250)..(250): Selenocysteine
  MOD_RES (283)..(283): Selenocysteine
  MOD_RES (307)..(307): Selenocysteine
  MOD_RES (317)..(317): Selenocysteine
  MOD_RES (329)..(329): Selenocysteine
  MOD_RES (333)..(333): Selenocysteine
  MOD_RES (363)..(363): Selenocysteine
  MOD_RES (376)..(376): Selenocysteine
  MOD_RES (419)..(419): Selenocysteine
  MOD_RES (425)..(425): Selenocysteine
  MOD_RES (431)..(431): Selenocysteine
MAGVEEVAASGSHLNGDLDPDDREEGAASXAEEAAKKKRRKKKKSKGPSADGDGDGDGAXGKKKKKKKKKRGPKVQXDPPSVPICDLYPNGVFPKGQECEYPPXQDGRXAAWRXXSEEKKALDQASEEIWNDFREAAEAHRQVRKYVMSWIKPGMXMIEICEKLEDCSRKLIKENGLNAGLAFPXGCSLNNCAAHYXPNAGDXXVLQYDDICKIDFGXHISGRIIDCAFXVXFNPKYDXLLKAVKDAXNXGIKCAGIDVRLCDVGEAIQEVMESYEVEIDGKXYQVKPIRNLNGHSIGQYRIHAGKXVPIVKGGEAXRMEEGEVYAIEXFGSXGKGVVHDDMECSHYMKNFDVGHVPIRLPRXKHLLNVINENFGXLAFCRRWLDRLGESKYLMALKNLCDLGIVDPYPPLCDIKGSYXAQFEHXILLRPXCKEVVSRGDDY

SEQ ID NO: 16287 - protein, 455 aa, Homo sapiens
  MOD_RES (30)..(30): Selenocysteine
  MOD_RES (90)..(90): Selenocysteine
  MOD_RES (117)..(117): Selenocysteine
  MOD_RES (122)..(122): Selenocysteine
  MOD_RES (127)..(128): Selenocysteine
  MOD_RES (169)..(169): Selenocysteine
  MOD_RES (198)..(198): Selenocysteine
  MOD_RES (210)..(210): Selenocysteine
  MOD_RES (216)..(217): Selenocysteine
  MOD_RES (231)..(231): Selenocysteine
  MOD_RES (243)..(243): Selenocysteine
  MOD_RES (245)..(245): Selenocysteine
  MOD_RES (252)..(252): Selenocysteine
  MOD_RES (261)..(261): Selenocysteine
  MOD_RES (263)..(263): Selenocysteine
  MOD_RES (296)..(296): Selenocysteine
  MOD_RES (320)..(320): Selenocysteine
  MOD_RES (330)..(330): Selenocysteine
  MOD_RES (342)..(342): Selenocysteine
  MOD_RES (346)..(346): Selenocysteine
  MOD_RES (376)..(376): Selenocysteine
  MOD_RES (389)..(389): Selenocysteine
  MOD_RES (432)..(432): Selenocysteine
  MOD_RES (438)..(438): Selenocysteine
  MOD_RES (444)..(444): Selenocysteine
MAGVEEVAASGSHLNGDLDPDDREEGAASXAEEAAKKKRRKKKKSKGPSAGEQEPDKESGASVDEVARQLERSALEDKERDEDDEAKVQXDPPSVPICDLYPNGVFPKGQECEYPPXQDGRXAAWRXXSEEKKALDQASEEIWNDFREAAEAHRQVRKYVMSWIKPGMXMIEICEKLEDCSRKLIKENGLNAGLAFPXGCSLNNCAAHYXPNAGDXXVLQYDDICKIDFGXHISGRIIDCAFXVXFNPKYDXLLKAVKDAXNXGIKCAGIDVRLCDVGEAIQEVMESYEVEIDGKXYQVKPIRNLNGHSIGQYRIHAGKXVPIVKGGEAXRMEEGEVYAIEXFGSXGKGVVHDDMECSHYMKNFDVGHVPIRLPRXKHLLNVINENFGXLAFCRRWLDRLGESKYLMALKNLCDLGIVDPYPPLCDIKGSYXAQFEHXILLRPXCKEVVSRGDDY

SEQ ID NO: 16288 - protein, 477 aa, Homo sapiens
  MOD_RES (30)..(30): Selenocysteine
  MOD_RES (95)..(95): Selenocysteine
  MOD_RES (112)..(112): Selenocysteine
  MOD_RES (139)..(139): Selenocysteine
  MOD_RES (144)..(144): Selenocysteine
  MOD_RES (149)..(150): Selenocysteine
  MOD_RES (191)..(191): Selenocysteine
  MOD_RES (220)..(220): Selenocysteine
  MOD_RES (232)..(232): Selenocysteine
  MOD_RES (238)..(239): Selenocysteine
  MOD_RES (253)..(253): Selenocysteine
  MOD_RES (265)..(265): Selenocysteine
  MOD_RES (267)..(267): Selenocysteine
  MOD_RES (274)..(274): Selenocysteine
  MOD_RES (283)..(283): Selenocysteine
  MOD_RES (285)..(285): Selenocysteine
  MOD_RES (318)..(318): Selenocysteine
  MOD_RES (342)..(342): Selenocysteine
  MOD_RES (352)..(352): Selenocysteine
  MOD_RES (364)..(364): Selenocysteine
  MOD_RES (368)..(368): Selenocysteine
  MOD_RES (398)..(398): Selenocysteine
  MOD_RES (411)..(411): Selenocysteine
  MOD_RES (454)..(454): Selenocysteine
  MOD_RES (460)..(460): Selenocysteine
  MOD_RES (466)..(466): Selenocysteine
MAGVEEVAASGSHLNGDLDPDDREEGAASXAEEAAKKKRRKKKKSKGPSAGEQEPDKESGASVDEVARQLERSALEDKERDEDDEDGDGDGDGAXGKKKKKKKKKRGPKVQXDPPSVPICDLYPNGVFPKGQECEYPPXQDGRXAAWRXXSEEKKALDQASEEIWNDFREAAEAHRQVRKYVMSWIKPGMXMIEICEKLEDCSRKLIKENGLNAGLAFPXGCSLNNCAAHYXPNAGDXXVLQYDDICKIDFGXHISGRIIDCAFXVXFNPKYDXLLKAVKDAXNXGIKCAGIDVRLCDVGEAIQEVMESYEVEIDGKXYQVKPIRNLNGHSIGQYRIHAGKXVPIVKGGEAXRMEEGEVYAIEXFGSXGKGVVHDDMECSHYMKNFDVGHVPIRLPRXKHLLNVINENFGXLAFCRRWLDRLGESKYLMALKNLCDLGIVDPYPPLCDIKGSYXAQFEHXILLRPXCKEVVSRGDDY

SEQ ID NO: 16289 - protein, 163 aa, Homo sapiens
  MOD_RES (15)..(15): Selenocysteine
  MOD_RES (42)..(42): Selenocysteine
  MOD_RES (47)..(47): Selenocysteine
  MOD_RES (52)..(53): Selenocysteine
  MOD_RES (94)..(94): Selenocysteine
  MOD_RES (123)..(123): Selenocysteine
  MOD_RES (135)..(135): Selenocysteine
  MOD_RES (141)..(142): Selenocysteine
  MOD_RES (156)..(156): Selenocysteine
MCGFCVGLISAKVQXDPPSVPICDLYPNGVFPKGQECEYPPXQDGRXAAWRXXSEEKKALDQASEEIWNDFREAAEAHRQVRKYVMSWIKPGMXMIEICEKLEDCSRKLIKENGLNAGLAFPXGCSLNNCAAHYXPNAGDXXVLQYDDICKIDFGXHISGKFL

SEQ ID NO: 16290 - protein, 1052 aa, Homo sapiens
  MOD_RES (11)..(11): Selenocysteine
  MOD_RES (33)..(33): Selenocysteine
  MOD_RES (35)..(35): Selenocysteine
  MOD_RES (114)..(114): Selenocysteine
  MOD_RES (124)..(124): Selenocysteine
  MOD_RES (185)..(185): Selenocysteine
  MOD_RES (194)..(194): Selenocysteine
  MOD_RES (241)..(241): Selenocysteine
  MOD_RES (309)..(309): Selenocysteine
  MOD_RES (323)..(323): Selenocysteine
  MOD_RES (342)..(342): Selenocysteine
  MOD_RES (423)..(423): Selenocysteine
  MOD_RES (430)..(430): Selenocysteine
  MOD_RES (461)..(461): Selenocysteine
  MOD_RES (464)..(464): Selenocysteine
  MOD_RES (506)..(506): Selenocysteine
  MOD_RES (514)..(515): Selenocysteine
  MOD_RES (537)..(537): Selenocysteine
  MOD_RES (696)..(696): Selenocysteine
  MOD_RES (731)..(731): Selenocysteine
  MOD_RES (756)..(756): Selenocysteine
  MOD_RES (774)..(774): Selenocysteine
  MOD_RES (783)..(783): Selenocysteine
  MOD_RES (845)..(845): Selenocysteine
  MOD_RES (868)..(868): Selenocysteine
  MOD_RES (889)..(889): Selenocysteine
  MOD_RES (940)..(940): Selenocysteine
  MOD_RES (954)..(954): Selenocysteine
  MOD_RES (960)..(960): Selenocysteine
  MOD_RES (979)..(979): Selenocysteine
  MOD_RES (1033)..(1033): Selenocysteine
  MOD_RES (1035)..(1035): Selenocysteine
MAGMDSGNLKXARLWRDAALRARKLRSNLRQLXLXAAGACPGAGADALESPASPQLVLPANLGDIEALNLGNNGLEEVPEGLGSALGSLRVLVLRRNRFARLPPAVAELGHHLXELDVSHNRLXALGAEVVSALRELRKLNLSHNQLPALPAQLGALAHLEELDVSFNRLAHLPDSLSCLSRLRXLDVDHNQLXAFPRQLLQLVALEELDVSSNRLRGLPEDISALRALKILWLSGAELGXLPAGFCELASLESLMLDNNGLQALPAQFSCLQRLKMLNLSSNLFEEFPAALLPLAGLEELYLSRNQLXSVPSLISGLGRLLXLWLDNNRIRYLPDSIVELXGLEELVLQGNQIAVLPDHFGQLSRVGLWKIKDNPLIQPPYEVCMKGIPYIAAYQKELAHSQPAVQPRLKLLLMGHKAAGKXLLRHCLXEERVEGCPGGGDKEKCYPPSPPPVSKGIEVXSWXADASRGLRFIVYDLAGDESYEVIQPFFLSPGALYVLVVNLAXYEPRHFPXXVGSFLHRVGARVPHAVVCIVGXHADLCGERELEEKCLDIHRQIALQEKHDAEGLSRLAKVVDEALARDFELRSASPHAAYYGVSDKNLRRRKAHFQYLLNHRLQILSPVLPVSCRDPRHLRRLRDKLLSVAEHREIFPNLHRVLPRSWQVLEELHFQPPQAQRLWLSWWDSARLGLQAGLXEDRLQSALSYLHESGKLLYFEDSPALKEHVFHNLXRLIDILNVFFQRDPSLLLHKLLLGXSGEGKAEGESSPPMARSXPSQELLRAXQLHQYVEGFLLHGLLPAHVIRLLLKPHVQAQQDLQLLLELLEKMGLCYCLNKPKGKPLNGSXAWYKFPCYVQNEVPHAEAWINGXNLAGQSFVAEQLQIEYSFPFXFPLGLFARYSVQINSHVVHRSDGKFQIFAYRGKVPVVVSYRPARGVLQPDXLSIASHASLPNIWXAWQAIXPLVEELNVLLQEWPGLHYXVHILCSKCLKRGSPNPHAFPGELLSQPRPEGVAEIICPKNGSERVNVALVYPPXPXVISPCSKKNVGEKHRNQ

SEQ ID NO: 16291 - protein, 98 aa, Homo sapiens
  MOD_RES (13)..(13): Selenocysteine
  MOD_RES (34)..(34): Selenocysteine
  MOD_RES (55)..(55): Selenocysteine
  MOD_RES (60)..(60): Selenocysteine
  MOD_RES (70)..(71): Selenocysteine
MSLLFSRCNSIVXVKKNKRHMAEVNASPLKHFVXAKKKINGIFEQLGAYIQESAXFLEDXYRNAELDPVXXEEQVLDVKGYLSKVRGISEVLARRHMK

SEQ ID NO: 16292 - protein, 757 aa, Homo sapiens
  MOD_RES (13)..(13): Selenocysteine
  MOD_RES (34)..(34): Selenocysteine
  MOD_RES (55)..(55): Selenocysteine
  MOD_RES (60)..(60): Selenocysteine
  MOD_RES (70)..(71): Selenocysteine
  MOD_RES (105)..(105): Selenocysteine
  MOD_RES (111)..(111): Selenocysteine
  MOD_RES (129)..(130): Selenocysteine
  MOD_RES (139)..(139): Selenocysteine
  MOD_RES (148)..(148): Selenocysteine
  MOD_RES (159)..(159): Selenocysteine
  MOD_RES (206)..(207): Selenocysteine
  MOD_RES (232)..(232): Selenocysteine
  MOD_RES (236)..(236): Selenocysteine
  MOD_RES (282)..(282): Selenocysteine
  MOD_RES (356)..(356): Selenocysteine
  MOD_RES (362)..(362): Selenocysteine
  MOD_RES (423)..(423): Selenocysteine
  MOD_RES (432)..(432): Selenocysteine
  MOD_RES (484)..(484): Selenocysteine
  MOD_RES (487)..(487): Selenocysteine
  MOD_RES (492)..(492): Selenocysteine
  MOD_RES (550)..(550): Selenocysteine
  MOD_RES (580)..(580): Selenocysteine
  MOD_RES (595)..(595): Selenocysteine
  MOD_RES (605)..(605): Selenocysteine
  MOD_RES (611)..(611): Selenocysteine
  MOD_RES (614)..(614): Selenocysteine
  MOD_RES (651)..(651): Selenocysteine
  MOD_RES (653)..(654): Selenocysteine
  MOD_RES (680)..(680): Selenocysteine
  MOD_RES (695)..(695): Selenocysteine
  MOD_RES (706)..(706): Selenocysteine
  MOD_RES (749)..(749): Selenocysteine
MSLLFSRCNSIVXVKKNKRHMAEVNASPLKHFVXAKKKINGIFEQLGAYIQESAXFLEDXYRNAELDPVXXEEQVLDVKGYLSKVRGISEVLARRHMKVAFFGRXSNGKSXVINAMLWDKVLPSGIGHXXNCFLRVEGXDGHEAFLLXEGSEEKRSAKXVNQLAHALHQDKQLHAGSLVSVMWPNSKCPLLKDDLVLMDSPGIDVXXELDSWIDKFCLDADVFVLVANSESXLMQXEKHFFHKVSERLSRPNIFILNNRWDASASEPEYMEEVRRQHMERCXSFLVDELGVVDRSQAGDRIFFVSAKEVLNARIQKAQGMPEGGGALAEGFQVRMFEFQNFERRFEECISQSAVKXKFEQHXVRAKQIAEAVRLIMDSLHMAAREQQVYCEEMREERQDRLKFIDKQLELLAQDYKLRIKQIXEEVERQVSXAMAEEIRRLSVLVDDYQMDFHPSPVVLKVYKNELHRHIEEGLGRNMSDRCSXAIXNSLQXMQQDMIDGLKPLLPVSVRSQIDMLVPRQCFSLNYDLNCDKLCADFQEDIEFHFSLGWXMLVNRFLGPKNSRRALMGYNDQVQRPIPLXPANPSMPPLPQGSLXQEEFMVSMVXGLASLXSRXSMGILVVGGVVWKAVGWRLIALSFGLYGLLYVYERLXWXXKAKERAFKRQFVEHASEKLQLVISYXGSNCSHQVQQELSGXFAHLCQQVDVXRENLEQEIAAMNKKIEVLDSLQSKAKLLRNKAGWLDSELNMFXHQYLQPSR

SEQ ID NO: 16293 - protein, 43 aa, Homo sapiens
  MOD_RES (7)..(7): Selenocysteine
MAAEFDXFLASGLRWFCHVDDDNYVNPRALLQLLRAFPLARDV

SEQ ID NO: 16294 - protein, 132 aa, Homo sapiens
  MOD_RES (7)..(7): Selenocysteine
  MOD_RES (65)..(65): Selenocysteine
  MOD_RES (74)..(74): Selenocysteine
  MOD_RES (101)..(101): Selenocysteine
  MOD_RES (112)..(112): Selenocysteine
MAAEFDXFLASGLRWFCHVDDDNYVNPRALLQLLRAFPLARDVYVGRPSLNRPIHASEPQPHNRXRLVQFWFAXGGAGFCINRKLALKMAPWASGSRFMDXSALIRLPDDCXMGYIIECKLGGRLQPSPLFH

SEQ ID NO: 16295 - protein, 130 aa, Homo sapiens
  MOD_RES (15)..(15): Selenocysteine
  MOD_RES (38)..(38): Selenocysteine
  MOD_RES (62)..(63): Selenocysteine
  MOD_RES (77)..(77): Selenocysteine
  MOD_RES (82)..(82): Selenocysteine
  MOD_RES (88)..(88): Selenocysteine
  MOD_RES (93)..(93): Selenocysteine
  MOD_RES (98)..(98): Selenocysteine
  MOD_RES (100)..(100): Selenocysteine
  MOD_RES (112)..(112): Selenocysteine
  MOD_RES (126)..(126): Selenocysteine
  MOD_RES (128)..(129): Selenocysteine
MQCRLPRGLAGALLXLLCMGLLCLRYHLNLSPQRVQGXPELSQPNPGPPKLQLHDVFIAVKXXRAFHRLRLELLLDXWVSRXREQGPXLWSPXAPRNXAXQLCPARWLLSSXPSWPVGLGGSAMWXMXXM

SEQ ID NO: 16296 - protein, 321 aa, Homo sapiens
  MOD_RES (15)..(15): Selenocysteine
  MOD_RES (38)..(38): Selenocysteine
  MOD_RES (62)..(63): Selenocysteine
  MOD_RES (77)..(77): Selenocysteine
  MOD_RES (82)..(82): Selenocysteine
  MOD_RES (86)..(86): Selenocysteine
  MOD_RES (90)..(90): Selenocysteine
  MOD_RES (108)..(108): Selenocysteine
  MOD_RES (129)..(129): Selenocysteine
  MOD_RES (187)..(187): Selenocysteine
  MOD_RES (196)..(196): Selenocysteine
  MOD_RES (223)..(223): Selenocysteine
  MOD_RES (234)..(234): Selenocysteine
  MOD_RES (259)..(259): Selenocysteine
  MOD_RES (265)..(265): Selenocysteine
  MOD_RES (273)..(273): Selenocysteine
  MOD_RES (312)..(312): Selenocysteine
MQCRLPRGLAGALLXLLCMGLLCLRYHLNLSPQRVQGXPELSQPNPGPPKLQLHDVFIAVKXXRAFHRLRLELLLDXWVSRXREQXFVFXDSPDKGLQERLGSHLVVXNCSAEHSHPALSCKMAAEFDXFLASGLRWFCHVDDDNYVNPRALLQLLRAFPLARDVYVGRPSLNRPIHASEPQPHNRXRLVQFWFAXGGAGFCINRKLALKMAPWASGSRFMDXSALIRLPDDCXMGYIIECKLGGRLQPSPLFHSHLEXLQLLRXAQLPEQVXLSYGVFEGKLNVIKLQGPFSPEEDPSRFRSLHCLLYPDXPWCPQLGAR

SEQ ID NO: 16297 - protein, 118 aa, Homo sapiens
  MOD_RES (15)..(15): Selenocysteine
  MOD_RES (38)..(38): Selenocysteine
  MOD_RES (62)..(63): Selenocysteine
  MOD_RES (77)..(77): Selenocysteine
  MOD_RES (82)..(82): Selenocysteine
  MOD_RES (86)..(86): Selenocysteine
  MOD_RES (90)..(90): Selenocysteine
  MOD_RES (114)..(114): Selenocysteine
MQCRLPRGLAGALLXLLCMGLLCLRYHLNLSPQRVQGXPELSQPNPGPPKLQLHDVFIAVKXXRAFHRLRLELLLDXWVSRXREQXFVFXDSPDKGLQERLGSPDSSSLLQGPXLWSP

SEQ ID NO: 16298 - protein, 127 aa, Homo sapiens
  MOD_RES (15)..(15): Selenocysteine
  MOD_RES (38)..(38): Selenocysteine
  MOD_RES (62)..(63): Selenocysteine
  MOD_RES (77)..(77): Selenocysteine
  MOD_RES (82)..(82): Selenocysteine
  MOD_RES (87)..(87): Selenocysteine
  MOD_RES (103)..(103): Selenocysteine
  MOD_RES (116)..(116): Selenocysteine
MQCRLPRGLAGALLXLLCMGLLCLRYHLNLSPQRVQGXPELSQPNPGPPKLQLHDVFIAVKXXRAFHRLRLELLLDXWVSRXREQVXNICLHRQPRQRPPGEXGVPPCGHQLLRGXQPPSSVLQDGC

SEQ ID NO: 16299 - protein, 307 aa, Homo sapiens
  MOD_RES (15)..(15): Selenocysteine
  MOD_RES (38)..(38): Selenocysteine
  MOD_RES (62)..(63): Selenocysteine
  MOD_RES (77)..(77): Selenocysteine
  MOD_RES (82)..(82): Selenocysteine
  MOD_RES (87)..(87): Selenocysteine
  MOD_RES (94)..(94): Selenocysteine
  MOD_RES (115)..(115): Selenocysteine
  MOD_RES (173)..(173): Selenocysteine
  MOD_RES (182)..(182): Selenocysteine
  MOD_RES (209)..(209): Selenocysteine
  MOD_RES (220)..(220): Selenocysteine
  MOD_RES (245)..(245): Selenocysteine
  MOD_RES (251)..(251): Selenocysteine
  MOD_RES (259)..(259): Selenocysteine
  MOD_RES (298)..(298): Selenocysteine
MQCRLPRGLAGALLXLLCMGLLCLRYHLNLSPQRVQGXPELSQPNPGPPKLQLHDVFIAVKXXRAFHRLRLELLLDXWVSRXREQVXRSHLVVXNCSAEHSHPALSCKMAAEFDXFLASGLRWFCHVDDDNYVNPRALLQLLRAFPLARDVYVGRPSLNRPIHASEPQPHNRXRLVQFWFAXGGAGFCINRKLALKMAPWASGSRFMDXSALIRLPDDCXMGYIIECKLGGRLQPSPLFHSHLEXLQLLRXAQLPEQVXLSYGVFEGKLNVIKLQGPFSPEEDPSRFRSLHCLLYPDXPWCPQLGAR

SEQ ID NO: 16300 - protein, 87 aa, Homo sapiens
  MOD_RES (1)..(1): Any amino acid
  MOD_RES (6)..(6): Selenocysteine
  MOD_RES (12)..(12): Selenocysteine
  MOD_RES (31)..(31): Selenocysteine
  MOD_RES (52)..(52): Selenocysteine
XSHLEXLQLLRXAQLPEQISLPPLSALSRYXLVSPAGCPMNPELLGKGWAEXSGCALAPKVALWVPGKCLVIGSPWQGLRVVGKPRI

SEQ ID NO: 16301 - protein, 1086 aa, Homo sapiens
  MOD_RES (16)..(16): Selenocysteine
  MOD_RES (23)..(23): Selenocysteine
  MOD_RES (36)..(36): Selenocysteine
  MOD_RES (43)..(43): Selenocysteine
  MOD_RES (71)..(71): Selenocysteine
  MOD_RES (76)..(76): Selenocysteine
  MOD_RES (78)..(78): Selenocysteine
  MOD_RES (93)..(93): Selenocysteine
  MOD_RES (98)..(98): Selenocysteine
  MOD_RES (113)..(113): Selenocysteine
  MOD_RES (165)..(165): Selenocysteine
  MOD_RES (182)..(182): Selenocysteine
  MOD_RES (185)..(185): Selenocysteine
  MOD_RES (225)..(225): Selenocysteine
  MOD_RES (227)..(227): Selenocysteine
  MOD_RES (231)..(231): Selenocysteine
  MOD_RES (237)..(237): Selenocysteine
  MOD_RES (245)..(245): Selenocysteine
  MOD_RES (295)..(295): Selenocysteine
  MOD_RES (316)..(316): Selenocysteine
  MOD_RES (324)..(324): Selenocysteine
  MOD_RES (338)..(338): Selenocysteine
  MOD_RES (401)..(401): Selenocysteine
  MOD_RES (407)..(407): Selenocysteine
  MOD_RES (411)..(411): Selenocysteine
  MOD_RES (463)..(463): Selenocysteine
  MOD_RES (477)..(477): Selenocysteine
  MOD_RES (480)..(480): Selenocysteine
  MOD_RES (493)..(493): Selenocysteine
  MOD_RES (510)..(510): Selenocysteine
  MOD_RES (518)..(518): Selenocysteine
  MOD_RES (562)..(562): Selenocysteine
  MOD_RES (588)..(589): Selenocysteine
  MOD_RES (595)..(595): Selenocysteine
  MOD_RES (632)..(632): Selenocysteine
  MOD_RES (639)..(639): Selenocysteine
  MOD_RES (642)..(642): Selenocysteine
  MOD_RES (649)..(649): Selenocysteine
  MOD_RES (682)..(683): Selenocysteine
  MOD_RES (693)..(694): Selenocysteine
  MOD_RES (716)..(716): Selenocysteine
  MOD_RES (740)..(740): Selenocysteine
  MOD_RES (758)..(758): Selenocysteine
  MOD_RES (766)..(766): Selenocysteine
  MOD_RES (768)..(768): Selenocysteine
  MOD_RES (783)..(783): Selenocysteine
  MOD_RES (786)..(786): Selenocysteine
  MOD_RES (790)..(790): Selenocysteine
  MOD_RES (840)..(840): Selenocysteine
  MOD_RES (850)..(850): Selenocysteine
  MOD_RES (859)..(859): Selenocysteine
  MOD_RES (862)..(862): Selenocysteine
  MOD_RES (867)..(867): Selenocysteine
  MOD_RES (877)..(877): Selenocysteine
  MOD_RES (882)..(882): Selenocysteine
  MOD_RES (906)..(906): Selenocysteine
  MOD_RES (911)..(911): Selenocysteine
  MOD_RES (939)..(939): Selenocysteine
  MOD_RES (958)..(958): Selenocysteine
  MOD_RES (1010)..(1010): Selenocysteine
  MOD_RES (1013)..(1013): Selenocysteine
  MOD_RES (1022)..(1023): Selenocysteine
  MOD_RES (1026)..(1026): Selenocysteine
  MOD_RES (1033)..(1033): Selenocysteine
  MOD_RES (1038)..(1038): Selenocysteine
  MOD_RES (1081)..(1081): Selenocysteine
MEEKQQIILANQDGGXVAGAAPXFFVILKQPGNGKXDQGILVXNQDACALASSVSSPVKSKGKICLPADCXVGGIXVXLDNNSMWNEFYHRSXEMILXKQGRRMFPYCRYWIXGLDSNLKYILVMDISPVDNHRYKWNGRWWEPSGKAEPHVLGRVFIHPESPSXGHYWMHQPVSFYKLKLXNNXLDQEGHIILHSMHRYLPRLHLVPAEKAVEVIQLNGPGVHXFXFPQXEFFAVXAYQNIQIXQLKIDYNPFAKGFRDDGLNNKPQRDGKQKNSSDQEGNNISSSSGHRVRLXEGQGSEIQPGDLDPLSRGHEXSGKGLEKXSLNIKRDFLGFMDXDSALSEVPQLKQEISECLIASSFEDDSRVASPLDQNGSFNVVIKEEPLDDYDYELGECPEGVXVKQEEXDEEXDVYSNSDDDPILEKQLKRHNKVDNPEADHLSSKWLPSSPSGVAKAKMFKLDXGKMPVVYLEPCAVXRSXVKISELPDNMLSXSRKDKSSMLAELEYLPXYIENSNEXAFCLGKESENGLRKHSPDLRVVQKYPLLKEPQWKYPDISDSISXERILDDSKDSVGDSLSGKEDLGRKRXXMLKIAXAAKVVNANQNASPNVPGKRGRPRKLKLCKAGRPPKNXGKSLISXKNXPVSPGSXFPDVKPDLEDVDGVLFVSFESKEALDIHAVDGXXEESSSLQASXXNDSGYRARISQLEKELIEDLKXLRHKQVIHPGLQEVGLKLNSVDPXMSIDLKYLGVQLPLAPAXSFPFWNLXGXNPASPDAGFPFVSRXGKXNDFXKIKGWRGKFHSASASRNEGGNSESSLKNRSAFCSDKLDEYLENEGKLMEXSMGFSSNAPXSPVVYQLPXKSXSYVRXLDSVLKKQSXISPSXSYSLKPHSVPPVSRKAKSQNRQAXFSGRXKSSYKSILPYPVSPKQKYSHVILGDKVXKNSSGIISENQANNFVVPXLDENIFPKQISLRQAQQQQQQQQGSRPPGLSKSQVKLMDLEDCALWEGKPRXYIXEERADVSLXXLLXAQASLKXKPIHXIIRKRAPPCNNDFCRLGCVCSSLALEKRQPAHCRRPDCMFGCXCLKRK

SEQ ID NO: 16302 - protein, 1138 aa, Homo sapiens
  MOD_RES (16)..(16): Selenocysteine
  MOD_RES (23)..(23): Selenocysteine
  MOD_RES (36)..(36): Selenocysteine
  MOD_RES (43)..(43): Selenocysteine
  MOD_RES (71)..(71): Selenocysteine
  MOD_RES (76)..(76): Selenocysteine
  MOD_RES (78)..(78): Selenocysteine
  MOD_RES (93)..(93): Selenocysteine
  MOD_RES (98)..(98): Selenocysteine
  MOD_RES (113)..(113): Selenocysteine
  MOD_RES (165)..(165): Selenocysteine
  MOD_RES (182)..(182): Selenocysteine
  MOD_RES (185)..(185): Selenocysteine
  MOD_RES (225)..(225): Selenocysteine
  MOD_RES (227)..(227): Selenocysteine
  MOD_RES (231)..(231): Selenocysteine
  MOD_RES (237)..(237): Selenocysteine
  MOD_RES (245)..(245): Selenocysteine
  MOD_RES (295)..(295): Selenocysteine
  MOD_RES (316)..(316): Selenocysteine
  MOD_RES (324)..(324): Selenocysteine
  MOD_RES (338)..(338): Selenocysteine
  MOD_RES (401)..(401): Selenocysteine
  MOD_RES (407)..(407): Selenocysteine
  MOD_RES (411)..(411): Selenocysteine
  MOD_RES (463)..(463): Selenocysteine
  MOD_RES (477)..(477): Selenocysteine
  MOD_RES (480)..(480): Selenocysteine
  MOD_RES (493)..(493): Selenocysteine
  MOD_RES (510)..(510): Selenocysteine
  MOD_RES (518)..(518): Selenocysteine
  MOD_RES (562)..(562): Selenocysteine
  MOD_RES (588)..(589): Selenocysteine
  MOD_RES (595)..(595): Selenocysteine
  MOD_RES (632)..(632): Selenocysteine
  MOD_RES (639)..(639): Selenocysteine
  MOD_RES (642)..(642): Selenocysteine
  MOD_RES (649)..(649): Selenocysteine
  MOD_RES (682)..(683): Selenocysteine
  MOD_RES (693)..(694): Selenocysteine
  MOD_RES (716)..(716): Selenocysteine
  MOD_RES (740)..(740): Selenocysteine
  MOD_RES (758)..(758): Selenocysteine
  MOD_RES (766)..(766): Selenocysteine
  MOD_RES (768)..(768): Selenocysteine
  MOD_RES (783)..(783): Selenocysteine
  MOD_RES (786)..(786): Selenocysteine
  MOD_RES (790)..(790): Selenocysteine
  MOD_RES (840)..(840): Selenocysteine
  MOD_RES (850)..(850): Selenocysteine
  MOD_RES (859)..(859): Selenocysteine
  MOD_RES (862)..(862): Selenocysteine
  MOD_RES (867)..(867): Selenocysteine
  MOD_RES (877)..(877): Selenocysteine
  MOD_RES (882)..(882): Selenocysteine
  MOD_RES (906)..(906): Selenocysteine
  MOD_RES (911)..(911): Selenocysteine
  MOD_RES (939)..(939): Selenocysteine
  MOD_RES (958)..(958): Selenocysteine
  MOD_RES (1010)..(1010): Selenocysteine
  MOD_RES (1013)..(1013): Selenocysteine
  MOD_RES (1022)..(1023): Selenocysteine
  MOD_RES (1026)..(1026): Selenocysteine
  MOD_RES (1033)..(1033): Selenocysteine
  MOD_RES (1038)..(1038): Selenocysteine
  MOD_RES (1081)..(1081): Selenocysteine
  MOD_RES (1096)..(1096): Selenocysteine
  MOD_RES (1113)..(1113): Selenocysteine
MEEKQQIILANQDGGXVAGAAPXFFVILKQPGNGKXDQGILVXNQDACALASSVSSPVKSKGKICLPADCXVGGIXVXLDNNSMWNEFYHRSXEMILXKQGRRMFPYCRYWIXGLDSNLKYILVMDISPVDNHRYKWNGRWWEPSGKAEPHVLGRVFIHPESPSXGHYWMHQPVSFYKLKLXNNXLDQEGHIILHSMHRYLPRLHLVPAEKAVEVIQLNGPGVHXFXFPQXEFFAVXAYQNIQIXQLKIDYNPFAKGFRDDGLNNKPQRDGKQKNSSDQEGNNISSSSGHRVRLXEGQGSEIQPGDLDPLSRGHEXSGKGLEKXSLNIKRDFLGFMDXDSALSEVPQLKQEISECLIASSFEDDSRVASPLDQNGSFNVVIKEEPLDDYDYELGECPEGVXVKQEEXDEEXDVYSNSDDDPILEKQLKRHNKVDNPEADHLSSKWLPSSPSGVAKAKMFKLDXGKMPVVYLEPCAVXRSXVKISELPDNMLSXSRKDKSSMLAELEYLPXYIENSNEXAFCLGKESENGLRKHSPDLRVVQKYPLLKEPQWKYPDISDSISXERILDDSKDSVGDSLSGKEDLGRKRXXMLKIAXAAKVVNANQNASPNVPGKRGRPRKLKLCKAGRPPKNXGKSLISXKNXPVSPGSXFPDVKPDLEDVDGVLFVSFESKEALDIHAVDGXXEESSSLQASXXNDSGYRARISQLEKELIEDLKXLRHKQVIHPGLQEVGLKLNSVDPXMSIDLKYLGVQLPLAPAXSFPFWNLXGXNPASPDAGFPFVSRXGKXNDFXKIKGWRGKFHSASASRNEGGNSESSLKNRSAFCSDKLDEYLENEGKLMEXSMGFSSNAPXSPVVYQLPXKSXSYVRXLDSVLKKQSXISPSXSYSLKPHSVPPVSRKAKSQNRQAXFSGRXKSSYKSILPYPVSPKQKYSHVILGDKVXKNSSGIISENQANNFVVPXLDENIFPKQISLRQAQQQQQQQQGSRPPGLSKSQVKLMDLEDCALWEGKPRXYIXEERADVSLXXLLXAQASLKXKPIHXIIRKRAPPCNNDFCRLGCVCSSLALEKRQPAHCRRPDCMFGCXCLKRKVVLVKGGSKXKHFQRKAAHRDPVFYDXLGEEAREEEEGIREEEEQLKEKKKR

SEQ ID NO: 16303 - protein, 2856 aa, Homo sapiens
  MOD_RES (16)..(16): Selenocysteine
  MOD_RES (23)..(23): Selenocysteine
  MOD_RES (36)..(36): Selenocysteine
  MOD_RES (43)..(43): Selenocysteine
  MOD_RES (71)..(71): Selenocysteine
  MOD_RES (76)..(76): Selenocysteine
  MOD_RES (78)..(78): Selenocysteine
  MOD_RES (93)..(93): Selenocysteine
  MOD_RES (98)..(98): Selenocysteine
  MOD_RES (113)..(113): Selenocysteine
  MOD_RES (165)..(165): Selenocysteine
  MOD_RES (182)..(182): Selenocysteine
  MOD_RES (185)..(185): Selenocysteine
  MOD_RES (225)..(225): Selenocysteine
  MOD_RES (227)..(227): Selenocysteine
  MOD_RES (231)..(231): Selenocysteine
  MOD_RES (237)..(237): Selenocysteine
  MOD_RES (245)..(245): Selenocysteine
  MOD_RES (295)..(295): Selenocysteine
  MOD_RES (316)..(316): Selenocysteine
  MOD_RES (324)..(324): Selenocysteine
  MOD_RES (338)..(338): Selenocysteine
  MOD_RES (401)..(401): Selenocysteine
  MOD_RES (407)..(407): Selenocysteine
  MOD_RES (411)..(411): Selenocysteine
  MOD_RES (463)..(463): Selenocysteine
  MOD_RES (477)..(477): Selenocysteine
  MOD_RES (480)..(480): Selenocysteine
  MOD_RES (493)..(493): Selenocysteine
  MOD_RES (510)..(510): Selenocysteine
  MOD_RES (518)..(518): Selenocysteine
  MOD_RES (562)..(562): Selenocysteine
  MOD_RES (588)..(589): Selenocysteine
  MOD_RES (595)..(595): Selenocysteine
  MOD_RES (632)..(632): Selenocysteine
  MOD_RES (639)..(639): Selenocysteine
  MOD_RES (642)..(642): Selenocysteine
  MOD_RES (649)..(649): Selenocysteine
  MOD_RES (682)..(683): Selenocysteine
  MOD_RES (693)..(694): Selenocysteine
  MOD_RES (716)..(716): Selenocysteine
  MOD_RES (740)..(740): Selenocysteine
  MOD_RES (758)..(758): Selenocysteine
  MOD_RES (766)..(766): Selenocysteine
  MOD_RES (768)..(768): Selenocysteine
  MOD_RES (783)..(783): Selenocysteine
  MOD_RES (786)..(786): Selenocysteine
  MOD_RES (790)..(790): Selenocysteine
  MOD_RES (840)..(840): Selenocysteine
  MOD_RES (850)..(850): Selenocysteine
  MOD_RES (859)..(859): Selenocysteine
  MOD_RES (862)..(862): Selenocysteine
  MOD_RES (867)..(867): Selenocysteine
  MOD_RES (877)..(877): Selenocysteine
  MOD_RES (882)..(882): Selenocysteine
  MOD_RES (906)..(906): Selenocysteine
  MOD_RES (911)..(911): Selenocysteine
  MOD_RES (939)..(939): Selenocysteine
  MOD_RES (958)..(958): Selenocysteine
  MOD_RES (1010)..(1010): Selenocysteine
  MOD_RES (1013)..(1013): Selenocysteine
  MOD_RES (1022)..(1023): Selenocysteine
  MOD_RES (1026)..(1026): Selenocysteine
  MOD_RES (1033)..(1033): Selenocysteine
  MOD_RES (1038)..(1038): Selenocysteine
  MOD_RES (1081)..(1081): Selenocysteine
  MOD_RES (1096)..(1096): Selenocysteine
  MOD_RES (1113)..(1113): Selenocysteine
  MOD_RES (1144)..(1144): Selenocysteine
  MOD_RES (1148)..(1148): Selenocysteine
  MOD_RES (1176)..(1176): Selenocysteine
  MOD_RES (1197)..(1197): Selenocysteine
  MOD_RES (1204)..(1204): Selenocysteine
  MOD_RES (1213)..(1213): Selenocysteine
  MOD_RES (1237)..(1237): Selenocysteine
  MOD_RES (1268)..(1268): Selenocysteine
  MOD_RES (1294)..(1294): Selenocysteine
  MOD_RES (1321)..(1321): Selenocysteine
  MOD_RES (1333)..(1333): Selenocysteine
  MOD_RES (1416)..(1416): Selenocysteine
  MOD_RES (1434)..(1434): Selenocysteine
  MOD_RES (1473)..(1473): Selenocysteine
  MOD_RES (1493)..(1493): Selenocysteine
  MOD_RES (1498)..(1498): Selenocysteine
  MOD_RES (1509)..(1509): Selenocysteine
  MOD_RES (1511)..(1511): Selenocysteine
  MOD_RES (1538)..(1538): Selenocysteine
  MOD_RES (1545)..(1545): Selenocysteine
  MOD_RES (1564)..(1564): Selenocysteine
  MOD_RES (1571)..(1571): Selenocysteine
  MOD_RES (1613)..(1613): Selenocysteine
  MOD_RES (1642)..(1642): Selenocysteine
  MOD_RES (1647)..(1647): Selenocysteine
  MOD_RES (1672)..(1672): Selenocysteine
  MOD_RES (1690)..(1690): Selenocysteine
  MOD_RES (1692)..(1692): Selenocysteine
  MOD_RES (1707)..(1707): Selenocysteine
  MOD_RES (1711)..(1711): Selenocysteine
  MOD_RES (1714)..(1714): Selenocysteine
  MOD_RES (1724)..(1724): Selenocysteine
  MOD_RES (1772)..(1772): Selenocysteine
  MOD_RES (1781)..(1781): Selenocysteine
  MOD_RES (1807)..(1807): Selenocysteine
  MOD_RES (1811)..(1811): Selenocysteine
  MOD_RES (1835)..(1835): Selenocysteine
  MOD_RES (1845)..(1845): Selenocysteine
  MOD_RES (1849)..(1849): Selenocysteine
  MOD_RES (1879)..(1879): Selenocysteine
  MOD_RES (1888)..(1888): Selenocysteine
  MOD_RES (1924)..(1924): Selenocysteine
  MOD_RES (1974)..(1974): Selenocysteine
  MOD_RES (1996)..(1996): Selenocysteine
  MOD_RES (1998)..(1998): Selenocysteine
  MOD_RES (2022)..(2022): Selenocysteine
  MOD_RES (2030)..(2030): Selenocysteine
  MOD_RES (2088)..(2088): Selenocysteine
  MOD_RES (2103)..(2103): Selenocysteine
  MOD_RES (2145)..(2145): Selenocysteine
  MOD_RES (2160)..(2161): Selenocysteine
  MOD_RES (2165)..(2165): Selenocysteine
  MOD_RES (2174)..(2174): Selenocysteine
  MOD_RES (2218)..(2218): Selenocysteine
  MOD_RES (2220)..(2220): Selenocysteine
  MOD_RES (2240)..(2240): Selenocysteine
  MOD_RES (2256)..(2256): Selenocysteine
  MOD_RES (2266)..(2266): Selenocysteine
  MOD_RES (2280)..(2280): Selenocysteine
  MOD_RES (2297)..(2297): Selenocysteine
  MOD_RES (2372)..(2372): Selenocysteine
  MOD_RES (2375)..(2375): Selenocysteine
  MOD_RES (2380)..(2380): Selenocysteine
  MOD_RES (2383)..(2383): Selenocysteine
  MOD_RES (2390)..(2390): Selenocysteine
  MOD_RES (2397)..(2397): Selenocysteine
  MOD_RES (2446)..(2446): Selenocysteine
  MOD_RES (2450)..(2450): Selenocysteine
  MOD_RES (2478)..(2478): Selenocysteine
  MOD_RES (2503)..(2503): Selenocysteine
  MOD_RES (2507)..(2507): Selenocysteine
  MOD_RES (2587)..(2587): Selenocysteine
  MOD_RES (2602)..(2602): Selenocysteine
  MOD_RES (2610)..(2610): Selenocysteine
  MOD_RES (2613)..(2613): Selenocysteine
  MOD_RES (2615)..(2615): Selenocysteine
  MOD_RES (2644)..(2644): Selenocysteine
  MOD_RES (2665)..(2665): Selenocysteine
  MOD_RES (2673)..(2673): Selenocysteine
  MOD_RES (2742)..(2742): Selenocysteine
  MOD_RES (2757)..(2757): Selenocysteine
  MOD_RES (2762)..(2762): Selenocysteine
  MOD_RES (2770)..(2770): Selenocysteine
  MOD_RES (2772)..(2772): Selenocysteine
  MOD_RES (2822)..(2822): Selenocysteine
  MOD_RES (2836)..(2836): Selenocysteine
MEEKQQIILANQDGGXVAGAAPXFFVILKQPGNGKXDQGILVXNQDACALASSVSSPVKSKGKICLPADCXVGGIXVXLDNNSMWNEFYHRSXEMILXKQGRRMFPYCRYWIXGLDSNLKYILVMDISPVDNHRYKWNGRWWEPSGKAEPHVLGRVFIHPESPSXGHYWMHQPVSFYKLKLXNNXLDQEGHIILHSMHRYLPRLHLVPAEKAVEVIQLNGPGVHXFXFPQXEFFAVXAYQNIQIXQLKIDYNPFAKGFRDDGLNNKPQRDGKQKNSSDQEGNNISSSSGHRVRLXEGQGSEIQPGDLDPLSRGHEXSGKGLEKXSLNIKRDFLGFMDXDSALSEVPQLKQEISECLIASSFEDDSRVASPLDQNGSFNVVIKEEPLDDYDYELGECPEGVXVKQEEXDEEXDVYSNSDDDPILEKQLKRHNKVDNPEADHLSSKWLPSSPSGVAKAKMFKLDXGKMPVVYLEPCAVXRSXVKISELPDNMLSXSRKDKSSMLAELEYLPXYIENSNEXAFCLGKESENGLRKHSPDLRVVQKYPLLKEPQWKYPDISDSISXERILDDSKDSVGDSLSGKEDLGRKRXXMLKIAXAAKVVNANQNASPNVPGKRGRPRKLKLCKAGRPPKNXGKSLISXKNXPVSPGSXFPDVKPDLEDVDGVLFVSFESKEALDIHAVDGXXEESSSLQASXXNDSGYRARISQLEKELIEDLKXLRHKQVIHPGLQEVGLKLNSVDPXMSIDLKYLGVQLPLAPAXSFPFWNLXGXNPASPDAGFPFVSRXGKXNDFXKIKGWRGKFHSASASRNEGGNSESSLKNRSAFCSDKLDEYLENEGKLMEXSMGFSSNAPXSPVVYQLPXKSXSYVRXLDSVLKKQSXISPSXSYSLKPHSVPPVSRKAKSQNRQAXFSGRXKSSYKSILPYPVSPKQKYSHVILGDKVXKNSSGIISENQANNFVVPXLDENIFPKQISLRQAQQQQQQQQGSRPPGLSKSQVKLMDLEDCALWEGKPRXYIXEERADVSLXXLLXAQASLKXKPIHXIIRKRAPPCNNDFCRLGCVCSSLALEKRQPAHCRRPDCMFGCXCLKRKVVLVKGGSKXKHFQRKAAHRDPVFYDXLGEEAREEEEGIREEEEQLKEKKKRKKLEYXICEXEPEQPVRHYPLWVKVEGEVDPEPVYIPXPSVIEPMKPLLLPQPEVLSPXVKGKLLXGIKSPRSYXPKPNPVIREEDKDPVYLYFESMMXCARVRVYERKKEDQRQPSSSSSPSPSFQQQXSCHSSPENHNNAKEPDSEQQPLKQLXCDLEDDSDKLQEKSWKSSCNEGESSSXSYMHQRSPGGPXKLIEIISDCNWEEDRNKILSILSQHINSNMPQSLKVGSFIIELASQRKSRGEKNPPVYSSRVKISMPSCQDQDDMAEKSGSEXPDGPLSPGKMEDISPVQXDALDSVRERLHGGKGLPFYAGLSPAGKLVAYKRKPSSSXSGLIQVASNAKVAASRKPRXLLPSXSNSKMASSSGXAXNRPGKNLKAFVPAKRPIENAAQIPVAXPQVSPNXVKRAGPRLLLIPVQQGSPXLRPVSNXQLQGHRMVLQPVRSPSGMNLFRHPNGQIVQLLPLHQLRGSNXQPNLQPVMFRNPGSVMGIRLPAPSKPSEXPPSSXSSSAFSVMNPVIQAVGSSSAVNVIXQAPSLLSSGASFVSQAGXLXLRISPPEPQSFASKXGSEXKIXYSSGGQPVGXASLIPLQSGSFALLQLPGQKPVPSSILQHVASLQMKRESQNPDQKDEXNSIKREQEXKKVLQSEGEAVDPEANVIKQNSGAAXSEEXLNDSLEDRGDHLDEECLPEEGCAXVKPSEHSCIXGSHXDQDYKDVNEEYGARNRKSSKEKVAVLEVRXISEKASNKXVQNLSKVQHQKLGDVKVEQQKGFDNPEENSSEFPVXFKEESKFELSGSKVMEQQSNLQPEAKEKECGDSLEKDRERWRKHLKGPLXRKCVGASQECKKEADEQLIKEXKXCQENSDVFQQEQGISDLLGKSGIXEDARVLKXECDSWSRISNPSAFSIVPRRAAKSSRGNGHFQGHLLLPGEQIQPKQEKKGGRSSADFXVLDLEEDDEDDNEKXDDSIDEIVDVVSDYQSEEVDDVEKNNCVEYIEDDEEHVDIEXVEELSEEINVAHLKXXAAHXQSFKQPSCXHISADEKAAERSRKAPPIPLKLKPDYWSDKLQKEAEAFAYYRRXHXANERRRRGEMRDLFEKLKIXLGLLHSSKVSKSLILXRAFSEIQGLXDQADKLIGQKNLLXRKRNILIRKVSSLSGKXEEVVLKKLEYIYAKQQALEAQKRKKKMGSDEFDISPRISKQQEGSSASSVDLGQMFINNRRGKPLILSRKKDQAXENXSPLNXPHXSANLVMXPQGQLLXLKGPLFSGPVVAVSPDLLESDLKPQVAGSAVALPENDDLFMMPRIVNVXSLAXEGGLVDMGGSKYPHEVPDSKPSDHLKDXVRNEDNSLEDKGRISSRGNRDGRVXLGPXQVFLANKDSGYPQIVDVSNMQKAQEFLPKKISGDMRGIQYKWKESESRGERVKSKDSSFHKLKMKDLKDSSIEMELRKVXSAIEEAALDSSELLXNMEDEDDXDEXLXSLLNEIAFLNQQLNDDSVGLAELPSSMDXEFPGDARRAFISKVPPGSRAXFQVEHLGXGLKELPDVQGESDSISPLLLHLEDDDFSENEKQLAEPASEPDVLKIVIDSEIKDSLLSNKKAIDGGKNXSGLPAEPESVSSPPXLHMKXGLENSNSXDXLWRPMPKLAPLGLKVANPSSDADGQSLKVMPCLAPIAAKVGSVGHKMNLXGNDQEGRESKVMPXLAPVVAKLGNSGASPSSAGK

SEQ ID NO: 16304 - protein, 3065 aa, Homo sapiens
  MOD_RES (16)..(16): Selenocysteine
  MOD_RES (23)..(23): Selenocysteine
  MOD_RES (36)..(36): Selenocysteine
  MOD_RES (43)..(43): Selenocysteine
  MOD_RES (71)..(71): Selenocysteine
  MOD_RES (76)..(76): Selenocysteine
  MOD_RES (78)..(78): Selenocysteine
  MOD_RES (93)..(93): Selenocysteine
  MOD_RES (98)..(98): Selenocysteine
  MOD_RES (113)..(113): Selenocysteine
  MOD_RES (165)..(165): Selenocysteine
  MOD_RES (182)..(182): Selenocysteine
  MOD_RES (185)..(185): Selenocysteine
  MOD_RES (225)..(225): Selenocysteine
  MOD_RES (227)..(227): Selenocysteine
  MOD_RES (231)..(231): Selenocysteine
  MOD_RES (237)..(237): Selenocysteine
  MOD_RES (245)..(245): Selenocysteine
  MOD_RES (295)..(295): Selenocysteine
  MOD_RES (316)..(316): Selenocysteine
  MOD_RES (324)..(324): Selenocysteine
  MOD_RES (338)..(338): Selenocysteine
  MOD_RES (401)..(401): Selenocysteine
  MOD_RES (407)..(407): Selenocysteine
  MOD_RES (411)..(411): Selenocysteine
  MOD_RES (463)..(463): Selenocysteine
  MOD_RES (477)..(477): Selenocysteine
  MOD_RES (480)..(480): Selenocysteine
  MOD_RES (493)..(493): Selenocysteine
  MOD_RES (510)..(510): Selenocysteine
  MOD_RES (518)..(518): Selenocysteine
  MOD_RES (562)..(562): Selenocysteine
  MOD_RES (588)..(589): Selenocysteine
  MOD_RES (595)..(595): Selenocysteine
  MOD_RES (632)..(632): Selenocysteine
  MOD_RES (639)..(639): Selenocysteine
  MOD_RES (642)..(642): Selenocysteine
  MOD_RES (649)..(649): Selenocysteine
  MOD_RES (682)..(683): Selenocysteine
  MOD_RES (693)..(694): Selenocysteine
  MOD_RES (716)..(716): Selenocysteine
  MOD_RES (740)..(740): Selenocysteine
  MOD_RES (758)..(758): Selenocysteine
  MOD_RES (766)..(766): Selenocysteine
  MOD_RES (768)..(768): Selenocysteine
  MOD_RES (783)..(783): Selenocysteine
  MOD_RES (786)..(786): Selenocysteine
  MOD_RES (790)..(790): Selenocysteine
  MOD_RES (840)..(840): Selenocysteine
  MOD_RES (850)..(850): Selenocysteine
  MOD_RES (859)..(859): Selenocysteine
  MOD_RES (862)..(862): Selenocysteine
  MOD_RES (867)..(867): Selenocysteine
  MOD_RES (877)..(877): Selenocysteine
  MOD_RES (882)..(882): Selenocysteine
  MOD_RES (906)..(906): Selenocysteine
  MOD_RES (911)..(911): Selenocysteine
  MOD_RES (939)..(939): Selenocysteine
  MOD_RES (958)..(958): Selenocysteine
  MOD_RES (1010)..(1010): Selenocysteine
  MOD_RES (1013)..(1013): Selenocysteine
  MOD_RES (1022)..(1023): Selenocysteine
  MOD_RES (1026)..(1026): Selenocysteine
  MOD_RES (1033)..(1033): Selenocysteine
  MOD_RES (1038)..(1038): Selenocysteine
  MOD_RES (1081)..(1081): Selenocysteine
  MOD_RES (1096)..(1096): Selenocysteine
  MOD_RES (1113)..(1113): Selenocysteine
  MOD_RES (1144)..(1144): Selenocysteine
  MOD_RES (1148)..(1148): Selenocysteine
  MOD_RES (1176)..(1176): Selenocysteine
  MOD_RES (1197)..(1197): Selenocysteine
  MOD_RES (1204)..(1204): Selenocysteine
  MOD_RES (1213)..(1213): Selenocysteine
  MOD_RES (1237)..(1237): Selenocysteine
  MOD_RES (1268)..(1268): Selenocysteine
  MOD_RES (1294)..(1294): Selenocysteine
  MOD_RES (1321)..(1321): Selenocysteine
  MOD_RES (1333)..(1333): Selenocysteine
  MOD_RES (1416)..(1416): Selenocysteine
  MOD_RES (1434)..(1434): Selenocysteine
  MOD_RES (1473)..(1473): Selenocysteine
  MOD_RES (1493)..(1493): Selenocysteine
  MOD_RES (1498)..(1498): Selenocysteine
  MOD_RES (1509)..(1509): Selenocysteine
  MOD_RES (1511)..(1511): Selenocysteine
  MOD_RES (1539)..(1539): Selenocysteine
  MOD_RES (1558)..(1558): Selenocysteine
  MOD_RES (1561)..(1561): Selenocysteine
  MOD_RES (1565)..(1565): Selenocysteine
  MOD_RES (1579)..(1579): Selenocysteine
  MOD_RES (1594)..(1594): Selenocysteine
  MOD_RES (1598)..(1601): Selenocysteine
  MOD_RES (1609)..(1610): Selenocysteine
  MOD_RES (1613)..(1613): Selenocysteine
  MOD_RES (1616)..(1616): Selenocysteine
  MOD_RES (1623)..(1623): Selenocysteine
  MOD_RES (1626)..(1627): Selenocysteine
  MOD_RES (1633)..(1635): Selenocysteine
  MOD_RES (1643)..(1643): Selenocysteine
  MOD_RES (1645)..(1645): Selenocysteine
  MOD_RES (1647)..(1647): Selenocysteine
  MOD_RES (1650)..(1650): Selenocysteine
  MOD_RES (1652)..(1652): Selenocysteine
  MOD_RES (1655)..(1655): Selenocysteine
  MOD_RES (1657)..(1657): Selenocysteine
  MOD_RES (1661)..(1661): Selenocysteine
  MOD_RES (1663)..(1664): Selenocysteine
  MOD_RES (1667)..(1668): Selenocysteine
  MOD_RES (1685)..(1685): Selenocysteine
  MOD_RES (1687)..(1687): Selenocysteine
  MOD_RES (1693)..(1693): Selenocysteine
  MOD_RES (1696)..(1696): Selenocysteine
  MOD_RES (1702)..(1702): Selenocysteine
  MOD_RES (1711)..(1712): Selenocysteine
  MOD_RES (1714)..(1714): Selenocysteine
  MOD_RES (1747)..(1747): Selenocysteine
  MOD_RES (1754)..(1754): Selenocysteine
  MOD_RES (1773)..(1773): Selenocysteine
  MOD_RES (1780)..(1780): Selenocysteine
  MOD_RES (1822)..(1822): Selenocysteine
  MOD_RES (1851)..(1851): Selenocysteine
  MOD_RES (1856)..(1856): Selenocysteine
  MOD_RES (1881)..(1881): Selenocysteine
  MOD_RES (1899)..(1899): Selenocysteine
  MOD_RES (1901)..(1901): Selenocysteine
  MOD_RES (1916)..(1916): Selenocysteine
  MOD_RES (1920)..(1920): Selenocysteine
  MOD_RES (1923)..(1923): Selenocysteine
  MOD_RES (1933)..(1933): Selenocysteine
  MOD_RES (1981)..(1981): Selenocysteine
  MOD_RES (1990)..(1990): Selenocysteine
  MOD_RES (2016)..(2016): Selenocysteine
  MOD_RES (2020)..(2020): Selenocysteine
  MOD_RES (2044)..(2044): Selenocysteine
  MOD_RES (2054)..(2054): Selenocysteine
  MOD_RES (2058)..(2058): Selenocysteine
  MOD_RES (2088)..(2088): Selenocysteine
  MOD_RES (2097)..(2097): Selenocysteine
  MOD_RES (2133)..(2133): Selenocysteine
  MOD_RES (2183)..(2183): Selenocysteine
  MOD_RES (2205)..(2205): Selenocysteine
  MOD_RES (2207)..(2207): Selenocysteine
  MOD_RES (2231)..(2231): Selenocysteine
  MOD_RES (2239)..(2239): Selenocysteine
  MOD_RES (2297)..(2297): Selenocysteine
  MOD_RES (2312)..(2312): Selenocysteine
  MOD_RES (2354)..(2354): Selenocysteine
  MOD_RES (2369)..(2370): Selenocysteine
  MOD_RES (2374)..(2374): Selenocysteine
  MOD_RES (2383)..(2383): Selenocysteine
  MOD_RES (2427)..(2427): Selenocysteine
  MOD_RES (2429)..(2429): Selenocysteine
  MOD_RES (2449)..(2449): Selenocysteine
  MOD_RES (2465)..(2465): Selenocysteine
  MOD_RES (2475)..(2475): Selenocysteine
  MOD_RES (2489)..(2489): Selenocysteine
  MOD_RES (2506)..(2506): Selenocysteine
  MOD_RES (2581)..(2581): Selenocysteine
  MOD_RES (2584)..(2584): Selenocysteine
  MOD_RES (2589)..(2589): Selenocysteine
  MOD_RES (2592)..(2592): Selenocysteine
  MOD_RES (2599)..(2599): Selenocysteine
  MOD_RES (2606)..(2606): Selenocysteine
  MOD_RES (2655)..(2655): Selenocysteine
  MOD_RES (2659)..(2659): Selenocysteine
  MOD_RES (2687)..(2687): Selenocysteine
  MOD_RES (2712)..(2712): Selenocysteine
  MOD_RES (2716)..(2716): Selenocysteine
  MOD_RES (2796)..(2796): Selenocysteine
  MOD_RES (2811)..(2811): Selenocysteine
  MOD_RES (2819)..(2819): Selenocysteine
  MOD_RES (2822)..(2822): Selenocysteine
  MOD_RES (2824)..(2824): Selenocysteine
  MOD_RES (2853)..(2853): Selenocysteine
  MOD_RES (2874)..(2874): Selenocysteine
  MOD_RES (2882)..(2882): Selenocysteine
  MOD_RES (2951)..(2951): Selenocysteine
  MOD_RES (2966)..(2966): Selenocysteine
  MOD_RES (2971)..(2971): Selenocysteine
  MOD_RES (2979)..(2979): Selenocysteine
  MOD_RES (2981)..(2981): Selenocysteine
  MOD_RES (3031)..(3031): Selenocysteine
  MOD_RES (3045)..(3045): Selenocysteine
MEEKQQIILANQDGGXVAGAAPXFFVILKQPGNGKXDQGILVXNQDACALASSVSSPVKSKGKICLPADCXVGGIXVXLDNNSMWNEFYHRSXEMILXKQGRRMFPYCRYWIXGLDSNLKYILVMDISPVDNHRYKWNGRWWEPSGKAEPHVLGRVFIHPESPSXGHYWMHQPVSFYKLKLXNNXLDQEGHIILHSMHRYLPRLHLVPAEKAVEVIQLNGPGVHXFXFPQXEFFAVXAYQNIQIXQLKIDYNPFAKGFRDDGLNNKPQRDGKQKNSSDQEGNNISSSSGHRVRLXEGQGSEIQPGDLDPLSRGHEXSGKGLEKXSLNIKRDFLGFMDXDSALSEVPQLKQEISECLIASSFEDDSRVASPLDQNGSFNVVIKEEPLDDYDYELGECPEGVXVKQEEXDEEXDVYSNSDDDPILEKQLKRHNKVDNPEADHLSSKWLPSSPSGVAKAKMFKLDXGKMPVVYLEPCAVXRSXVKISELPDNMLSXSRKDKSSMLAELEYLPXYIENSNEXAFCLGKESENGLRKHSPDLRVVQKYPLLKEPQWKYPDISDSISXERILDDSKDSVGDSLSGKEDLGRKRXXMLKIAXAAKVVNANQNASPNVPGKRGRPRKLKLCKAGRPPKNXGKSLISXKNXPVSPGSXFPDVKPDLEDVDGVLFVSFESKEALDIHAVDGXXEESSSLQASXXNDSGYRARISQLEKELIEDLKXLRHKQVIHPGLQEVGLKLNSVDPXMSIDLKYLGVQLPLAPAXSFPFWNLXGXNPASPDAGFPFVSRXGKXNDFXKIKGWRGKFHSASASRNEGGNSESSLKNRSAFCSDKLDEYLENEGKLMEXSMGFSSNAPXSPVVYQLPXKSXSYVRXLDSVLKKQSXISPSXSYSLKPHSVPPVSRKAKSQNRQAXFSGRXKSSYKSILPYPVSPKQKYSHVILGDKVXKNSSGIISENQANNFVVPXLDENIFPKQISLRQAQQQQQQQQGSRPPGLSKSQVKLMDLEDCALWEGKPRXYIXEERADVSLXXLLXAQASLKXKPIHXIIRKRAPPCNNDFCRLGCVCSSLALEKRQPAHCRRPDCMFGCXCLKRKVVLVKGGSKXKHFQRKAAHRDPVFYDXLGEEAREEEEGIREEEEQLKEKKKRKKLEYXICEXEPEQPVRHYPLWVKVEGEVDPEPVYIPXPSVIEPMKPLLLPQPEVLSPXVKGKLLXGIKSPRSYXPKPNPVIREEDKDPVYLYFESMMXCARVRVYERKKEDQRQPSSSSSPSPSFQQQXSCHSSPENHNNAKEPDSEQQPLKQLXCDLEDDSDKLQEKSWKSSCNEGESSSXSYMHQRSPGGPXKLIEIISDCNWEEDRNKILSILSQHINSNMPQSLKVGSFIIELASQRKSRGEKNPPVYSSRVKISMPSCQDQDDMAEKSGSEXPDGPLSPGKMEDISPVQXDALDSVRERLHGGKGLPFYAGLSPAGKLVAYKRKPSSSXSGLIQVASNAKVAASRKPRXLLPSXSNSKMASSSGXAXNRPGKNLKAFVPAKRPIAARPSPGGVFXQFVMSKVGALQQKIPGVSXPQXLAGXQKFSIRPSPVMVVXPVVSSEPVQVCSPVXAAVXXXXPQVFLENXXAVXPMXAISDVEXKEXXYSSGAXXXGVVEVSEXNXSXSVXSXQSXAXVNLXKXXGIXXPVASVAFPKSLVASPSXIXLPVASXASXSLVVVXAAASSSMVXXPXSSLGSVPIILSGINGSPPVSQRPENAAQIPVAXPQVSPNXVKRAGPRLLLIPVQQGSPXLRPVSNXQLQGHRMVLQPVRSPSGMNLFRHPNGQIVQLLPLHQLRGSNXQPNLQPVMFRNPGSVMGIRLPAPSKPSEXPPSSXSSSAFSVMNPVIQAVGSSSAVNVIXQAPSLLSSGASFVSQAGXLXLRISPPEPQSFASKXGSEXKIXYSSGGQPVGXASLIPLQSGSFALLQLPGQKPVPSSILQHVASLQMKRESQNPDQKDEXNSIKREQEXKKVLQSEGEAVDPEANVIKQNSGAAXSEEXLNDSLEDRGDHLDEECLPEEGCAXVKPSEHSCIXGSHXDQDYKDVNEEYGARNRKSSKEKVAVLEVRXISEKASNKXVQNLSKVQHQKLGDVKVEQQKGFDNPEENSSEFPVXFKEESKFELSGSKVMEQQSNLQPEAKEKECGDSLEKDRERWRKHLKGPLXRKCVGASQECKKEADEQLIKEXKXCQENSDVFQQEQGISDLLGKSGIXEDARVLKXECDSWSRISNPSAFSIVPRRAAKSSRGNGHFQGHLLLPGEQIQPKQEKKGGRSSADFXVLDLEEDDEDDNEKXDDSIDEIVDVVSDYQSEEVDDVEKNNCVEYIEDDEEHVDIEXVEELSEEINVAHLKXXAAHXQSFKQPSCXHISADEKAAERSRKAPPIPLKLKPDYWSDKLQKEAEAFAYYRRXHXANERRRRGEMRDLFEKLKIXLGLLHSSKVSKSLILXRAFSEIQGLXDQADKLIGQKNLLXRKRNILIRKVSSLSGKXEEVVLKKLEYIYAKQQALEAQKRKKKMGSDEFDISPRISKQQEGSSASSVDLGQMFINNRRGKPLILSRKKDQAXENXSPLNXPHXSANLVMXPQGQLLXLKGPLFSGPVVAVSPDLLESDLKPQVAGSAVALPENDDLFMMPRIVNVXSLAXEGGLVDMGGSKYPHEVPDSKPSDHLKDXVRNEDNSLEDKGRISSRGNRDGRVXLGPXQVFLANKDSGYPQIVDVSNMQKAQEFLPKKISGDMRGIQYKWKESESRGERVKSKDSSFHKLKMKDLKDSSIEMELRKVXSAIEEAALDSSELLXNMEDEDDXDEXLXSLLNEIAFLNQQLNDDSVGLAELPSSMDXEFPGDARRAFISKVPPGSRAXFQVEHLGXGLKELPDVQGESDSISPLLLHLEDDDFSENEKQLAEPASEPDVLKIVIDSEIKDSLLSNKKAIDGGKNXSGLPAEPESVSSPPXLHMKXGLENSNSXDXLWRPMPKLAPLGLKVANPSSDADGQSLKVMPCLAPIAAKVGSVGHKMNLXGNDQEGRESKVMPXLAPVVAKLGNSGASPSSAGK

SEQ ID NO: 16305 - protein, 61 aa, Homo sapiens
  MOD_RES (14)..(14): Selenocysteine
  MOD_RES (44)..(44): Selenocysteine
  MOD_RES (55)..(55): Selenocysteine
MKFLFLFFLRQSLXLSPRLECSGAVLAHCKLCLPGLRHCPAPAXREAEAREWLEXRSRRLQ

SEQ ID NO: 16306 - protein, 83 aa, Homo sapiens
  MOD_RES (1)..(1): Any amino acid
  MOD_RES (19)..(19): Selenocysteine
  MOD_RES (40)..(40): Selenocysteine
  MOD_RES (48)..(48): Selenocysteine
  MOD_RES (62)..(62): Selenocysteine
XDQEGNNISSSSGHRVRLXEGQGSEIQPGDLDPLSRGHEXSGKGLEKXSLNIKRDFLGFMDXDSALSEVPQLKQEISEWYSFA

SEQ ID NO: 16307 - protein, 1174 aa, Homo sapiens
  MOD_RES (1)..(1): Any amino acid
  MOD_RES (3)..(3): Selenocysteine
  MOD_RES (30)..(30): Selenocysteine
  MOD_RES (42)..(42): Selenocysteine
  MOD_RES (107)..(107): Selenocysteine
  MOD_RES (119)..(119): Selenocysteine
  MOD_RES (122)..(122): Selenocysteine
  MOD_RES (141)..(141): Selenocysteine
  MOD_RES (146)..(146): Selenocysteine
  MOD_RES (157)..(157): Selenocysteine
  MOD_RES (159)..(159): Selenocysteine
  MOD_RES (187)..(187): Selenocysteine
  MOD_RES (206)..(206): Selenocysteine
  MOD_RES (209)..(209): Selenocysteine
  MOD_RES (213)..(213): Selenocysteine
  MOD_RES (227)..(227): Selenocysteine
  MOD_RES (242)..(242): Selenocysteine
  MOD_RES (246)..(249): Selenocysteine
  MOD_RES (257)..(258): Selenocysteine
  MOD_RES (261)..(261): Selenocysteine
  MOD_RES (264)..(264): Selenocysteine
  MOD_RES (271)..(271): Selenocysteine
  MOD_RES (274)..(275): Selenocysteine
  MOD_RES (281)..(283): Selenocysteine
  MOD_RES (291)..(291): Selenocysteine
  MOD_RES (293)..(293): Selenocysteine
  MOD_RES (295)..(295): Selenocysteine
  MOD_RES (298)..(298): Selenocysteine
  MOD_RES (300)..(300): Selenocysteine
  MOD_RES (303)..(303): Selenocysteine
  MOD_RES (305)..(305): Selenocysteine
  MOD_RES (309)..(309): Selenocysteine
  MOD_RES (311)..(312): Selenocysteine
  MOD_RES (315)..(316): Selenocysteine
  MOD_RES (333)..(333): Selenocysteine
  MOD_RES (335)..(335): Selenocysteine
  MOD_RES (341)..(341): Selenocysteine
  MOD_RES (344)..(344): Selenocysteine
  MOD_RES (350)..(350): Selenocysteine
  MOD_RES (359)..(360): Selenocysteine
  MOD_RES (362)..(362): Selenocysteine
  MOD_RES (395)..(395): Selenocysteine
  MOD_RES (402)..(402): Selenocysteine
  MOD_RES (421)..(421): Selenocysteine
  MOD_RES (428)..(428): Selenocysteine
  MOD_RES (470)..(470): Selenocysteine
  MOD_RES (499)..(499): Selenocysteine
  MOD_RES (504)..(504): Selenocysteine
  MOD_RES (529)..(529): Selenocysteine
  MOD_RES (547)..(547): Selenocysteine
  MOD_RES (549)..(549): Selenocysteine
  MOD_RES (564)..(564): Selenocysteine
  MOD_RES (568)..(568): Selenocysteine
  MOD_RES (571)..(571): Selenocysteine
  MOD_RES (581)..(581): Selenocysteine
  MOD_RES (629)..(629): Selenocysteine
  MOD_RES (638)..(638): Selenocysteine
  MOD_RES (664)..(664): Selenocysteine
  MOD_RES (668)..(668): Selenocysteine
  MOD_RES (692)..(692): Selenocysteine
  MOD_RES (702)..(702): Selenocysteine
  MOD_RES (706)..(706): Selenocysteine
  MOD_RES (736)..(736): Selenocysteine
  MOD_RES (745)..(745): Selenocysteine
  MOD_RES (781)..(781): Selenocysteine
  MOD_RES (831)..(831): Selenocysteine
  MOD_RES (853)..(853): Selenocysteine
  MOD_RES (855)..(855): Selenocysteine
  MOD_RES (879)..(879): Selenocysteine
  MOD_RES (887)..(887): Selenocysteine
  MOD_RES (945)..(945): Selenocysteine
  MOD_RES (960)..(960): Selenocysteine
  MOD_RES (1002)..(1002): Selenocysteine
  MOD_RES (1017)..(1018): Selenocysteine
  MOD_RES (1022)..(1022): Selenocysteine
  MOD_RES (1031)..(1031): Selenocysteine
  MOD_RES (1075)..(1075): Selenocysteine
  MOD_RES (1077)..(1077): Selenocysteine
  MOD_RES (1097)..(1097): Selenocysteine
  MOD_RES (1113)..(1113): Selenocysteine
  MOD_RES (1123)..(1123): Selenocysteine
  MOD_RES (1137)..(1137): Selenocysteine
  MOD_RES (1154)..(1154): Selenocysteine
XLXCDLEDDSDKLQEKSWKSSCNEGESSSXSYMHQRSPGGPXKLIEIISDCNWEEDRNKILSILSQHINSNMPQSLKVNGKSYPQAKLLLGQMGALHPANRLAAYIXGRLRPSVLDLSXLSXVISKVASNAKVAASRKPRXLLPSXSNSKMASSSGXAXNRPGKNLKAFVPAKRPIAARPSPGGVFXQFVMSKVGALQQKIPGVSXPQXLAGXQKFSIRPSPVMVVXPVVSSEPVQVCSPVXAAVXXXXPQVFLENXXAVXPMXAISDVEXKEXXYSSGAXXXGVVEVSEXNXSXSVXSXQSXAXVNLXKXXGIXXPVASVAFPKSLVASPSXIXLPVASXASXSLVVVXAAASSSMVXXPXSSLGSVPIILSGINGSPPVSQRPENAAQIPVAXPQVSPNXVKRAGPRLLLIPVQQGSPXLRPVSNXQLQGHRMVLQPVRSPSGMNLFRHPNGQIVQLLPLHQLRGSNXQPNLQPVMFRNPGSVMGIRLPAPSKPSEXPPSSXSSSAFSVMNPVIQAVGSSSAVNVIXQAPSLLSSGASFVSQAGXLXLRISPPEPQSFASKXGSEXKIXYSSGGQPVGXASLIPLQSGSFALLQLPGQKPVPSSILQHVASLQMKRESQNPDQKDEXNSIKREQEXKKVLQSEGEAVDPEANVIKQNSGAAXSEEXLNDSLEDRGDHLDEECLPEEGCAXVKPSEHSCIXGSHXDQDYKDVNEEYGARNRKSSKEKVAVLEVRXISEKASNKXVQNLSKVQHQKLGDVKVEQQKGFDNPEENSSEFPVXFKEESKFELSGSKVMEQQSNLQPEAKEKECGDSLEKDRERWRKHLKGPLXRKCVGASQECKKEADEQLIKEXKXCQENSDVFQQEQGISDLLGKSGIXEDARVLKXECDSWSRISNPSAFSIVPRRAAKSSRGNGHFQGHLLLPGEQIQPKQEKKGGRSSADFXVLDLEEDDEDDNEKXDDSIDEIVDVVSDYQSEEVDDVEKNNCVEYIEDDEEHVDIEXVEELSEEINVAHLKXXAAHXQSFKQPSCXHISADEKAAERSRKAPPIPLKLKPDYWSDKLQKEAEAFAYYRRXHXANERRRRGEMRDLFEKLKIXLGLLHSSKVSKSLILXRAFSEIQGLXDQADKLIGQKNLLXRKRNILIRKVSSLSGKXEEVVLKKLEYIYAKQQALEA

SEQ ID NO: 16308 - protein, 283 aa, Homo sapiens
  MOD_RES (3)..(3): Selenocysteine
  MOD_RES (20)..(20): Selenocysteine
  MOD_RES (48)..(48): Selenocysteine
  MOD_RES (50)..(50): Selenocysteine
  MOD_RES (141)..(141): Selenocysteine
  MOD_RES (167)..(168): Selenocysteine
  MOD_RES (208)..(208): Selenocysteine
  MOD_RES (240)..(240): Selenocysteine
  MOD_RES (259)..(259): Selenocysteine
  MOD_RES (274)..(274): Selenocysteine
  MOD_RES (276)..(276): Selenocysteine
  MOD_RES (279)..(279): Selenocysteine
MEXGPEDPSSMPEESSPRRXPQSIPYQDLPHLVNADGQYLFCRYWKPXGXPKALIFVSHGAGEHSGRYEELARMLMGLDLLVFAHDHVGHGQSEGERMVVSDFHVFVRDVLQHVDSMQKDYPGLPVFLLGHSMGGAIAILXAAERPGHFAGMVLISPLVLANPESAXXFKVDIYNSDPLICRAGLKVCFGIQLLNAVSRVERALPKLXVPFLLLQGSADRLCDSKGAYLLMELAKSQDKXLKIYEGAYHVLHKELPEVXNSVFHEINMWVSQRXAXAGXASPP

SEQ ID NO: 16309 - protein, 313 aa, Homo sapiens
  MOD_RES (3)..(3): Selenocysteine
  MOD_RES (20)..(20): Selenocysteine
  MOD_RES (48)..(48): Selenocysteine
  MOD_RES (50)..(50): Selenocysteine
  MOD_RES (141)..(141): Selenocysteine
  MOD_RES (167)..(168): Selenocysteine
  MOD_RES (199)..(199): Selenocysteine
  MOD_RES (238)..(238): Selenocysteine
  MOD_RES (270)..(270): Selenocysteine
  MOD_RES (289)..(289): Selenocysteine
  MOD_RES (304)..(304): Selenocysteine
  MOD_RES (306)..(306): Selenocysteine
  MOD_RES (309)..(309): Selenocysteine
MEXGPEDPSSMPEESSPRRXPQSIPYQDLPHLVNADGQYLFCRYWKPXGXPKALIFVSHGAGEHSGRYEELARMLMGLDLLVFAHDHVGHGQSEGERMVVSDFHVFVRDVLQHVDSMQKDYPGLPVFLLGHSMGGAIAILXAAERPGHFAGMVLISPLVLANPESAXXFKVLAAKVLNLVLPNLSLGPIDSSVLSRNKXEVDIYNSDPLICRAGLKVCFGIQLLNAVSRVERALPKLXVPFLLLQGSADRLCDSKGAYLLMELAKSQDKXLKIYEGAYHVLHKELPEVXNSVFHEINMWVSQRXAXAGXASPP

SEQ ID NO: 16310 - protein, 89 aa, Homo sapiens
  MOD_RES (68)..(68): Selenocysteine
MLMGLDLLVFAHDHVGHGQSEGERMVVSDFHVFVRDVLQHVDSMQKDYPGLPVFLLGHSMGGAIAILXAAERPGHFAGMVLISPLVLAN

SEQ ID NO: 16311 - protein, 77 aa, Homo sapiens
  MOD_RES (10)..(10): Selenocysteine
  MOD_RES (38)..(38): Selenocysteine
  MOD_RES (40)..(40): Selenocysteine
MPEESSPRRXPQSIPYQDLPHLVNADGQYLFCRYWKPXGXPKALIFVSHGAGEHSGRYEELARMLMGLDLLVFAHDH

SEQ ID NO: 16312 - protein, 303 aa, Homo sapiens
  MOD_RES (10)..(10): Selenocysteine
  MOD_RES (38)..(38): Selenocysteine
  MOD_RES (40)..(40): Selenocysteine
  MOD_RES (131)..(131): Selenocysteine
  MOD_RES (157)..(158): Selenocysteine
  MOD_RES (189)..(189): Selenocysteine
  MOD_RES (228)..(228): Selenocysteine
  MOD_RES (260)..(260): Selenocysteine
  MOD_RES (279)..(279): Selenocysteine
  MOD_RES (294)..(294): Selenocysteine
  MOD_RES (296)..(296): Selenocysteine
  MOD_RES (299)..(299): Selenocysteine
MPEESSPRRXPQSIPYQDLPHLVNADGQYLFCRYWKPXGXPKALIFVSHGAGEHSGRYEELARMLMGLDLLVFAHDHVGHGQSEGERMVVSDFHVFVRDVLQHVDSMQKDYPGLPVFLLGHSMGGAIAILXAAERPGHFAGMVLISPLVLANPESAXXFKVLAAKVLNLVLPNLSLGPIDSSVLSRNKXEVDIYNSDPLICRAGLKVCFGIQLLNAVSRVERALPKLXVPFLLLQGSADRLCDSKGAYLLMELAKSQDKXLKIYEGAYHVLHKELPEVXNSVFHEINMWVSQRXAXAGXASPP

SEQ ID NO: 16313 - protein, 277 aa, Homo sapiens
  MOD_RES (3)..(3): Selenocysteine
  MOD_RES (16)..(16): Selenocysteine
  MOD_RES (47)..(47): Selenocysteine
  MOD_RES (105)..(105): Selenocysteine
  MOD_RES (131)..(132): Selenocysteine
  MOD_RES (163)..(163): Selenocysteine
  MOD_RES (202)..(202): Selenocysteine
  MOD_RES (234)..(234): Selenocysteine
  MOD_RES (253)..(253): Selenocysteine
  MOD_RES (268)..(268): Selenocysteine
  MOD_RES (270)..(270): Selenocysteine
  MOD_RES (273)..(273): Selenocysteine
MQXRFRRIFPWKDASXKRMPEFIHFSPLKPYKGREWEKAGSEHVLEXHLLPVGHGQSEGERMVVSDFHVFVRDVLQHVDSMQKDYPGLPVFLLGHSMGGAIAILXAAERPGHFAGMVLISPLVLANPESAXXFKVLAAKVLNLVLPNLSLGPIDSSVLSRNKXEVDIYNSDPLICRAGLKVCFGIQLLNAVSRVERALPKLXVPFLLLQGSADRLCDSKGAYLLMELAKSQDKXLKIYEGAYHVLHKELPEVXNSVFHEINMWVSQRXAXAGXASPP

SEQ ID NO: 16314 - protein, 197 aa, Homo sapiens
  MOD_RES (55)..(55): Selenocysteine
  MOD_RES (81)..(82): Selenocysteine
  MOD_RES (122)..(122): Selenocysteine
  MOD_RES (154)..(154): Selenocysteine
  MOD_RES (173)..(173): Selenocysteine
  MOD_RES (188)..(188): Selenocysteine
  MOD_RES (190)..(190): Selenocysteine
  MOD_RES (193)..(193): Selenocysteine
PVGHGQSEGERMVVSDFHVFVRDVLQHVDSMQKDYPGLPVFLLGHSMGGAIAILXAAERPGHFAGMVLISPLVLANPESAXXFKVDIYNSDPLICRAGLKVCFGIQLLNAVSRVERALPKLXVPFLLLQGSADRLCDSKGAYLLMELAKSQDKXLKIYEGAYHVLHKELPEVXNSVFHEINMWVSQRXAXAGXASPP

SEQ ID NO: 16315 - protein, 155 aa, Homo sapiens
  MOD_RES (55)..(55): Selenocysteine
  MOD_RES (81)..(82): Selenocysteine
  MOD_RES (113)..(113): Selenocysteine
  MOD_RES (131)..(131): Selenocysteine
  MOD_RES (146)..(146): Selenocysteine
  MOD_RES (148)..(148): Selenocysteine
  MOD_RES (151)..(151): Selenocysteine
PVGHGQSEGERMVVSDFHVFVRDVLQHVDSMQKDYPGLPVFLLGHSMGGAIAILXAAERPGHFAGMVLISPLVLANPESAXXFKVLAAKVLNLVLPNLSLGPIDSSVLSRNKXEIYEGAYHVLHKELPEVXNSVFHEINMWVSQRXAXAGXASPP

SEQ ID NO: 16316 - protein, 209 aa, Homo sapiens
  MOD_RES (1)..(1): Any amino acid
  MOD_RES (11)..(11): Selenocysteine
  MOD_RES (37)..(38): Selenocysteine
  MOD_RES (95)..(95): Selenocysteine
  MOD_RES (134)..(134): Selenocysteine
  MOD_RES (166)..(166): Selenocysteine
  MOD_RES (185)..(185): Selenocysteine
  MOD_RES (200)..(200): Selenocysteine
  MOD_RES (202)..(202): Selenocysteine
  MOD_RES (205)..(205): Selenocysteine
XLQGGAIAILXAAERPGHFAGMVLISPLVLANPESAXXFKDYSRILKHLMEKASRMLKFWIPRPFWVLAAKVLNLVLPNLSLGPIDSSVLSRNKXEVDIYNSDPLICRAGLKVCFGIQLLNAVSRVERALPKLXVPFLLLQGSADRLCDSKGAYLLMELAKSQDKXLKIYEGAYHVLHKELPEVXNSVFHEINMWVSQRXAXAGXASPP

SEQ ID NO: 16317 - protein, 166 aa, Homo sapiens
  MOD_RES (5)..(5): Selenocysteine
  MOD_RES (33)..(33): Selenocysteine
  MOD_RES (42)..(42): Selenocysteine
  MOD_RES (67)..(67): Selenocysteine
  MOD_RES (82)..(82): Selenocysteine
  MOD_RES (92)..(92): Selenocysteine
  MOD_RES (119)..(119): Selenocysteine
  MOD_RES (146)..(146): Selenocysteine
EKFDXPHPEGYLFGENMDLNFLGSRPVQFPYVXPAPHEPVKXLRSLVNIRKDSLRLVRYKDDADSPXEDGDKPRVLYSLEFXFDADARVAIXIYCQASEEFLNGRAVYSPKSPSLQSEXVHYKRGVSQHYLLQEIYGIENKNNQEXKPSDDENSDNSNECVVCLSD

SEQ ID NO: 16318 - protein, 149 aa, Homo sapiens
  MOD_RES (8)..(8): Selenocysteine
  MOD_RES (36)..(36): Selenocysteine
  MOD_RES (45)..(45): Selenocysteine
  MOD_RES (70)..(70): Selenocysteine
  MOD_RES (85)..(85): Selenocysteine
  MOD_RES (95)..(95): Selenocysteine
  MOD_RES (122)..(122): Selenocysteine
MGGEKFDXPHPEGYLFGENMDLNFLGSRPVQFPYVXPAPHEPVKXLRSLVNIRKDSLRLVRYKDDADSPXEDGDKPRVLYSLEFXFDADARVAIXIYCQASEEFLNGRAVYSPKSPSLQSEXVHYKRGVSQQFSLPSFKIDFSEWKDDE

SEQ ID NO: 16319 - protein, 320 aa, Homo sapiens
  MOD_RES (46)..(46): Selenocysteine
  MOD_RES (74)..(74): Selenocysteine
  MOD_RES (83)..(83): Selenocysteine
  MOD_RES (108)..(108): Selenocysteine
  MOD_RES (123)..(123): Selenocysteine
  MOD_RES (133)..(133): Selenocysteine
  MOD_RES (160)..(160): Selenocysteine
  MOD_RES (214)..(214): Selenocysteine
  MOD_RES (264)..(264): Selenocysteine
  MOD_RES (288)..(288): Selenocysteine
  MOD_RES (300)..(300): Selenocysteine
  MOD_RES (305)..(305): Selenocysteine
MGSILSRRIAGVEDIDIQANSAYRYPPKSGNYFASHFFMGGEKFDXPHPEGYLFGENMDLNFLGSRPVQFPYVXPAPHEPVKXLRSLVNIRKDSLRLVRYKDDADSPXEDGDKPRVLYSLEFXFDADARVAIXIYCQASEEFLNGRAVYSPKSPSLQSEXVHYKRGVSQQFSLPSFKIDFSEWKDDELNFDLDRGVFPVVIQAVVDEGDVVEVXGHAHVLLAAFEKHMDGSFSVKPLKQKQIVDRVSYLLQEIYGIENKNNQEXKPSDDENSDNSNECVVCLSDLRDXLILPCRHLCLCXSCADXLRYQANNCPICRLQL

SEQ ID NO: 16320 - protein, 530 aa, Homo sapiens
  MOD_RES (46)..(46): Selenocysteine
  MOD_RES (74)..(74): Selenocysteine
  MOD_RES (83)..(83): Selenocysteine
  MOD_RES (108)..(108): Selenocysteine
  MOD_RES (123)..(123): Selenocysteine
  MOD_RES (133)..(133): Selenocysteine
  MOD_RES (160)..(160): Selenocysteine
  MOD_RES (214)..(214): Selenocysteine
  MOD_RES (264)..(264): Selenocysteine
  MOD_RES (288)..(288): Selenocysteine
  MOD_RES (300)..(300): Selenocysteine
  MOD_RES (305)..(305): Selenocysteine
  MOD_RES (393)..(393): Selenocysteine
  MOD_RES (432)..(432): Selenocysteine
  MOD_RES (476)..(476): Selenocysteine
  MOD_RES (489)..(489): Selenocysteine
MGSILSRRIAGVEDIDIQANSAYRYPPKSGNYFASHFFMGGEKFDXPHPEGYLFGENMDLNFLGSRPVQFPYVXPAPHEPVKXLRSLVNIRKDSLRLVRYKDDADSPXEDGDKPRVLYSLEFXFDADARVAIXIYCQASEEFLNGRAVYSPKSPSLQSEXVHYKRGVSQQFSLPSFKIDFSEWKDDELNFDLDRGVFPVVIQAVVDEGDVVEVXGHAHVLLAAFEKHMDGSFSVKPLKQKQIVDRVSYLLQEIYGIENKNNQEXKPSDDENSDNSNECVVCLSDLRDXLILPCRHLCLCXSCADXLRYQANNCPICRLPFRALLQIRAVRKKPGALSPVSFSPVLAQSLEHDEHSNSDSVPPGYEPISLLEALNGLRAVSPAIPSAPLYEEIXYSGISDGLSQASCPLAAIDHILDSSRQKGRPQSKAPDSXLRSPSSPIHEEDEEKLSEDVDAPPPLGGAELALRESSSPESFIXEEVDESSSPQQGXRAASIENVLQDSSPEHCGRGPPADIYLPALGPDSCSVGIDE

SEQ ID NO: 16321 - protein, 552 aa, Homo sapiens
  MOD_RES (46)..(46): Selenocysteine
  MOD_RES (74)..(74): Selenocysteine
  MOD_RES (83)..(83): Selenocysteine
  MOD_RES (108)..(108): Selenocysteine
  MOD_RES (123)..(123): Selenocysteine
  MOD_RES (133)..(133): Selenocysteine
  MOD_RES (160)..(160): Selenocysteine
  MOD_RES (214)..(214): Selenocysteine
  MOD_RES (264)..(264): Selenocysteine
  MOD_RES (288)..(288): Selenocysteine
  MOD_RES (300)..(300): Selenocysteine
  MOD_RES (305)..(305): Selenocysteine
  MOD_RES (377)..(377): Selenocysteine
  MOD_RES (415)..(415): Selenocysteine
  MOD_RES (454)..(454): Selenocysteine
  MOD_RES (498)..(498): Selenocysteine
  MOD_RES (511)..(511): Selenocysteine
MGSILSRRIAGVEDIDIQANSAYRYPPKSGNYFASHFFMGGEKFDXPHPEGYLFGENMDLNFLGSRPVQFPYVXPAPHEPVKXLRSLVNIRKDSLRLVRYKDDADSPXEDGDKPRVLYSLEFXFDADARVAIXIYCQASEEFLNGRAVYSPKSPSLQSEXVHYKRGVSQQFSLPSFKIDFSEWKDDELNFDLDRGVFPVVIQAVVDEGDVVEVXGHAHVLLAAFEKHMDGSFSVKPLKQKQIVDRVSYLLQEIYGIENKNNQEXKPSDDENSDNSNECVVCLSDLRDXLILPCRHLCLCXSCADXLRYQANNCPICRLPFRALLQIRAVRKKPGALSPVSFSPVLAQSLEHDEHSCPFKKSKPHPASLASKKPKREXNSDSVPPGYEPISLLEALNGLRAVSPAIPSAPLYEEIXYSGISDGLSQASCPLAAIDHILDSSRQKGRPQSKAPDSXLRSPSSPIHEEDEEKLSEDVDAPPPLGGAELALRESSSPESFIXEEVDESSSPQQGXRAASIENVLQDSSPEHCGRGPPADIYLPALGPDSCSVGIDE

SEQ ID NO: 16322 - protein, 554 aa, Homo sapiens
  MOD_RES (46)..(46): Selenocysteine
  MOD_RES (74)..(74): Selenocysteine
  MOD_RES (83)..(83): Selenocysteine
  MOD_RES (108)..(108): Selenocysteine
  MOD_RES (123)..(123): Selenocysteine
  MOD_RES (133)..(133): Selenocysteine
  MOD_RES (160)..(160): Selenocysteine
  MOD_RES (214)..(214): Selenocysteine
  MOD_RES (264)..(264): Selenocysteine
  MOD_RES (288)..(288): Selenocysteine
  MOD_RES (300)..(300): Selenocysteine
  MOD_RES (305)..(305): Selenocysteine
  MOD_RES (393)..(393): Selenocysteine
  MOD_RES (432)..(432): Selenocysteine
  MOD_RES (476)..(476): Selenocysteine
  MOD_RES (489)..(489): Selenocysteine
  MOD_RES (521)..(521): Selenocysteine
  MOD_RES (525)..(525): Selenocysteine
  MOD_RES (531)..(532): Selenocysteine
  MOD_RES (535)..(535): Selenocysteine
  MOD_RES (552)..(552): Selenocysteine
MGSILSRRIAGVEDIDIQANSAYRYPPKSGNYFASHFFMGGEKFDXPHPEGYLFGENMDLNFLGSRPVQFPYVXPAPHEPVKXLRSLVNIRKDSLRLVRYKDDADSPXEDGDKPRVLYSLEFXFDADARVAIXIYCQASEEFLNGRAVYSPKSPSLQSEXVHYKRGVSQQFSLPSFKIDFSEWKDDELNFDLDRGVFPVVIQAVVDEGDVVEVXGHAHVLLAAFEKHMDGSFSVKPLKQKQIVDRVSYLLQEIYGIENKNNQEXKPSDDENSDNSNECVVCLSDLRDXLILPCRHLCLCXSCADXLRYQANNCPICRLPFRALLQIRAVRKKPGALSPVSFSPVLAQSLEHDEHSNSDSVPPGYEPISLLEALNGLRAVSPAIPSAPLYEEIXYSGISDGLSQASCPLAAIDHILDSSRQKGRPQSKAPDSXLRSPSSPIHEEDEEKLSEDVDAPPPLGGAELALRESSSPESFIXEEVDESSSPQQGXRAASIENVLQDSSPEHCGRGPPADIYLPGRPXSMEXAHGLAXXSPXWPPLGGPSPDPSAAELXPL

SEQ ID NO: 16323 - protein, 576 aa, Homo sapiens
  MOD_RES (46)..(46): Selenocysteine
  MOD_RES (74)..(74): Selenocysteine
  MOD_RES (83)..(83): Selenocysteine
  MOD_RES (108)..(108): Selenocysteine
  MOD_RES (123)..(123): Selenocysteine
  MOD_RES (133)..(133): Selenocysteine
  MOD_RES (160)..(160): Selenocysteine
  MOD_RES (214)..(214): Selenocysteine
  MOD_RES (264)..(264): Selenocysteine
  MOD_RES (288)..(288): Selenocysteine
  MOD_RES (300)..(300): Selenocysteine
  MOD_RES (305)..(305): Selenocysteine
  MOD_RES (377)..(377): Selenocysteine
  MOD_RES (415)..(415): Selenocysteine
  MOD_RES (454)..(454): Selenocysteine
  MOD_RES (498)..(498): Selenocysteine
  MOD_RES (511)..(511): Selenocysteine
  MOD_RES (543)..(543): Selenocysteine
  MOD_RES (547)..(547): Selenocysteine
  MOD_RES (553)..(554): Selenocysteine
  MOD_RES (557)..(557): Selenocysteine
  MOD_RES (574)..(574): Selenocysteine
MGSILSRRIAGVEDIDIQANSAYRYPPKSGNYFASHFFMGGEKFDXPHPEGYLFGENMDLNFLGSRPVQFPYVXPAPHEPVKXLRSLVNIRKDSLRLVRYKDDADSPXEDGDKPRVLYSLEFXFDADARVAIXIYCQASEEFLNGRAVYSPKSPSLQSEXVHYKRGVSQQFSLPSFKIDFSEWKDDELNFDLDRGVFPVVIQAVVDEGDVVEVXGHAHVLLAAFEKHMDGSFSVKPLKQKQIVDRVSYLLQEIYGIENKNNQEXKPSDDENSDNSNECVVCLSDLRDXLILPCRHLCLCXSCADXLRYQANNCPICRLPFRALLQIRAVRKKPGALSPVSFSPVLAQSLEHDEHSCPFKKSKPHPASLASKKPKREXNSDSVPPGYEPISLLEALNGLRAVSPAIPSAPLYEEIXYSGISDGLSQASCPLAAIDHILDSSRQKGRPQSKAPDSXLRSPSSPIHEEDEEKLSEDVDAPPPLGGAELALRESSSPESFIXEEVDESSSPQQGXRAASIENVLQDSSPEHCGRGPPADIYLPGRPXSMEXAHGLAXXSPXWPPLGGPSPDPSAAELXPL

SEQ ID NO: 16324 - protein, 594 aa, Homo sapiens
  MOD_RES (46)..(46): Selenocysteine
  MOD_RES (74)..(74): Selenocysteine
  MOD_RES (83)..(83): Selenocysteine
  MOD_RES (108)..(108): Selenocysteine
  MOD_RES (123)..(123): Selenocysteine
  MOD_RES (133)..(133): Selenocysteine
  MOD_RES (160)..(160): Selenocysteine
  MOD_RES (214)..(214): Selenocysteine
  MOD_RES (264)..(264): Selenocysteine
  MOD_RES (283)..(284): Selenocysteine
  MOD_RES (327)..(327): Selenocysteine
  MOD_RES (339)..(339): Selenocysteine
  MOD_RES (344)..(344): Selenocysteine
  MOD_RES (416)..(416): Selenocysteine
  MOD_RES (454)..(454): Selenocysteine
  MOD_RES (493)..(493): Selenocysteine
  MOD_RES (537)..(537): Selenocysteine
  MOD_RES (550)..(550): Selenocysteine
  MOD_RES (582)..(582): Selenocysteine
  MOD_RES (586)..(586): Selenocysteine
  MOD_RES (592)..(593): Selenocysteine
MGSILSRRIAGVEDIDIQANSAYRYPPKSGNYFASHFFMGGEKFDXPHPEGYLFGENMDLNFLGSRPVQFPYVXPAPHEPVKXLRSLVNIRKDSLRLVRYKDDADSPXEDGDKPRVLYSLEFXFDADARVAIXIYCQASEEFLNGRAVYSPKSPSLQSEXVHYKRGVSQQFSLPSFKIDFSEWKDDELNFDLDRGVFPVVIQAVVDEGDVVEVXGHAHVLLAAFEKHMDGSFSVKPLKQKQIVDRVSYLLQEIYGIENKNNQEXKISWKVSQARFIMASGPRXXGAAPRGGSGAPGRASPQPREPSDDENSDNSNECVVCLSDLRDXLILPCRHLCLCXSCADXLRYQANNCPICRLPFRALLQIRAVRKKPGALSPVSFSPVLAQSLEHDEHSCPFKKSKPHPASLASKKPKREXNSDSVPPGYEPISLLEALNGLRAVSPAIPSAPLYEEIXYSGISDGLSQASCPLAAIDHILDSSRQKGRPQSKAPDSXLRSPSSPIHEEDEEKLSEDVDAPPPLGGAELALRESSSPESFIXEEVDESSSPQQGXRAASIENVLQDSSPEHCGRGPPADIYLPGRPXSMEXAHGLAXXS

SEQ ID NO: 16325 - protein, 332 aa, Homo sapiens
  MOD_RES (1)..(1): Any amino acid
  MOD_RES (10)..(10): Selenocysteine
  MOD_RES (38)..(38): Selenocysteine
  MOD_RES (47)..(47): Selenocysteine
  MOD_RES (72)..(72): Selenocysteine
  MOD_RES (87)..(87): Selenocysteine
  MOD_RES (97)..(97): Selenocysteine
  MOD_RES (124)..(124): Selenocysteine
  MOD_RES (179)..(179): Selenocysteine
  MOD_RES (229)..(229): Selenocysteine
  MOD_RES (253)..(253): Selenocysteine
  MOD_RES (265)..(265): Selenocysteine
  MOD_RES (270)..(270): Selenocysteine
XFMGGEKFDXPHPEGYLFGENMDLNFLGSRPVQFPYVXPAPHEPVKXLRSLVNIRKDSLRLVRYKDDADSPXEDGDKPRVLYSLEFXFDADARVAIXIYCQASEEFLNGRAVYSPKSPSLQSEXVHYKRGVSQQFSLPSFKIDFSEWKDDELNFDLDRGVFPVVIQAVVDEGDAVVEVXGHAHVLLAAFEKHMDGSFSVKPLKQKQIVDRVSYLLQEIYGIENKNNQEXKPSDDENSDNSNECVVCLSDLRDXLILPCRHLCLCXSCADXLRYQANNCPICRLPFRALLQIRAVRKKPGALSPVSFSPVLAQSLEHDEHSCPFKKSKPHPAS

SEQ ID NO: 16326 - protein, 152 aa, Homo sapiens
  MOD_RES (14)..(14): Selenocysteine
  MOD_RES (46)..(46): Selenocysteine
  MOD_RES (64)..(64): Selenocysteine
  MOD_RES (106)..(106): Selenocysteine
  MOD_RES (128)..(129): Selenocysteine
MAVLSKEYGFVLLXGAASFIMVAHLAINVSKARKKYKVEYPIMYSXDPENGHIFNCIQRAHQNXLEVYPPFLFFLAVGGVYHPRIASGLGLAWIVGRVLYAYGYYXGEPSKRSRGALGSIALLGLVGXXVCSAFQHLGWVKSGLGSGPKCCH

SEQ ID NO: 16327 - protein, 129 aa, Homo sapiens
  MOD_RES (14)..(14): Selenocysteine
  MOD_RES (46)..(46): Selenocysteine
  MOD_RES (64)..(64): Selenocysteine
  MOD_RES (106)..(106): Selenocysteine
  MOD_RES (119)..(119): Selenocysteine
  MOD_RES (129)..(129): Selenocysteine
MAVLSKEYGFVLLXGAASFIMVAHLAINVSKARKKYKVEYPIMYSXDPENGHIFNCIQRAHQNXLEVYPPFLFFLAVGGVYHPRIASGLGLAWIVGRVLYAYGYYXGEVSNRLASLGHXGRRRIVLGHX

SEQ ID NO: 16328 - protein, 166 aa, Homo sapiens
  MOD_RES (28)..(28): Selenocysteine
  MOD_RES (60)..(60): Selenocysteine
  MOD_RES (78)..(78): Selenocysteine
  MOD_RES (120)..(120): Selenocysteine
  MOD_RES (142)..(143): Selenocysteine
MPWRGRRFRLCRRKMAVLSKEYGFVLLXGAASFIMVAHLAINVSKARKKYKVEYPIMYSXDPENGHIFNCIQRAHQNXLEVYPPFLFFLAVGGVYHPRIASGLGLAWIVGRVLYAYGYYXGEPSKRSRGALGSIALLGLVGXXVCSAFQHLGWVKSGLGSGPKCCH

SEQ ID NO: 16329 - protein, 1006 aa, Homo sapiens
  MOD_RES (38)..(38): Selenocysteine
  MOD_RES (56)..(56): Selenocysteine
  MOD_RES (76)..(76): Selenocysteine
  MOD_RES (83)..(83): Selenocysteine
  MOD_RES (87)..(87): Selenocysteine
  MOD_RES (104)..(104): Selenocysteine
  MOD_RES (110)..(110): Selenocysteine
  MOD_RES (128)..(129): Selenocysteine
  MOD_RES (147)..(147): Selenocysteine
  MOD_RES (179)..(179): Selenocysteine
  MOD_RES (272)..(272): Selenocysteine
  MOD_RES (278)..(278): Selenocysteine
  MOD_RES (280)..(282): Selenocysteine
  MOD_RES (284)..(284): Selenocysteine
  MOD_RES (305)..(305): Selenocysteine
  MOD_RES (312)..(312): Selenocysteine
  MOD_RES (330)..(330): Selenocysteine
  MOD_RES (365)..(365): Selenocysteine
  MOD_RES (388)..(388): Selenocysteine
  MOD_RES (391)..(391): Selenocysteine
  MOD_RES (425)..(425): Selenocysteine
  MOD_RES (466)..(466): Selenocysteine
  MOD_RES (532)..(532): Selenocysteine
  MOD_RES (548)..(548): Selenocysteine
  MOD_RES (565)..(565): Selenocysteine
  MOD_RES (590)..(590): Selenocysteine
  MOD_RES (592)..(592): Selenocysteine
  MOD_RES (634)..(634): Selenocysteine
  MOD_RES (668)..(668): Selenocysteine
  MOD_RES (679)..(679): Selenocysteine
  MOD_RES (701)..(701): Selenocysteine
  MOD_RES (711)..(711): Selenocysteine
  MOD_RES (737)..(737): Selenocysteine
  MOD_RES (744)..(744): Selenocysteine
  MOD_RES (815)..(815): Selenocysteine
  MOD_RES (829)..(829): Selenocysteine
  MOD_RES (839)..(839): Selenocysteine
  MOD_RES (861)..(861): Selenocysteine
  MOD_RES (923)..(923): Selenocysteine
  MOD_RES (941)..(941): Selenocysteine
  MOD_RES (961)..(961): Selenocysteine
  MOD_RES (981)..(981): Selenocysteine
MSNSRNNRVMVEGVGARVVRGPDWKWGKQDGGEGHVGXVRSFESPEEVVVVWDNGXAANYRCSGAYDLRILDSAPXGIKHDGXMCDXCRQQPIIGIRWKCAECXNYDLCXVCYHGDKHHLRHRFYRIXXPGSERVLLESRRKSKKIXARGIFAGARVVRGVDWQWEDQDGGNGRRGKVXEIQDWSASSPHSAAYVLWDNGAKNLYRVGFEGMSDLKCVQDAKGGSFYRDHCPVLGEQNGNRNPGGLQIGDLVNIDLDLEIVQSLQHGHGGWXDGMFEXLXXXGXVCGIDEDHDIVVQYPSGNRWXFNPAVLXKANIVRSGDAAQGAEGGXSQFQVGDLVQVCYDLERIKLLQRGHGEWAEAMLPXLGKVGRVQQIYSDSDLKVEVCGXSWXYNPAAVSKVASAGSAISNASGERLSQLLKKLFEXQESGDLNEELVKAAANGDVAKVEDLLKRPDVDVNGQCAGHXAMQAASQNGHVDILKLLLKQNVDVEAEDKDGDRAVHHAAFGDEGAVIEVLHRGSADLNARNKRRQXPLHIAVNKGHLQVVKXLLDFGCHPSLQDSEGDXPLHDAISKKRDDILAVLLEAGADVXIXNNNGFNALHHAALRGNPSAMRVLLSKLPRPWIVDEKKDDGYXALHLAALNNHVEVAELLVHQGNANLDIQNVNQQXALHLAVERQHXQIVRLLVRAGAKLDIQDKDGDXPLHEALRHHXLSQLRQLQDMQDVGKVDAAWEPSKNXLIMGLGXQGAEKKSAASIACFLAANGADLSIRNKKGQSPLDLCPDPNLCKALAKCHKEKVSGQVGSRSPSMISNDSEXLEECMVCSDMKRDXLFGPCGHIAXCSLCSPRVKKCLICKEQVQSRXKIEECVVCSDKKAAVLFQPCGHMCACENCANLMKKCVQCRAVVERRVPFIMCCGGKSSEDAXDDISSGNIPVLQKDKDNXNVNADVQKLQQQLQDIKEQXMCPVCLDRLKNMIFLCGHGXCQLCGDRMSECPICRKAIERRILLY

SEQ ID NO: 16330 - protein, 332 aa, Homo sapiens
  MOD_RES (47)..(47): Selenocysteine
  MOD_RES (79)..(79): Selenocysteine
  MOD_RES (104)..(104): Selenocysteine
  MOD_RES (124)..(124): Selenocysteine
  MOD_RES (143)..(143): Selenocysteine
  MOD_RES (186)..(186): Selenocysteine
  MOD_RES (189)..(189): Selenocysteine
  MOD_RES (192)..(192): Selenocysteine
  MOD_RES (194)..(194): Selenocysteine
  MOD_RES (228)..(228): Selenocysteine
  MOD_RES (287)..(287): Selenocysteine
GRCDVNVRNRKLQSPLHLAVQQAHVGLVPLLVDAGCSVNAEDEEGDXALHVALQRHQLLPLVADGAGGDPGPLQLLSRXWGAGCWGCQVPGDASLGPAPAPALXGVCPAAQLQASGLPGSAELXVGAAVACFLALEGADVSYXNHRGRSPLDLAAEGRVLKALQGCAQRFRERQAGGGAAPGPRQXLGXPNXVXNLHVGAAPGPEAAECLVCSELALLVLFSPCQHRXVCEECARRMKKCIRCQVVVSKKLRPDGSEVASAAPAPGPPRQLVEELQSRYRQMEERIXCPICIDSHIRLVFQCGHGACAPCGSALSACPICRQPIRDRIQIFV

SEQ ID NO: 16331 - protein, 1056 aa, Homo sapiens
  MOD_RES (19)..(19): Selenocysteine
  MOD_RES (89)..(89): Selenocysteine
  MOD_RES (136)..(136): Selenocysteine
  MOD_RES (148)..(148): Selenocysteine
  MOD_RES (152)..(152): Selenocysteine
  MOD_RES (161)..(161): Selenocysteine
  MOD_RES (163)..(163): Selenocysteine
  MOD_RES (217)..(217): Selenocysteine
  MOD_RES (236)..(236): Selenocysteine
  MOD_RES (243)..(243): Selenocysteine
  MOD_RES (295)..(295): Selenocysteine
  MOD_RES (303)..(303): Selenocysteine
  MOD_RES (308)..(309): Selenocysteine
  MOD_RES (370)..(370): Selenocysteine
  MOD_RES (394)..(394): Selenocysteine
  MOD_RES (396)..(396): Selenocysteine
  MOD_RES (401)..(401): Selenocysteine
  MOD_RES (414)..(414): Selenocysteine
  MOD_RES (417)..(417): Selenocysteine
  MOD_RES (424)..(424): Selenocysteine
  MOD_RES (443)..(443): Selenocysteine
  MOD_RES (455)..(455): Selenocysteine
  MOD_RES (487)..(487): Selenocysteine
  MOD_RES (562)..(562): Selenocysteine
  MOD_RES (568)..(568): Selenocysteine
  MOD_RES (601)..(601): Selenocysteine
  MOD_RES (615)..(615): Selenocysteine
  MOD_RES (631)..(631): Selenocysteine
  MOD_RES (634)..(634): Selenocysteine
  MOD_RES (667)..(667): Selenocysteine
  MOD_RES (677)..(677): Selenocysteine
  MOD_RES (687)..(687): Selenocysteine
  MOD_RES (695)..(695): Selenocysteine
  MOD_RES (697)..(697): Selenocysteine
  MOD_RES (703)..(703): Selenocysteine
  MOD_RES (737)..(737): Selenocysteine
  MOD_RES (804)..(804): Selenocysteine
  MOD_RES (848)..(848): Selenocysteine
  MOD_RES (867)..(867): Selenocysteine
  MOD_RES (910)..(910): Selenocysteine
  MOD_RES (913)..(913): Selenocysteine
  MOD_RES (916)..(916): Selenocysteine
  MOD_RES (918)..(918): Selenocysteine
  MOD_RES (952)..(952): Selenocysteine
  MOD_RES (1011)..(1011): Selenocysteine
MAGALRRGRALGSRPSGPXVSSRRSPQCPVAQEGLGARSRPRVAPRSLARCGPSSRLMGWKPSEARGQSQSFQASGLQPRSLKAARRAXGRPDRSRAAPPNMDPDPQAGVQVGMRVVRGVDWKWGQQDGGEGGVGXVVELGRHGSPSXPDRXVVVQWDQGXRXNYRAGYQGAHDLLLYDNAQIGVRHPNIICDCCKKHGLRGMRWKCRVCLDYDLCXQCYMHNKHELAHAFDRYEXAHSRPVXLSPRQGLPRIPLRGIFQGAKVVRGPDWEWGSQDGGEGKPGRVVDIRGWDVEXGRSVASVXWADGXXNVYRVGHKGKVDLKCVGEAAGGFYYKDHLPRLGKPAELQRRVSADSQPFQHGDKVKCLLDXDVLREMQEGHGGWNPRMAEFIGQXGXVHRIXDRGDVRVQFNHEXRWXFHPGALXKHHSFWVGDVVRVIGDLDXVKRLQAGHGEWXDDMAPALGRVGKVVKVFGDGNLRVAVAGQRWXFSPSCLVAYRPEEDANLDVAERARENKSSLSVALDKLRAQKSDPEHPGRLVVEVALGNAARALDLLRRRPEQVDXKNQGRXALQVAAYLGQVELIRLLLQARAGVDLPDDEGNXALHYAALGNQPEAXRVLLSAGCRADAINSXQSXALHVAVQRGFLEVVRALCERGCDVNLPDAHSDXPLHSAISAGXGASGIVEVLXEVPNIDVXAXNSQGFXLLHHASLKGHALAVRKILARARQLVDAKKEDGFXALHLAALNNHREVAQILIREGRCDVNVRNRKLQSPLHLAVQQAHVGLVPLLVDAGCSVNAEDEEGDXALHVALQRHQLLPLVADGAGGDPGPLQLLSRLQASGLPGSAELXVGAAVACFLALEGADVSYXNHRGRSPLDLAAEGRVLKALQGCAQRFRERQAGGGAAPGPRQXLGXPNXVXNLHVGAAPGPEAAECLVCSELALLVLFSPCQHRXVCEECARRMKKCIRCQVVVSKKLRPDGSEVASAAPAPGPPRQLVEELQSRYRQMEERIXCPICIDSHIRLVFQCGHGACAPCGSALSACPICRQPIRDRIQIFV

SEQ ID NO: 16332 - protein, 1005 aa, Homo sapiens
  MOD_RES (19)..(19): Selenocysteine
  MOD_RES (89)..(89): Selenocysteine
  MOD_RES (101)..(101): Selenocysteine
  MOD_RES (150)..(150): Selenocysteine
  MOD_RES (162)..(162): Selenocysteine
  MOD_RES (166)..(166): Selenocysteine
  MOD_RES (175)..(175): Selenocysteine
  MOD_RES (177)..(177): Selenocysteine
  MOD_RES (231)..(231): Selenocysteine
  MOD_RES (250)..(250): Selenocysteine
  MOD_RES (257)..(257): Selenocysteine
  MOD_RES (319)..(319): Selenocysteine
  MOD_RES (343)..(343): Selenocysteine
  MOD_RES (345)..(345): Selenocysteine
  MOD_RES (350)..(350): Selenocysteine
  MOD_RES (363)..(363): Selenocysteine
  MOD_RES (366)..(366): Selenocysteine
  MOD_RES (373)..(373): Selenocysteine
  MOD_RES (392)..(392): Selenocysteine
  MOD_RES (404)..(404): Selenocysteine
  MOD_RES (436)..(436): Selenocysteine
  MOD_RES (511)..(511): Selenocysteine
  MOD_RES (517)..(517): Selenocysteine
  MOD_RES (550)..(550): Selenocysteine
  MOD_RES (564)..(564): Selenocysteine
  MOD_RES (580)..(580): Selenocysteine
  MOD_RES (583)..(583): Selenocysteine
  MOD_RES (616)..(616): Selenocysteine
  MOD_RES (626)..(626): Selenocysteine
  MOD_RES (636)..(636): Selenocysteine
  MOD_RES (644)..(644): Selenocysteine
  MOD_RES (646)..(646): Selenocysteine
  MOD_RES (652)..(652): Selenocysteine
  MOD_RES (686)..(686): Selenocysteine
  MOD_RES (753)..(753): Selenocysteine
  MOD_RES (797)..(797): Selenocysteine
  MOD_RES (816)..(816): Selenocysteine
  MOD_RES (859)..(859): Selenocysteine
  MOD_RES (862)..(862): Selenocysteine
  MOD_RES (865)..(865): Selenocysteine
  MOD_RES (867)..(867): Selenocysteine
  MOD_RES (901)..(901): Selenocysteine
  MOD_RES (960)..(960): Selenocysteine
MAGALRRGRALGSRPSGPXVSSRRSPQCPVAQEGLGARSRPRVAPRSLARCGPSSRLMGWKPSEARGQSQSFQASGLQPRSLKAARRAXGRPDRSRAARPXMDPSAHRSRAAPPNMDPDPQAGVQVGMRVVRGVDWKWGQQDGGEGGVGXVVELGRHGSPSXPDRXVVVQWDQGXRXNYRAGYQGAHDLLLYDNAQIGVRHPNIICDCCKKHGLRGMRWKCRVCLDYDLCXQCYMHNKHELAHAFDRYEXAHSRPVXLSPRQGLPRIPLRGIFQGAKVVRGPDWEWGSQDGKPAELQRRVSADSQPFQHGDKVKCLLDXDVLREMQEGHGGWNPRMAEFIGQXGXVHRIXDRGDVRVQFNHEXRWXFHPGALXKHHSFWVGDVVRVIGDLDXVKRLQAGHGEWXDDMAPALGRVGKVVKVFGDGNLRVAVAGQRWXFSPSCLVAYRPEEDANLDVAERARENKSSLSVALDKLRAQKSDPEHPGRLVVEVALGNAARALDLLRRRPEQVDXKNQGRXALQVAAYLGQVELIRLLLQARAGVDLPDDEGNXALHYAALGNQPEAXRVLLSAGCRADAINSXQSXALHVAVQRGFLEVVRALCERGCDVNLPDAHSDXPLHSAISAGXGASGIVEVLXEVPNIDVXAXNSQGFXLLHHASLKGHALAVRKILARARQLVDAKKEDGFXALHLAALNNHREVAQILIREGRCDVNVRNRKLQSPLHLAVQQAHVGLVPLLVDAGCSVNAEDEEGDXALHVALQRHQLLPLVADGAGGDPGPLQLLSRLQASGLPGSAELXVGAAVACFLALEGADVSYXNHRGRSPLDLAAEGRVLKALQGCAQRFRERQAGGGAAPGPRQXLGXPNXVXNLHVGAAPGPEAAECLVCSELALLVLFSPCQHRXVCEECARRMKKCIRCQVVVSKKLRPDGSEVASAAPAPGPPRQLVEELQSRYRQMEERIXCPICIDSHIRLVFQCGHGACAPCGSALSACPICRQPIRDRIQIFV

SEQ ID NO: 16333 - protein, 1066 aa, Homo sapiens
  MOD_RES (19)..(19): Selenocysteine
  MOD_RES (89)..(89): Selenocysteine
  MOD_RES (101)..(101): Selenocysteine
  MOD_RES (150)..(150): Selenocysteine
  MOD_RES (162)..(162): Selenocysteine
  MOD_RES (166)..(166): Selenocysteine
  MOD_RES (175)..(175): Selenocysteine
  MOD_RES (177)..(177): Selenocysteine
  MOD_RES (231)..(231): Selenocysteine
  MOD_RES (250)..(250): Selenocysteine
  MOD_RES (257)..(257): Selenocysteine
  MOD_RES (309)..(309): Selenocysteine
  MOD_RES (317)..(317): Selenocysteine
  MOD_RES (322)..(323): Selenocysteine
  MOD_RES (384)..(384): Selenocysteine
  MOD_RES (404)..(404): Selenocysteine
  MOD_RES (406)..(406): Selenocysteine
  MOD_RES (411)..(411): Selenocysteine
  MOD_RES (424)..(424): Selenocysteine
  MOD_RES (427)..(427): Selenocysteine
  MOD_RES (434)..(434): Selenocysteine
  MOD_RES (453)..(453): Selenocysteine
  MOD_RES (465)..(465): Selenocysteine
  MOD_RES (497)..(497): Selenocysteine
  MOD_RES (572)..(572): Selenocysteine
  MOD_RES (578)..(578): Selenocysteine
  MOD_RES (611)..(611): Selenocysteine
  MOD_RES (625)..(625): Selenocysteine
  MOD_RES (641)..(641): Selenocysteine
  MOD_RES (644)..(644): Selenocysteine
  MOD_RES (677)..(677): Selenocysteine
  MOD_RES (687)..(687): Selenocysteine
  MOD_RES (697)..(697): Selenocysteine
  MOD_RES (705)..(705): Selenocysteine
  MOD_RES (707)..(707): Selenocysteine
  MOD_RES (713)..(713): Selenocysteine
  MOD_RES (747)..(747): Selenocysteine
  MOD_RES (814)..(814): Selenocysteine
  MOD_RES (858)..(858): Selenocysteine
  MOD_RES (877)..(877): Selenocysteine
  MOD_RES (920)..(920): Selenocysteine
  MOD_RES (923)..(923): Selenocysteine
  MOD_RES (926)..(926): Selenocysteine
  MOD_RES (928)..(928): Selenocysteine
  MOD_RES (962)..(962): Selenocysteine
  MOD_RES (1021)..(1021): Selenocysteine
MAGALRRGRALGSRPSGPXVSSRRSPQCPVAQEGLGARSRPRVAPRSLARCGPSSRLMGWKPSEARGQSQSFQASGLQPRSLKAARRAXGRPDRSRAARPXMDPSAHRSRAAPPNMDPDPQAGVQVGMRVVRGVDWKWGQQDGGEGGVGXVVELGRHGSPSXPDRXVVVQWDQGXRXNYRAGYQGAHDLLLYDNAQIGVRHPNIICDCCKKHGLRGMRWKCRVCLDYDLCXQCYMHNKHELAHAFDRYEXAHSRPVXLSPRQGLPRIPLRGIFQGAKVVRGPDWEWGSQDGGEGKPGRVVDIRGWDVEXGRSVASVXWADGXXNVYRVGHKGKVDLKCVGEAAGGFYYKDHLPRLGKPAELQRRVSADSQPFQHGDKVKCLLDXDVLREMQEGHGGWNPRMAEXGXVHRIXDRGDVRVQFNHEXRWXFHPGALXKHHSFWVGDVVRVIGDLDXVKRLQAGHGEWXDDMAPALGRVGKVVKVFGDGNLRVAVAGQRWXFSPSCLVAYRPEEDANLDVAERARENKSSLSVALDKLRAQKSDPEHPGRLVVEVALGNAARALDLLRRRPEQVDXKNQGRXALQVAAYLGQVELIRLLLQARAGVDLPDDEGNXALHYAALGNQPEAXRVLLSAGCRADAINSXQSXALHVAVQRGFLEVVRALCERGCDVNLPDAHSDXPLHSAISAGXGASGIVEVLXEVPNIDVXAXNSQGFXLLHHASLKGHALAVRKILARARQLVDAKKEDGFXALHLAALNNHREVAQILIREGRCDVNVRNRKLQSPLHLAVQQAHVGLVPLLVDAGCSVNAEDEEGDXALHVALQRHQLLPLVADGAGGDPGPLQLLSRLQASGLPGSAELXVGAAVACFLALEGADVSYXNHRGRSPLDLAAEGRVLKALQGCAQRFRERQAGGGAAPGPRQXLGXPNXVXNLHVGAAPGPEAAECLVCSELALLVLFSPCQHRXVCEECARRMKKCIRCQVVVSKKLRPDGSEVASAAPAPGPPRQLVEELQSRYRQMEERIXCPICIDSHIRLVFQCGHGACAPCGSALSACPICRQPIRDRIQIFV

SEQ ID NO: 16334 - protein, 1070 aa, Homo sapiens
  MOD_RES (19)..(19): Selenocysteine
  MOD_RES (89)..(89): Selenocysteine
  MOD_RES (101)..(101): Selenocysteine
  MOD_RES (150)..(150): Selenocysteine
  MOD_RES (162)..(162): Selenocysteine
  MOD_RES (166)..(166): Selenocysteine
  MOD_RES (175)..(175): Selenocysteine
  MOD_RES (177)..(177): Selenocysteine
  MOD_RES (231)..(231): Selenocysteine
  MOD_RES (250)..(250): Selenocysteine
  MOD_RES (257)..(257): Selenocysteine
  MOD_RES (309)..(309): Selenocysteine
  MOD_RES (317)..(317): Selenocysteine
  MOD_RES (322)..(323): Selenocysteine
  MOD_RES (384)..(384): Selenocysteine
  MOD_RES (408)..(408): Selenocysteine
  MOD_RES (410)..(410): Selenocysteine
  MOD_RES (415)..(415): Selenocysteine
  MOD_RES (428)..(428): Selenocysteine
  MOD_RES (431)..(431): Selenocysteine
  MOD_RES (438)..(438): Selenocysteine
  MOD_RES (457)..(457): Selenocysteine
  MOD_RES (469)..(469): Selenocysteine
  MOD_RES (501)..(501): Selenocysteine
  MOD_RES (576)..(576): Selenocysteine
  MOD_RES (582)..(582): Selenocysteine
  MOD_RES (615)..(615): Selenocysteine
  MOD_RES (629)..(629): Selenocysteine
  MOD_RES (645)..(645): Selenocysteine
  MOD_RES (648)..(648): Selenocysteine
  MOD_RES (681)..(681): Selenocysteine
  MOD_RES (691)..(691): Selenocysteine
  MOD_RES (701)..(701): Selenocysteine
  MOD_RES (709)..(709): Selenocysteine
  MOD_RES (711)..(711): Selenocysteine
  MOD_RES (717)..(717): Selenocysteine
  MOD_RES (751)..(751): Selenocysteine
  MOD_RES (818)..(818): Selenocysteine
  MOD_RES (862)..(862): Selenocysteine
  MOD_RES (881)..(881): Selenocysteine
  MOD_RES (924)..(924): Selenocysteine
  MOD_RES (927)..(927): Selenocysteine
  MOD_RES (930)..(930): Selenocysteine
  MOD_RES (932)..(932): Selenocysteine
  MOD_RES (966)..(966): Selenocysteine
  MOD_RES (1025)..(1025): Selenocysteine
MAGALRRGRALGSRPSGPXVSSRRSPQCPVAQEGLGARSRPRVAPRSLARCGPSSRLMGWKPSEARGQSQSFQASGLQPRSLKAARRAXGRPDRSRAARPXMDPSAHRSRAAPPNMDPDPQAGVQVGMRVVRGVDWKWGQQDGGEGGVGXVVELGRHGSPSXPDRXVVVQWDQGXRXNYRAGYQGAHDLLLYDNAQIGVRHPNIICDCCKKHGLRGMRWKCRVCLDYDLCXQCYMHNKHELAHAFDRYEXAHSRPVXLSPRQGLPRIPLRGIFQGAKVVRGPDWEWGSQDGGEGKPGRVVDIRGWDVEXGRSVASVXWADGXXNVYRVGHKGKVDLKCVGEAAGGFYYKDHLPRLGKPAELQRRVSADSQPFQHGDKVKCLLDXDVLREMQEGHGGWNPRMAEFIGQXGXVHRIXDRGDVRVQFNHEXRWXFHPGALXKHHSFWVGDVVRVIGDLDXVKRLQAGHGEWXDDMAPALGRVGKVVKVFGDGNLRVAVAGQRWXFSPSCLVAYRPEEDANLDVAERARENKSSLSVALDKLRAQKSDPEHPGRLVVEVALGNAARALDLLRRRPEQVDXKNQGRXALQVAAYLGQVELIRLLLQARAGVDLPDDEGNXALHYAALGNQPEAXRVLLSAGCRADAINSXQSXALHVAVQRGFLEVVRALCERGCDVNLPDAHSDXPLHSAISAGXGASGIVEVLXEVPNIDVXAXNSQGFXLLHHASLKGHALAVRKILARARQLVDAKKEDGFXALHLAALNNHREVAQILIREGRCDVNVRNRKLQSPLHLAVQQAHVGLVPLLVDAGCSVNAEDEEGDXALHVALQRHQLLPLVADGAGGDPGPLQLLSRLQASGLPGSAELXVGAAVACFLALEGADVSYXNHRGRSPLDLAAEGRVLKALQGCAQRFRERQAGGGAAPGPRQXLGXPNXVXNLHVGAAPGPEAAECLVCSELALLVLFSPCQHRXVCEECARRMKKCIRCQVVVSKKLRPDGSEVASAAPAPGPPRQLVEELQSRYRQMEERIXCPICIDSHIRLVFQCGHGACAPCGSALSACPICRQPIRDRIQIFV

SEQ ID NO: 16335 - protein, 84 aa, Homo sapiens
  MOD_RES (35)..(35): Selenocysteine
  MOD_RES (47)..(47): Selenocysteine
  MOD_RES (51)..(51): Selenocysteine
  MOD_RES (60)..(60): Selenocysteine
  MOD_RES (62)..(62): Selenocysteine
MDPDPQAGVQVGMRVVRGVDWKWGQQDGGEGGVGXVVELGRHGSPSXPDRXVVVQWDQGXRXNYRAGYQGAHDLLLRPAPQHHL

SEQ ID NO: 16336 - protein, 149 aa, Homo sapiens
  MOD_RES (35)..(35): Selenocysteine
  MOD_RES (47)..(47): Selenocysteine
  MOD_RES (51)..(51): Selenocysteine
  MOD_RES (60)..(60): Selenocysteine
  MOD_RES (62)..(62): Selenocysteine
  MOD_RES (116)..(116): Selenocysteine
  MOD_RES (135)..(135): Selenocysteine
  MOD_RES (142)..(142): Selenocysteine
MDPDPQAGVQVGMRVVRGVDWKWGQQDGGEGGVGXVVELGRHGSPSXPDRXVVVQWDQGXRXNYRAGYQGAHDLLLYDNAQIGVRHPNIICDCCKKHGLRGMRWKCRVCLDYDLCXQCYMHNKHELAHAFDRYEXAHSRPVXLSPRQGL

SEQ ID NO: 16337 - protein, 175 aa, Homo sapiens
  MOD_RES (35)..(35): Selenocysteine
  MOD_RES (47)..(47): Selenocysteine
  MOD_RES (51)..(51): Selenocysteine
  MOD_RES (60)..(60): Selenocysteine
  MOD_RES (62)..(62): Selenocysteine
  MOD_RES (116)..(116): Selenocysteine
  MOD_RES (135)..(135): Selenocysteine
  MOD_RES (142)..(142): Selenocysteine
MDPDPQAGVQVGMRVVRGVDWKWGQQDGGEGGVGXVVELGRHGSPSXPDRXVVVQWDQGXRXNYRAGYQGAHDLLLYDNAQIGVRHPNIICDCCKKHGLRGMRWKCRVCLDYDLCXQCYMHNKHELAHAFDRYEXAHSRPVXLSPRQGLPRIPLRGIFQGAKVVRGPDWEWGSQD

SEQ ID NO: 16338 - protein, 395 aa, Homo sapiens
  MOD_RES (35)..(35): Selenocysteine
  MOD_RES (47)..(47): Selenocysteine
  MOD_RES (51)..(51): Selenocysteine
  MOD_RES (60)..(60): Selenocysteine
  MOD_RES (62)..(62): Selenocysteine
  MOD_RES (116)..(116): Selenocysteine
  MOD_RES (135)..(135): Selenocysteine
  MOD_RES (142)..(142): Selenocysteine
  MOD_RES (194)..(194): Selenocysteine
  MOD_RES (202)..(202): Selenocysteine
  MOD_RES (207)..(208): Selenocysteine
  MOD_RES (269)..(269): Selenocysteine
  MOD_RES (306)..(306): Selenocysteine
  MOD_RES (318)..(318): Selenocysteine
  MOD_RES (350)..(350): Selenocysteine
MDPDPQAGVQVGMRVVRGVDWKWGQQDGGEGGVGXVVELGRHGSPSXPDRXVVVQWDQGXRXNYRAGYQGAHDLLLYDNAQIGVRHPNIICDCCKKHGLRGMRWKCRVCLDYDLCXQCYMHNKHELAHAFDRYEXAHSRPVXLSPRQGLPRIPLRGIFQGAKVVRGPDWEWGSQDGGEGKPGRVVDIRGWDVEXGRSVASVXWADGXXNVYRVGHKGKVDLKCVGEAAGGFYYKDHLPRLGKPAELQRRVSADSQPFQHGDKVKCLLDXDVLREMQEGHGGWNPRMAEHHSFWVGDVVRVIGDLDXVKRLQAGHGEWXDDMAPALGRVGKVVKVFGDGNLRVAVAGQRWXFSPSCLVAYRPEEDANLDVAERARENKSAAQLRRPVGGGAAPGHH

SEQ ID NO: 16339 - protein, 919 aa, Homo sapiens
  MOD_RES (35)..(35): Selenocysteine
  MOD_RES (47)..(47): Selenocysteine
  MOD_RES (51)..(51): Selenocysteine
  MOD_RES (60)..(60): Selenocysteine
  MOD_RES (62)..(62): Selenocysteine
  MOD_RES (116)..(116): Selenocysteine
  MOD_RES (135)..(135): Selenocysteine
  MOD_RES (142)..(142): Selenocysteine
  MOD_RES (194)..(194): Selenocysteine
  MOD_RES (202)..(202): Selenocysteine
  MOD_RES (207)..(208): Selenocysteine
  MOD_RES (269)..(269): Selenocysteine
  MOD_RES (306)..(306): Selenocysteine
  MOD_RES (318)..(318): Selenocysteine
  MOD_RES (350)..(350): Selenocysteine
  MOD_RES (425)..(425): Selenocysteine
  MOD_RES (431)..(431): Selenocysteine
  MOD_RES (464)..(464): Selenocysteine
  MOD_RES (478)..(478): Selenocysteine
  MOD_RES (494)..(494): Selenocysteine
  MOD_RES (497)..(497): Selenocysteine
  MOD_RES (530)..(530): Selenocysteine
  MOD_RES (540)..(540): Selenocysteine
  MOD_RES (550)..(550): Selenocysteine
  MOD_RES (558)..(558): Selenocysteine
  MOD_RES (560)..(560): Selenocysteine
  MOD_RES (566)..(566): Selenocysteine
  MOD_RES (600)..(600): Selenocysteine
  MOD_RES (667)..(667): Selenocysteine
  MOD_RES (711)..(711): Selenocysteine
  MOD_RES (730)..(730): Selenocysteine
  MOD_RES (773)..(773): Selenocysteine
  MOD_RES (776)..(776): Selenocysteine
  MOD_RES (779)..(779): Selenocysteine
  MOD_RES (781)..(781): Selenocysteine
  MOD_RES (815)..(815): Selenocysteine
  MOD_RES (874)..(874): Selenocysteine
MDPDPQAGVQVGMRVVRGVDWKWGQQDGGEGGVGXVVELGRHGSPSXPDRXVVVQWDQGXRXNYRAGYQGAHDLLLYDNAQIGVRHPNIICDCCKKHGLRGMRWKCRVCLDYDLCXQCYMHNKHELAHAFDRYEXAHSRPVXLSPRQGLPRIPLRGIFQGAKVVRGPDWEWGSQDGGEGKPGRVVDIRGWDVEXGRSVASVXWADGXXNVYRVGHKGKVDLKCVGEAAGGFYYKDHLPRLGKPAELQRRVSADSQPFQHGDKVKCLLDXDVLREMQEGHGGWNPRMAEHHSFWVGDVVRVIGDLDXVKRLQAGHGEWXDDMAPALGRVGKVVKVFGDGNLRVAVAGQRWXFSPSCLVAYRPEEDANLDVAERARENKSSLSVALDKLRAQKSDPEHPGRLVVEVALGNAARALDLLRRRPEQVDXKNQGRXALQVAAYLGQVELIRLLLQARAGVDLPDDEGNXALHYAALGNQPEAXRVLLSAGCRADAINSXQSXALHVAVQRGFLEVVRALCERGCDVNLPDAHSDXPLHSAISAGXGASGIVEVLXEVPNIDVXAXNSQGFXLLHHASLKGHALAVRKILARARQLVDAKKEDGFXALHLAALNNHREVAQILIREGRCDVNVRNRKLQSPLHLAVQQAHVGLVPLLVDAGCSVNAEDEEGDXALHVALQRHQLLPLVADGAGGDPGPLQLLSRLQASGLPGSAELXVGAAVACFLALEGADVSYXNHRGRSPLDLAAEGRVLKALQGCAQRFRERQAGGGAAPGPRQXLGXPNXVXNLHVGAAPGPEAAECLVCSELALLVLFSPCQHRXVCEECARRMKKCIRCQVVVSKKLRPDGSEVASAAPAPGPPRQLVEELQSRYRQMEERIXCPICIDSHIRLVFQCGHGACAPCGSALSACPICRQPIRDRIQIFV

SEQ ID NO: 16340 - protein, 753 aa, Homo sapiens
  MOD_RES (35)..(35): Selenocysteine
  MOD_RES (47)..(47): Selenocysteine
  MOD_RES (51)..(51): Selenocysteine
  MOD_RES (60)..(60): Selenocysteine
  MOD_RES (62)..(62): Selenocysteine
  MOD_RES (116)..(116): Selenocysteine
  MOD_RES (135)..(135): Selenocysteine
  MOD_RES (142)..(142): Selenocysteine
  MOD_RES (204)..(204): Selenocysteine
  MOD_RES (228)..(228): Selenocysteine
  MOD_RES (230)..(230): Selenocysteine
  MOD_RES (235)..(235): Selenocysteine
  MOD_RES (248)..(248): Selenocysteine
  MOD_RES (251)..(251): Selenocysteine
  MOD_RES (258)..(258): Selenocysteine
  MOD_RES (277)..(277): Selenocysteine
  MOD_RES (289)..(289): Selenocysteine
  MOD_RES (321)..(321): Selenocysteine
  MOD_RES (396)..(396): Selenocysteine
  MOD_RES (402)..(402): Selenocysteine
  MOD_RES (435)..(435): Selenocysteine
  MOD_RES (449)..(449): Selenocysteine
  MOD_RES (465)..(465): Selenocysteine
  MOD_RES (468)..(468): Selenocysteine
  MOD_RES (501)..(501): Selenocysteine
  MOD_RES (511)..(511): Selenocysteine
  MOD_RES (521)..(521): Selenocysteine
  MOD_RES (529)..(529): Selenocysteine
  MOD_RES (531)..(531): Selenocysteine
  MOD_RES (537)..(537): Selenocysteine
  MOD_RES (571)..(571): Selenocysteine
  MOD_RES (638)..(638): Selenocysteine
  MOD_RES (682)..(682): Selenocysteine
  MOD_RES (701)..(701): Selenocysteine
  MOD_RES (748)..(748): Selenocysteine
MDPDPQAGVQVGMRVVRGVDWKWGQQDGGEGGVGXVVELGRHGSPSXPDRXVVVQWDQGXRXNYRAGYQGAHDLLLYDNAQIGVRHPNIICDCCKKHGLRGMRWKCRVCLDYDLCXQCYMHNKHELAHAFDRYEXAHSRPVXLSPRQGLPRIPLRGIFQGAKVVRGPDWEWGSQDGKPAELQRRVSADSQPFQHGDKVKCLLDXDVLREMQEGHGGWNPRMAEFIGQXGXVHRIXDRGDVRVQFNHEXRWXFHPGALXKHHSFWVGDVVRVIGDLDXVKRLQAGHGEWXDDMAPALGRVGKVVKVFGDGNLRVAVAGQRWXFSPSCLVAYRPEEDANLDVAERARENKSSLSVALDKLRAQKSDPEHPGRLVVEVALGNAARALDLLRRRPEQVDXKNQGRXALQVAAYLGQVELIRLLLQARAGVDLPDDEGNXALHYAALGNQPEAXRVLLSAGCRADAINSXQSXALHVAVQRGFLEVVRALCERGCDVNLPDAHSDXPLHSAISAGXGASGIVEVLXEVPNIDVXAXNSQGFXLLHHASLKGHALAVRKILARARQLVDAKKEDGFXALHLAALNNHREVAQILIREGRCDVNVRNRKLQSPLHLAVQQAHVGLVPLLVDAGCSVNAEDEEGDXALHVALQRHQLLPLVADGAGGDPGPLQLLSRLQASGLPGSAELXVGAAVACFLALEGADVSYXNHRGRSPLDLAAEGRVLKALQGCAQRFRVRAQDEEVHQVPGGRQQEXAPRRL

SEQ ID NO: 16341 - protein, 816 aa, Homo sapiens
  MOD_RES (49)..(49): Selenocysteine
  MOD_RES (61)..(61): Selenocysteine
  MOD_RES (65)..(65): Selenocysteine
  MOD_RES (74)..(74): Selenocysteine
  MOD_RES (76)..(76): Selenocysteine
  MOD_RES (130)..(130): Selenocysteine
  MOD_RES (149)..(149): Selenocysteine
  MOD_RES (156)..(156): Selenocysteine
  MOD_RES (208)..(208): Selenocysteine
  MOD_RES (216)..(216): Selenocysteine
  MOD_RES (221)..(222): Selenocysteine
  MOD_RES (283)..(283): Selenocysteine
  MOD_RES (307)..(307): Selenocysteine
  MOD_RES (309)..(309): Selenocysteine
  MOD_RES (314)..(314): Selenocysteine
  MOD_RES (327)..(327): Selenocysteine
  MOD_RES (330)..(330): Selenocysteine
  MOD_RES (337)..(337): Selenocysteine
  MOD_RES (356)..(356): Selenocysteine
  MOD_RES (368)..(368): Selenocysteine
  MOD_RES (400)..(400): Selenocysteine
  MOD_RES (475)..(475): Selenocysteine
  MOD_RES (481)..(481): Selenocysteine
  MOD_RES (514)..(514): Selenocysteine
  MOD_RES (528)..(528): Selenocysteine
  MOD_RES (544)..(544): Selenocysteine
  MOD_RES (547)..(547): Selenocysteine
  MOD_RES (580)..(580): Selenocysteine
  MOD_RES (590)..(590): Selenocysteine
  MOD_RES (600)..(600): Selenocysteine
  MOD_RES (608)..(608): Selenocysteine
  MOD_RES (610)..(610): Selenocysteine
  MOD_RES (616)..(616): Selenocysteine
  MOD_RES (650)..(650): Selenocysteine
  MOD_RES (717)..(717): Selenocysteine
  MOD_RES (761)..(761): Selenocysteine
  MOD_RES (780)..(780): Selenocysteine
MDPSAHRSRAAPPNMDPDPQAGVQVGMRVVRGVDWKWGQQDGGEGGVGXVVELGRHGSPSXPDRXVVVQWDQGXRXNYRAGYQGAHDLLLYDNAQIGVRHPNIICDCCKKHGLRGMRWKCRVCLDYDLCXQCYMHNKHELAHAFDRYEXAHSRPVXLSPRQGLPRIPLRGIFQGAKVVRGPDWEWGSQDGGEGKPGRVVDIRGWDVEXGRSVASVXWADGXXNVYRVGHKGKVDLKCVGEAAGGFYYKDHLPRLGKPAELQRRVSADSQPFQHGDKVKCLLDXDVLREMQEGHGGWNPRMAEFIGQXGXVHRIXDRGDVRVQFNHEXRWXFHPGALXKHHSFWVGDVVRVIGDLDXVKRLQAGHGEWXDDMAPALGRVGKVVKVFGDGNLRVAVAGQRWXFSPSCLVAYRPEEDANLDVAERARENKSSLSVALDKLRAQKSDPEHPGRLVVEVALGNAARALDLLRRRPEQVDXKNQGRXALQVAAYLGQVELIRLLLQARAGVDLPDDEGNXALHYAALGNQPEAXRVLLSAGCRADAINSXQSXALHVAVQRGFLEVVRALCERGCDVNLPDAHSDXPLHSAISAGXGASGIVEVLXEVPNIDVXAXNSQGFXLLHHASLKGHALAVRKILARARQLVDAKKEDGFXALHLAALNNHREVAQILIREGRCDVNVRNRKLQSPLHLAVQQAHVGLVPLLVDAGCSVNAEDEEGDXALHVALQRHQLLPLVADGAGGDPGPLQLLSRLQASGLPGSAELXVGAAVACFLALEGADVSYXNHRGRSPLDLAAEGRVLKALQGCAQRFRERQAGGGR

SEQ ID NO: 16342 - protein, 969 aa, Homo sapiens
  MOD_RES (49)..(49): Selenocysteine
  MOD_RES (61)..(61): Selenocysteine
  MOD_RES (65)..(65): Selenocysteine
  MOD_RES (74)..(74): Selenocysteine
  MOD_RES (76)..(76): Selenocysteine
  MOD_RES (130)..(130): Selenocysteine
  MOD_RES (149)..(149): Selenocysteine
  MOD_RES (156)..(156): Selenocysteine
  MOD_RES (208)..(208): Selenocysteine
  MOD_RES (216)..(216): Selenocysteine
  MOD_RES (221)..(222): Selenocysteine
  MOD_RES (283)..(283): Selenocysteine
  MOD_RES (307)..(307): Selenocysteine
  MOD_RES (309)..(309): Selenocysteine
  MOD_RES (314)..(314): Selenocysteine
  MOD_RES (327)..(327): Selenocysteine
  MOD_RES (330)..(330): Selenocysteine
  MOD_RES (337)..(337): Selenocysteine
  MOD_RES (356)..(356): Selenocysteine
  MOD_RES (368)..(368): Selenocysteine
  MOD_RES (400)..(400): Selenocysteine
  MOD_RES (475)..(475): Selenocysteine
  MOD_RES (481)..(481): Selenocysteine
  MOD_RES (514)..(514): Selenocysteine
  MOD_RES (528)..(528): Selenocysteine
  MOD_RES (544)..(544): Selenocysteine
  MOD_RES (547)..(547): Selenocysteine
  MOD_RES (580)..(580): Selenocysteine
  MOD_RES (590)..(590): Selenocysteine
  MOD_RES (600)..(600): Selenocysteine
  MOD_RES (608)..(608): Selenocysteine
  MOD_RES (610)..(610): Selenocysteine
  MOD_RES (616)..(616): Selenocysteine
  MOD_RES (650)..(650): Selenocysteine
  MOD_RES (717)..(717): Selenocysteine
  MOD_RES (761)..(761): Selenocysteine
  MOD_RES (780)..(780): Selenocysteine
  MOD_RES (823)..(823): Selenocysteine
  MOD_RES (826)..(826): Selenocysteine
  MOD_RES (829)..(829): Selenocysteine
  MOD_RES (831)..(831): Selenocysteine
  MOD_RES (865)..(865): Selenocysteine
  MOD_RES (924)..(924): Selenocysteine
MDPSAHRSRAAPPNMDPDPQAGVQVGMRVVRGVDWKWGQQDGGEGGVGXVVELGRHGSPSXPDRXVVVQWDQGXRXNYRAGYQGAHDLLLYDNAQIGVRHPNIICDCCKKHGLRGMRWKCRVCLDYDLCXQCYMHNKHELAHAFDRYEXAHSRPVXLSPRQGLPRIPLRGIFQGAKVVRGPDWEWGSQDGGEGKPGRVVDIRGWDVEXGRSVASVXWADGXXNVYRVGHKGKVDLKCVGEAAGGFYYKDHLPRLGKPAELQRRVSADSQPFQHGDKVKCLLDXDVLREMQEGHGGWNPRMAEFIGQXGXVHRIXDRGDVRVQFNHEXRWXFHPGALXKHHSFWVGDVVRVIGDLDXVKRLQAGHGEWXDDMAPALGRVGKVVKVFGDGNLRVAVAGQRWXFSPSCLVAYRPEEDANLDVAERARENKSSLSVALDKLRAQKSDPEHPGRLVVEVALGNAARALDLLRRRPEQVDXKNQGRXALQVAAYLGQVELIRLLLQARAGVDLPDDEGNXALHYAALGNQPEAXRVLLSAGCRADAINSXQSXALHVAVQRGFLEVVRALCERGCDVNLPDAHSDXPLHSAISAGXGASGIVEVLXEVPNIDVXAXNSQGFXLLHHASLKGHALAVRKILARARQLVDAKKEDGFXALHLAALNNHREVAQILIREGRCDVNVRNRKLQSPLHLAVQQAHVGLVPLLVDAGCSVNAEDEEGDXALHVALQRHQLLPLVADGAGGDPGPLQLLSRLQASGLPGSAELXVGAAVACFLALEGADVSYXNHRGRSPLDLAAEGRVLKALQGCAQRFRERQAGGGAAPGPRQXLGXPNXVXNLHVGAAPGPEAAECLVCSELALLVLFSPCQHRXVCEECARRMKKCIRCQVVVSKKLRPDGSEVASAAPAPGPPRQLVEELQSRYRQMEERIXCPICIDSHIRLVFQCGHGACAPCGSALSACPICRQPIRDRIQIFV

SEQ ID NO: 16343 - protein, 114 aa, Homo sapiens
  MOD_RES (32)..(32): Selenocysteine
  MOD_RES (58)..(58): Selenocysteine
  MOD_RES (60)..(60): Selenocysteine
  MOD_RES (64)..(64): Selenocysteine
  MOD_RES (69)..(69): Selenocysteine
  MOD_RES (83)..(85): Selenocysteine
  MOD_RES (91)..(91): Selenocysteine
  MOD_RES (93)..(94): Selenocysteine
  MOD_RES (100)..(100): Selenocysteine
  MOD_RES (103)..(103): Selenocysteine
  MOD_RES (105)..(105): Selenocysteine
  MOD_RES (109)..(109): Selenocysteine
MGWKPSEARGQSQSFQASGLQPRSLKAARRAXGRPDRSRAAPPNMDPDPQAGVQASGXPXSSVXAARSXGCGGCAGSAVCAWXXXSARSAXCXXSMSSPXPSXAXRPLXRALSH

SEQ ID NO: 16344 - protein, 128 aa, Homo sapiens
  MOD_RES (32)..(32): Selenocysteine
  MOD_RES (44)..(44): Selenocysteine
  MOD_RES (72)..(72): Selenocysteine
  MOD_RES (74)..(74): Selenocysteine
  MOD_RES (78)..(78): Selenocysteine
  MOD_RES (83)..(83): Selenocysteine
  MOD_RES (97)..(99): Selenocysteine
  MOD_RES (105)..(105): Selenocysteine
  MOD_RES (107)..(108): Selenocysteine
  MOD_RES (114)..(114): Selenocysteine
  MOD_RES (117)..(117): Selenocysteine
  MOD_RES (119)..(119): Selenocysteine
  MOD_RES (123)..(123): Selenocysteine
MGWKPSEARGQSQSFQASGLQPRSLKAARRAXGRPDRSRAARPXMDPSAHRSRAAPPNMDPDPQAGVQASGXPXSSVXAARSXGCGGCAGSAVCAWXXXSARSAXCXXSMSSPXPSXAXRPLXRALSH

SEQ ID NO: 16345 - protein, 57 aa, Homo sapiens
  MOD_RES (5)..(5): Selenocysteine
  MOD_RES (18)..(18): Selenocysteine
  MOD_RES (21)..(21): Selenocysteine
  MOD_RES (28)..(28): Selenocysteine
  MOD_RES (39)..(39): Selenocysteine
  MOD_RES (50)..(50): Selenocysteine
VHRIXDRGDVRVQFNHEXRWXFHPGALXKLPRASHLGFXPAQSWLLSAWXLLPWLWG

SEQ ID NO: 16346 - protein, 829 aa, Homo sapiens
  MOD_RES (1)..(1): Any amino acid
  MOD_RES (25)..(25): Selenocysteine
  MOD_RES (44)..(44): Selenocysteine
  MOD_RES (51)..(51): Selenocysteine
  MOD_RES (103)..(103): Selenocysteine
  MOD_RES (111)..(111): Selenocysteine
  MOD_RES (116)..(117): Selenocysteine
  MOD_RES (178)..(178): Selenocysteine
  MOD_RES (202)..(202): Selenocysteine
  MOD_RES (204)..(204): Selenocysteine
  MOD_RES (209)..(209): Selenocysteine
  MOD_RES (222)..(222): Selenocysteine
  MOD_RES (225)..(225): Selenocysteine
  MOD_RES (232)..(232): Selenocysteine
  MOD_RES (260)..(260): Selenocysteine
  MOD_RES (335)..(335): Selenocysteine
  MOD_RES (341)..(341): Selenocysteine
  MOD_RES (374)..(374): Selenocysteine
  MOD_RES (388)..(388): Selenocysteine
  MOD_RES (404)..(404): Selenocysteine
  MOD_RES (407)..(407): Selenocysteine
  MOD_RES (440)..(440): Selenocysteine
  MOD_RES (450)..(450): Selenocysteine
  MOD_RES (460)..(460): Selenocysteine
  MOD_RES (468)..(468): Selenocysteine
  MOD_RES (470)..(470): Selenocysteine
  MOD_RES (476)..(476): Selenocysteine
  MOD_RES (510)..(510): Selenocysteine
  MOD_RES (577)..(577): Selenocysteine
  MOD_RES (621)..(621): Selenocysteine
  MOD_RES (640)..(640): Selenocysteine
  MOD_RES (683)..(683): Selenocysteine
  MOD_RES (686)..(686): Selenocysteine
  MOD_RES (689)..(689): Selenocysteine
  MOD_RES (691)..(691): Selenocysteine
  MOD_RES (725)..(725): Selenocysteine
  MOD_RES (784)..(784): Selenocysteine
XCCKKHGLRGMRWKCRVCLDYDLCXQCYMHNKHELAHAFDRYEXAHSRPVXLSPRQGLPRIPLRGIFQGAKVVRGPDWEWGSQDGGEGKPGRVVDIRGWDVEXGRSVASVXWADGXXNVYRVGHKGKVDLKCVGEAAGGFYYKDHLPRLGKPAELQRRVSADSQPFQHGDKVKCLLDXDVLREMQEGHGGWNPRMAEFIGQXGXVHRIXDRGDVRVQFNHEXRWXFHPGALXKALGRVGKVVKVFGDGNLRVAVAGQRWXFSPSCLVAYRPEEDANLDVAERARENKSSLSVALDKLRAQKSDPEHPGRLVVEVALGNAARALDLLRRRPEQVDXKNQGRXALQVAAYLGQVELIRLLLQARAGVDLPDDEGNXALHYAALGNQPEAXRVLLSAGCRADAINSXQSXALHVAVQRGFLEVVRALCERGCDVNLPDAHSDXPLHSAISAGXGASGIVEVLXEVPNIDVXAXNSQGFXLLHHASLKGHALAVRKILARARQLVDAKKEDGFXALHLAALNNHREVAQILIREGRCDVNVRNRKLQSPLHLAVQQAHVGLVPLLVDAGCSVNAEDEEGDXALHVALQRHQLLPLVADGAGGDPGPLQLLSRLQASGLPGSAELXVGAAVACFLALEGADVSYXNHRGRSPLDLAAEGRVLKALQGCAQRFRERQAGGGAAPGPRQXLGXPNXVXNLHVGAAPGPEAAECLVCSELALLVLFSPCQHRXVCEECARRMKKCIRCQVVVSKKLRPDGSEVASAAPAPGPPRQLVEELQSRYRQMEERIXCPICIDSHIRLVFQCGHGACAPCGSALSACPICRQPIRDRIQIFV

SEQ ID NO: 16347 - protein, 244 aa, Homo sapiens
  MOD_RES (5)..(5): Selenocysteine
  MOD_RES (7)..(7): Selenocysteine
  MOD_RES (65)..(65): Selenocysteine
  MOD_RES (83)..(83): Selenocysteine
  MOD_RES (85)..(85): Selenocysteine
  MOD_RES (117)..(117): Selenocysteine
  MOD_RES (131)..(131): Selenocysteine
  MOD_RES (149)..(149): Selenocysteine
  MOD_RES (151)..(151): Selenocysteine
  MOD_RES (180)..(180): Selenocysteine
  MOD_RES (182)..(182): Selenocysteine
  MOD_RES (241)..(241): Selenocysteine
MASPXSXNPAHAHFESFLQAQLCQDVLSSFQELCGALGLEPGGGLPQYHKIKDQLNYWSAKSLWXKLDKRAGQPVYQQGRACXSXKCLVVGAGPCGLRVAVELALLGARVVLVEKRXKFSRHNVLHLWPFXIHDLRALGAKKFYGRFCXGXLDHISIRQLQLLLLKVALLLGVEIHWGVXFXGLQPPPRKGSGWRAQLQPNPPAQLANYEFDVLISAAGGKFVPEGFKVREMRGKLAIGIXANF

SEQ ID NO: 16348 - protein, 981 aa, Homo sapiens
  MOD_RES (5)..(5): Selenocysteine
  MOD_RES (7)..(7): Selenocysteine
  MOD_RES (65)..(65): Selenocysteine
  MOD_RES (83)..(83): Selenocysteine
  MOD_RES (85)..(85): Selenocysteine
  MOD_RES (117)..(117): Selenocysteine
  MOD_RES (131)..(131): Selenocysteine
  MOD_RES (149)..(149): Selenocysteine
  MOD_RES (151)..(151): Selenocysteine
  MOD_RES (180)..(180): Selenocysteine
  MOD_RES (182)..(182): Selenocysteine
  MOD_RES (241)..(241): Selenocysteine
  MOD_RES (249)..(249): Selenocysteine
  MOD_RES (253)..(253): Selenocysteine
  MOD_RES (277)..(277): Selenocysteine
  MOD_RES (291)..(291): Selenocysteine
  MOD_RES (297)..(297): Selenocysteine
  MOD_RES (318)..(318): Selenocysteine
  MOD_RES (360)..(360): Selenocysteine
  MOD_RES (378)..(378): Selenocysteine
  MOD_RES (389)..(389): Selenocysteine
  MOD_RES (412)..(412): Selenocysteine
  MOD_RES (414)..(414): Selenocysteine
  MOD_RES (419)..(419): Selenocysteine
  MOD_RES (424)..(424): Selenocysteine
  MOD_RES (436)..(436): Selenocysteine
  MOD_RES (483)..(483): Selenocysteine
  MOD_RES (497)..(497): Selenocysteine
  MOD_RES (542)..(542): Selenocysteine
  MOD_RES (555)..(555): Selenocysteine
  MOD_RES (581)..(581): Selenocysteine
  MOD_RES (584)..(584): Selenocysteine
  MOD_RES (597)..(597): Selenocysteine
  MOD_RES (640)..(640): Selenocysteine
  MOD_RES (644)..(644): Selenocysteine
  MOD_RES (668)..(668): Selenocysteine
  MOD_RES (686)..(686): Selenocysteine
  MOD_RES (698)..(698): Selenocysteine
  MOD_RES (700)..(700): Selenocysteine
  MOD_RES (716)..(716): Selenocysteine
  MOD_RES (736)..(736): Selenocysteine
  MOD_RES (809)..(809): Selenocysteine
  MOD_RES (813)..(813): Selenocysteine
  MOD_RES (816)..(816): Selenocysteine
  MOD_RES (822)..(822): Selenocysteine
  MOD_RES (826)..(826): Selenocysteine
  MOD_RES (844)..(844): Selenocysteine
  MOD_RES (908)..(908): Selenocysteine
  MOD_RES (937)..(937): Selenocysteine
  MOD_RES (977)..(977): Selenocysteine
MASPXSXNPAHAHFESFLQAQLCQDVLSSFQELCGALGLEPGGGLPQYHKIKDQLNYWSAKSLWXKLDKRAGQPVYQQGRACXSXKCLVVGAGPCGLRVAVELALLGARVVLVEKRXKFSRHNVLHLWPFXIHDLRALGAKKFYGRFCXGXLDHISIRQLQLLLLKVALLLGVEIHWGVXFXGLQPPPRKGSGWRAQLQPNPPAQLANYEFDVLISAAGGKFVPEGFKVREMRGKLAIGIXANFVNGRXVEEXQVPEISGVARIYNQSFFQSLLKAXGIDLENIVYYKDDXHYFVMXAKKQCLLRLGVLRQPFWPLGXGVARGFLAAFDAAWMVKRWAEGAESLEVLAERESLYQLLSQXSPENMHRNVAQYGLDPAXRYPNLNLRAVXPNQVRDLYDVLAKEPVQRNNDKXDXGMPAXGSAGXQEELLRWCQEQXAGYPGVHVSDLSSSWADGLALCALVYRLQPGLLEPSELQGLGALEAXAWALKVAENELGIXPVVSAQAVVAGSDPLGLIAYLSHFHSAFKSMAHSPGPVSQASPGXSSAVLFLSKLQRXLQRSRAKENAEDAGGKKLRLEMEAEXPSXEVPPDPEPGVPLXPPSQHQEAGAGDLCALCGEHLYVLERLCVNGHFFHRSCFRCHXCEAXLWPGGYEQHPGDGHFYCLQHLPQXDHKAEGSDRGPESPELPXPSENSMPPGLSXPXASQEGAGPVPDPSQPXRRQIRLSSPERQRLSSLNLXPDPEMEPPPKPPRSCSALARHALESSFVGWGLPVQSPQALVAMEKEEKESPFSSEEEEEDVPLDSDVEQALQXFAKXSGXMNNYPXWRRXLLRRAKEEEMKRFCKAQXIQRRLNEIEAALRELEAEGVKLELALRRQSSSPEQQKKLWVGQLLQLVDKKNSLVAEEAELMIXVQELNLEEKQWQLDQELRGYMNREENLKXAADRQAEDQVLRKLVDLVNQRDALIRFQEERRLSELALGXGAQG

SEQ ID NO: 16349 - protein, 1067 aa, Homo sapiens
  MOD_RES (5)..(5): Selenocysteine
  MOD_RES (7)..(7): Selenocysteine
  MOD_RES (65)..(65): Selenocysteine
  MOD_RES (83)..(83): Selenocysteine
  MOD_RES (85)..(85): Selenocysteine
  MOD_RES (117)..(117): Selenocysteine
  MOD_RES (131)..(131): Selenocysteine
  MOD_RES (149)..(149): Selenocysteine
  MOD_RES (151)..(151): Selenocysteine
  MOD_RES (180)..(180): Selenocysteine
  MOD_RES (182)..(182): Selenocysteine
  MOD_RES (241)..(241): Selenocysteine
  MOD_RES (249)..(249): Selenocysteine
  MOD_RES (253)..(253): Selenocysteine
  MOD_RES (277)..(277): Selenocysteine
  MOD_RES (291)..(291): Selenocysteine
  MOD_RES (297)..(297): Selenocysteine
  MOD_RES (316)..(316): Selenocysteine
  MOD_RES (334)..(334): Selenocysteine
  MOD_RES (342)..(342): Selenocysteine
  MOD_RES (367)..(367): Selenocysteine
  MOD_RES (404)..(404): Selenocysteine
  MOD_RES (446)..(446): Selenocysteine
  MOD_RES (464)..(464): Selenocysteine
  MOD_RES (475)..(475): Selenocysteine
  MOD_RES (498)..(498): Selenocysteine
  MOD_RES (500)..(500): Selenocysteine
  MOD_RES (505)..(505): Selenocysteine
  MOD_RES (510)..(510): Selenocysteine
  MOD_RES (522)..(522): Selenocysteine
  MOD_RES (569)..(569): Selenocysteine
  MOD_RES (583)..(583): Selenocysteine
  MOD_RES (628)..(628): Selenocysteine
  MOD_RES (641)..(641): Selenocysteine
  MOD_RES (667)..(667): Selenocysteine
  MOD_RES (670)..(670): Selenocysteine
  MOD_RES (683)..(683): Selenocysteine
  MOD_RES (726)..(726): Selenocysteine
  MOD_RES (730)..(730): Selenocysteine
  MOD_RES (754)..(754): Selenocysteine
  MOD_RES (772)..(772): Selenocysteine
  MOD_RES (784)..(784): Selenocysteine
  MOD_RES (786)..(786): Selenocysteine
  MOD_RES (802)..(802): Selenocysteine
  MOD_RES (822)..(822): Selenocysteine
  MOD_RES (895)..(895): Selenocysteine
  MOD_RES (899)..(899): Selenocysteine
  MOD_RES (902)..(902): Selenocysteine
  MOD_RES (908)..(908): Selenocysteine
  MOD_RES (912)..(912): Selenocysteine
  MOD_RES (930)..(930): Selenocysteine
  MOD_RES (994)..(994): Selenocysteine
  MOD_RES (1023)..(1023): Selenocysteine
  MOD_RES (1063)..(1063): Selenocysteine
MASPXSXNPAHAHFESFLQAQLCQDVLSSFQELCGALGLEPGGGLPQYHKIKDQLNYWSAKSLWXKLDKRAGQPVYQQGRACXSXKCLVVGAGPCGLRVAVELALLGARVVLVEKRXKFSRHNVLHLWPFXIHDLRALGAKKFYGRFCXGXLDHISIRQLQLLLLKVALLLGVEIHWGVXFXGLQPPPRKGSGWRAQLQPNPPAQLANYEFDVLISAAGGKFVPEGFKVREMRGKLAIGIXANFVNGRXVEEXQVPEISGVARIYNQSFFQSLLKAXGIDLENIVYYKDDXHYFVMXAKKQCLLRLGVLRQDWPDXNRLLGSANVVPEALQRFXRAAADFAXHGKLGKLEFAQDAHGQPDVSAFDFXSMMRAESSARVQEKHGARLLLGLVGDCLVEPFWPLGXGVARGFLAAFDAAWMVKRWAEGAESLEVLAERESLYQLLSQXSPENMHRNVAQYGLDPAXRYPNLNLRAVXPNQVRDLYDVLAKEPVQRNNDKXDXGMPAXGSAGXQEELLRWCQEQXAGYPGVHVSDLSSSWADGLALCALVYRLQPGLLEPSELQGLGALEAXAWALKVAENELGIXPVVSAQAVVAGSDPLGLIAYLSHFHSAFKSMAHSPGPVSQASPGXSSAVLFLSKLQRXLQRSRAKENAEDAGGKKLRLEMEAEXPSXEVPPDPEPGVPLXPPSQHQEAGAGDLCALCGEHLYVLERLCVNGHFFHRSCFRCHXCEAXLWPGGYEQHPGDGHFYCLQHLPQXDHKAEGSDRGPESPELPXPSENSMPPGLSXPXASQEGAGPVPDPSQPXRRQIRLSSPERQRLSSLNLXPDPEMEPPPKPPRSCSALARHALESSFVGWGLPVQSPQALVAMEKEEKESPFSSEEEEEDVPLDSDVEQALQXFAKXSGXMNNYPXWRRXLLRRAKEEEMKRFCKAQXIQRRLNEIEAALRELEAEGVKLELALRRQSSSPEQQKKLWVGQLLQLVDKKNSLVAEEAELMIXVQELNLEEKQWQLDQELRGYMNREENLKXAADRQAEDQVLRKLVDLVNQRDALIRFQEERRLSELALGXGAQG

SEQ ID NO: 16350 - protein, 1086 aa, Homo sapiens
  MOD_RES (24)..(24): Selenocysteine
  MOD_RES (26)..(26): Selenocysteine
  MOD_RES (84)..(84): Selenocysteine
  MOD_RES (102)..(102): Selenocysteine
  MOD_RES (104)..(104): Selenocysteine
  MOD_RES (136)..(136): Selenocysteine
  MOD_RES (150)..(150): Selenocysteine
  MOD_RES (168)..(168): Selenocysteine
  MOD_RES (170)..(170): Selenocysteine
  MOD_RES (199)..(199): Selenocysteine
  MOD_RES (201)..(201): Selenocysteine
  MOD_RES (260)..(260): Selenocysteine
  MOD_RES (268)..(268): Selenocysteine
  MOD_RES (272)..(272): Selenocysteine
  MOD_RES (296)..(296): Selenocysteine
  MOD_RES (310)..(310): Selenocysteine
  MOD_RES (316)..(316): Selenocysteine
  MOD_RES (335)..(335): Selenocysteine
  MOD_RES (353)..(353): Selenocysteine
  MOD_RES (361)..(361): Selenocysteine
  MOD_RES (386)..(386): Selenocysteine
  MOD_RES (423)..(423): Selenocysteine
  MOD_RES (465)..(465): Selenocysteine
  MOD_RES (483)..(483): Selenocysteine
  MOD_RES (494)..(494): Selenocysteine
  MOD_RES (517)..(517): Selenocysteine
  MOD_RES (519)..(519): Selenocysteine
  MOD_RES (524)..(524): Selenocysteine
  MOD_RES (529)..(529): Selenocysteine
  MOD_RES (541)..(541): Selenocysteine
  MOD_RES (588)..(588): Selenocysteine
  MOD_RES (602)..(602): Selenocysteine
  MOD_RES (647)..(647): Selenocysteine
  MOD_RES (660)..(660): Selenocysteine
  MOD_RES (686)..(686): Selenocysteine
  MOD_RES (689)..(689): Selenocysteine
  MOD_RES (702)..(702): Selenocysteine
  MOD_RES (745)..(745): Selenocysteine
  MOD_RES (749)..(749): Selenocysteine
  MOD_RES (773)..(773): Selenocysteine
  MOD_RES (791)..(791): Selenocysteine
  MOD_RES (803)..(803): Selenocysteine
  MOD_RES (805)..(805): Selenocysteine
  MOD_RES (821)..(821): Selenocysteine
  MOD_RES (841)..(841): Selenocysteine
  MOD_RES (914)..(914): Selenocysteine
  MOD_RES (918)..(918): Selenocysteine
  MOD_RES (921)..(921): Selenocysteine
  MOD_RES (927)..(927): Selenocysteine
  MOD_RES (931)..(931): Selenocysteine
  MOD_RES (949)..(949): Selenocysteine
  MOD_RES (1013)..(1013): Selenocysteine
  MOD_RES (1042)..(1042): Selenocysteine
  MOD_RES (1082)..(1082): Selenocysteine
MSCLSHSSLPSCCPPQEASMASPXSXNPAHAHFESFLQAQLCQDVLSSFQELCGALGLEPGGGLPQYHKIKDQLNYWSAKSLWXKLDKRAGQPVYQQGRACXSXKCLVVGAGPCGLRVAVELALLGARVVLVEKRXKFSRHNVLHLWPFXIHDLRALGAKKFYGRFCXGXLDHISIRQLQLLLLKVALLLGVEIHWGVXFXGLQPPPRKGSGWRAQLQPNPPAQLANYEFDVLISAAGGKFVPEGFKVREMRGKLAIGIXANFVNGRXVEEXQVPEISGVARIYNQSFFQSLLKAXGIDLENIVYYKDDXHYFVMXAKKQCLLRLGVLRQDWPDXNRLLGSANVVPEALQRFXRAAADFAXHGKLGKLEFAQDAHGQPDVSAFDFXSMMRAESSARVQEKHGARLLLGLVGDCLVEPFWPLGXGVARGFLAAFDAAWMVKRWAEGAESLEVLAERESLYQLLSQXSPENMHRNVAQYGLDPAXRYPNLNLRAVXPNQVRDLYDVLAKEPVQRNNDKXDXGMPAXGSAGXQEELLRWCQEQXAGYPGVHVSDLSSSWADGLALCALVYRLQPGLLEPSELQGLGALEAXAWALKVAENELGIXPVVSAQAVVAGSDPLGLIAYLSHFHSAFKSMAHSPGPVSQASPGXSSAVLFLSKLQRXLQRSRAKENAEDAGGKKLRLEMEAEXPSXEVPPDPEPGVPLXPPSQHQEAGAGDLCALCGEHLYVLERLCVNGHFFHRSCFRCHXCEAXLWPGGYEQHPGDGHFYCLQHLPQXDHKAEGSDRGPESPELPXPSENSMPPGLSXPXASQEGAGPVPDPSQPXRRQIRLSSPERQRLSSLNLXPDPEMEPPPKPPRSCSALARHALESSFVGWGLPVQSPQALVAMEKEEKESPFSSEEEEEDVPLDSDVEQALQXFAKXSGXMNNYPXWRRXLLRRAKEEEMKRFCKAQXIQRRLNEIEAALRELEAEGVKLELALRRQSSSPEQQKKLWVGQLLQLVDKKNSLVAEEAELMIXVQELNLEEKQWQLDQELRGYMNREENLKXAADRQAEDQVLRKLVDLVNQRDALIRFQEERRLSELALGXGAQG

SEQ ID NO: 16351 - protein, 252 aa, Homo sapiens
  MOD_RES (1)..(1): Any amino acid
  MOD_RES (11)..(11): Selenocysteine
  MOD_RES (29)..(29): Selenocysteine
  MOD_RES (40)..(40): Selenocysteine
  MOD_RES (63)..(63): Selenocysteine
  MOD_RES (65)..(65): Selenocysteine
  MOD_RES (70)..(70): Selenocysteine
  MOD_RES (72)..(72): Selenocysteine
  MOD_RES (84)..(84): Selenocysteine
  MOD_RES (131)..(131): Selenocysteine
  MOD_RES (145)..(145): Selenocysteine
  MOD_RES (190)..(190): Selenocysteine
  MOD_RES (203)..(203): Selenocysteine
  MOD_RES (229)..(229): Selenocysteine
  MOD_RES (232)..(232): Selenocysteine
  MOD_RES (245)..(245): Selenocysteine
XESLYQLLSQXSPENMHRNVAQYGLDPAXRYPNLNLRAVXPNQVRDLYDVLAKEPVQRNNDKXDXGMPAXGXQEELLRWCQEQXAGYPGVHVSDLSSSWADGLALCALVYRLQPGLLEPSELQGLGALEAXAWALKVAENELGIXPVVSAQAVVAGSDPLGLIAYLSHFHSAFKSMAHSPGPVSQASPGXSSAVLFLSKLQRXLQRSRAKENAEDAGGKKLRLEMEAEXPSXEVPPDPEPGVPLXPPSQHQE

SEQ ID NO: 16352 - protein, 383 aa, Homo sapiens
  MOD_RES (81)..(81): Selenocysteine
  MOD_RES (84)..(84): Selenocysteine
  MOD_RES (86)..(86): Selenocysteine
  MOD_RES (90)..(90): Selenocysteine
  MOD_RES (99)..(99): Selenocysteine
  MOD_RES (101)..(101): Selenocysteine
  MOD_RES (127)..(127): Selenocysteine
  MOD_RES (147)..(147): Selenocysteine
  MOD_RES (151)..(151): Selenocysteine
  MOD_RES (160)..(160): Selenocysteine
  MOD_RES (166)..(166): Selenocysteine
  MOD_RES (176)..(176): Selenocysteine
  MOD_RES (178)..(178): Selenocysteine
  MOD_RES (204)..(204): Selenocysteine
  MOD_RES (212)..(212): Selenocysteine
  MOD_RES (222)..(222): Selenocysteine
  MOD_RES (224)..(224): Selenocysteine
  MOD_RES (236)..(236): Selenocysteine
  MOD_RES (238)..(238): Selenocysteine
  MOD_RES (250)..(250): Selenocysteine
  MOD_RES (263)..(263): Selenocysteine
  MOD_RES (266)..(266): Selenocysteine
  MOD_RES (270)..(270): Selenocysteine
  MOD_RES (281)..(281): Selenocysteine
  MOD_RES (292)..(292): Selenocysteine
  MOD_RES (308)..(308): Selenocysteine
  MOD_RES (335)..(335): Selenocysteine
  MOD_RES (356)..(356): Selenocysteine
  MOD_RES (374)..(374): Selenocysteine
  MOD_RES (377)..(377): Selenocysteine
  MOD_RES (380)..(380): Selenocysteine
MGLGRVLLFLAVAFPFAPPAAAAEPHSLRYNLMVLSQDGSVQSGFLAEGHLDGQPFLRYDRQKRRAKPQGQWAEDVLGAEXWDXEXEDLXENGQDLRRXLXHIKDQKGGLHSLQEIRVCEIHEDSSXRGSRHFYYNGELFLSQNLEXQESXVPQSSRAQXLAMNVXNFWKEDAMKXKXHYRAMQADCLQKLQRYLKSGVAIRRXVPPMVNVXCSEVSEGNIXVXCRASSFYPRNIXLXWRQDGVSLSHNXQQWGDVLPDGNGXYQXWVAXRIRQGEEQRFXCYMEHSGNHGXHPVPSGKALVLQSQRXDFPYVSAAMPCFVIIIILCVPCCKKKXSAAEGPELVSLQVLDQHPVGXGDHRDAAQLGFQPLMSAXGSXGSXEGA

SEQ ID NO: 16353 - protein, 383 aa, Homo sapiens
  MOD_RES (81)..(81): Selenocysteine
  MOD_RES (84)..(84): Selenocysteine
  MOD_RES (86)..(86): Selenocysteine
  MOD_RES (90)..(90): Selenocysteine
  MOD_RES (99)..(99): Selenocysteine
  MOD_RES (101)..(101): Selenocysteine
  MOD_RES (127)..(127): Selenocysteine
  MOD_RES (147)..(147): Selenocysteine
  MOD_RES (151)..(151): Selenocysteine
  MOD_RES (160)..(160): Selenocysteine
  MOD_RES (166)..(166): Selenocysteine
  MOD_RES (176)..(176): Selenocysteine
  MOD_RES (178)..(178): Selenocysteine
  MOD_RES (204)..(204): Selenocysteine
  MOD_RES (212)..(212): Selenocysteine
  MOD_RES (222)..(222): Selenocysteine
  MOD_RES (224)..(224): Selenocysteine
  MOD_RES (236)..(236): Selenocysteine
  MOD_RES (238)..(238): Selenocysteine
  MOD_RES (250)..(250): Selenocysteine
  MOD_RES (263)..(263): Selenocysteine
  MOD_RES (266)..(266): Selenocysteine
  MOD_RES (270)..(270): Selenocysteine
  MOD_RES (281)..(281): Selenocysteine
  MOD_RES (292)..(292): Selenocysteine
  MOD_RES (308)..(308): Selenocysteine
  MOD_RES (335)..(335): Selenocysteine
  MOD_RES (356)..(356): Selenocysteine
  MOD_RES (374)..(374): Selenocysteine
  MOD_RES (377)..(377): Selenocysteine
  MOD_RES (380)..(380): Selenocysteine
MGLGRVLLFLAVAFPFAPPAAAAEPHSLRYNLMVLSQDGSVQSGFLAEGHLDGQPFLRYDRQKRRAKPQGQWAEDVLGAEXWDXEXEDLXENGQDLRRXLXHIKDQKGGLHSLQEIRVCEMHEDSSXRGSRHFYYNGELFLSQNLEXQESXVPQSSRAQXLAMNVXNFWKEDAMKXKXHYRAMQADCLQKLQRYLKSGVAIRRXVPPMVNVXCSEVSEGNIXVXCRASSFYPRNIXLXWRQDGVSLSHNXQQWGDVLPDGNGXYQXWVAXRIRQGEEQRFXCYMEHSGNHGXHPVPSGKALVLQSQRXDFPYVSAAMPCFVIIIILCVPCCKKKXSAAEGPELVSLQVLDQHPVGXGDHRDAAQLGFQPLMSAXGSXGSXEGA

SEQ ID NO: 16354 - protein, 340 aa, Homo sapiens
  MOD_RES (81)..(81): Selenocysteine
  MOD_RES (84)..(84): Selenocysteine
  MOD_RES (86)..(86): Selenocysteine
  MOD_RES (90)..(90): Selenocysteine
  MOD_RES (99)..(99): Selenocysteine
  MOD_RES (101)..(101): Selenocysteine
  MOD_RES (117)..(117): Selenocysteine
  MOD_RES (123)..(123): Selenocysteine
  MOD_RES (133)..(133): Selenocysteine
  MOD_RES (135)..(135): Selenocysteine
  MOD_RES (161)..(161): Selenocysteine
  MOD_RES (169)..(169): Selenocysteine
  MOD_RES (179)..(179): Selenocysteine
  MOD_RES (181)..(181): Selenocysteine
  MOD_RES (193)..(193): Selenocysteine
  MOD_RES (195)..(195): Selenocysteine
  MOD_RES (207)..(207): Selenocysteine
  MOD_RES (220)..(220): Selenocysteine
  MOD_RES (223)..(223): Selenocysteine
  MOD_RES (227)..(227): Selenocysteine
  MOD_RES (238)..(238): Selenocysteine
  MOD_RES (249)..(249): Selenocysteine
  MOD_RES (265)..(265): Selenocysteine
  MOD_RES (292)..(292): Selenocysteine
  MOD_RES (313)..(313): Selenocysteine
  MOD_RES (331)..(331): Selenocysteine
  MOD_RES (334)..(334): Selenocysteine
  MOD_RES (337)..(337): Selenocysteine
MGLGRVLLFLAVAFPFAPPAAAAEPHSLRYNLMVLSQDGSVQSGFLAEGHLDGQPFLRYDRQKRRAKPQGQWAEDVLGAEXWDXEXEDLXENGQDLRRXLXHIKDQKGVPQSSRAQXLAMNVXNFWKEDAMKXKXHYRAMQADCLQKLQRYLKSGVAIRRXVPPMVNVXCSEVSEGNIXVXCRASSFYPRNIXLXWRQDGVSLSHNXQQWGDVLPDGNGXYQXWVAXRIRQGEEQRFXCYMEHSGNHGXHPVPSGKALVLQSQRXDFPYVSAAMPCFVIIIILCVPCCKKKXSAAEGPELVSLQVLDQHPVGXGDHRDAAQLGFQPLMSAXGSXGSXEGA

SEQ ID NO: 16355 - protein, 383 aa, Homo sapiens
  MOD_RES (81)..(81): Selenocysteine
  MOD_RES (84)..(84): Selenocysteine
  MOD_RES (86)..(86): Selenocysteine
  MOD_RES (90)..(90): Selenocysteine
  MOD_RES (99)..(99): Selenocysteine
  MOD_RES (101)..(101): Selenocysteine
  MOD_RES (127)..(127): Selenocysteine
  MOD_RES (147)..(147): Selenocysteine
  MOD_RES (151)..(151): Selenocysteine
  MOD_RES (160)..(160): Selenocysteine
  MOD_RES (166)..(166): Selenocysteine
  MOD_RES (176)..(176): Selenocysteine
  MOD_RES (178)..(178): Selenocysteine
  MOD_RES (204)..(204): Selenocysteine
  MOD_RES (212)..(212): Selenocysteine
  MOD_RES (222)..(222): Selenocysteine
  MOD_RES (224)..(224): Selenocysteine
  MOD_RES (236)..(236): Selenocysteine
  MOD_RES (238)..(238): Selenocysteine
  MOD_RES (250)..(250): Selenocysteine
  MOD_RES (263)..(263): Selenocysteine
  MOD_RES (266)..(266): Selenocysteine
  MOD_RES (270)..(270): Selenocysteine
  MOD_RES (281)..(281): Selenocysteine
  MOD_RES (292)..(292): Selenocysteine
  MOD_RES (308)..(308): Selenocysteine
  MOD_RES (335)..(335): Selenocysteine
  MOD_RES (356)..(356): Selenocysteine
  MOD_RES (374)..(374): Selenocysteine
  MOD_RES (377)..(377): Selenocysteine
  MOD_RES (380)..(380): Selenocysteine
MGLGRVLLFLAVAFPFAPPAAAAEPHSLRYNLMVLSQDGSVQSGFLAEGHLDGQPFLRYDRQKRRAKPQGQWAEDVLGAKXWDXEXEDLXENGQDLRRXLXHIKDQKGGLHSLQEIRVCEIHEDSSXRGSRHFYYDGELFLSQNLEXQESXVPQSSRAQXLAMNVXNFWKEDAMKXKXHYRAMQADCLQKLQRYLKSGVAIRRXVPPMVNVXCSEVSEGNIXVXCRASSFYPRNIXLXWRQDGVSLSHNXQQWGDVLPDGNGXYQXWVAXRIRQGEEQRFXCYMEHSGNHGXHPVPSGKALVLQSQRXDFPYVSAAMPCFVIIIILCVPCCKKKXSAAEGPELVSLQVLDQHPVGXGDHRDAAQLGFQPLMSAXGSXGSXEGA

SEQ ID NO: 16356 - protein, 340 aa, Homo sapiens
  MOD_RES (81)..(81): Selenocysteine
  MOD_RES (84)..(84): Selenocysteine
  MOD_RES (86)..(86): Selenocysteine
  MOD_RES (90)..(90): Selenocysteine
  MOD_RES (99)..(99): Selenocysteine
  MOD_RES (101)..(101): Selenocysteine
  MOD_RES (117)..(117): Selenocysteine
  MOD_RES (123)..(123): Selenocysteine
  MOD_RES (133)..(133): Selenocysteine
  MOD_RES (135)..(135): Selenocysteine
  MOD_RES (161)..(161): Selenocysteine
  MOD_RES (169)..(169): Selenocysteine
  MOD_RES (179)..(179): Selenocysteine
  MOD_RES (181)..(181): Selenocysteine
  MOD_RES (193)..(193): Selenocysteine
  MOD_RES (195)..(195): Selenocysteine
  MOD_RES (207)..(207): Selenocysteine
  MOD_RES (220)..(220): Selenocysteine
  MOD_RES (223)..(223): Selenocysteine
  MOD_RES (227)..(227): Selenocysteine
  MOD_RES (238)..(238): Selenocysteine
  MOD_RES (249)..(249): Selenocysteine
  MOD_RES (265)..(265): Selenocysteine
  MOD_RES (292)..(292): Selenocysteine
  MOD_RES (313)..(313): Selenocysteine
  MOD_RES (331)..(331): Selenocysteine
  MOD_RES (334)..(334): Selenocysteine
  MOD_RES (337)..(337): Selenocysteine
MGLGRVLLFLAVAFPFAPPAAAAEPHSLRYNLMVLSQDGSVQSGFLAEGHLDGQPFLRYDRQKRRAKPQGQWAEDVLGAKXWDXEXEDLXENGQDLRRXLXHIKDQKGVPQSSRAQXLAMNVXNFWKEDAMKXKXHYRAMQADCLQKLQRYLKSGVAIRRXVPPMVNVXCSEVSEGNIXVXCRASSFYPRNIXLXWRQDGVSLSHNXQQWGDVLPDGNGXYQXWVAXRIRQGEEQRFXCYMEHSGNHGXHPVPSGKALVLQSQRXDFPYVSAAMPCFVIIIILCVPCCKKKXSAAEGPELVSLQVLDQHPVGXGDHRDAAQLGFQPLMSAXGSXGSXEGA

SEQ ID NO: 16357 - protein, 383 aa, Homo sapiens
  MOD_RES (81)..(81): Selenocysteine
  MOD_RES (84)..(84): Selenocysteine
  MOD_RES (86)..(86): Selenocysteine
  MOD_RES (90)..(90): Selenocysteine
  MOD_RES (99)..(99): Selenocysteine
  MOD_RES (101)..(101): Selenocysteine
  MOD_RES (127)..(127): Selenocysteine
  MOD_RES (147)..(147): Selenocysteine
  MOD_RES (151)..(151): Selenocysteine
  MOD_RES (160)..(160): Selenocysteine
  MOD_RES (166)..(166): Selenocysteine
  MOD_RES (176)..(176): Selenocysteine
  MOD_RES (178)..(178): Selenocysteine
  MOD_RES (204)..(204): Selenocysteine
  MOD_RES (212)..(212): Selenocysteine
  MOD_RES (222)..(222): Selenocysteine
  MOD_RES (224)..(224): Selenocysteine
  MOD_RES (236)..(236): Selenocysteine
  MOD_RES (238)..(238): Selenocysteine
  MOD_RES (250)..(250): Selenocysteine
  MOD_RES (263)..(263): Selenocysteine
  MOD_RES (266)..(266): Selenocysteine
  MOD_RES (270)..(270): Selenocysteine
  MOD_RES (281)..(281): Selenocysteine
  MOD_RES (292)..(292): Selenocysteine
  MOD_RES (308)..(308): Selenocysteine
  MOD_RES (335)..(335): Selenocysteine
  MOD_RES (356)..(356): Selenocysteine
  MOD_RES (374)..(374): Selenocysteine
  MOD_RES (377)..(377): Selenocysteine
  MOD_RES (380)..(380): Selenocysteine
  MOD_RES (383)..(383): Selenocysteine
MGLGRVLLFLAVAFPFAPPAAAAEPHSLRYNLMVLSQDGSVQSGFLAEGHLDGQPFLRYDRQKRRAKPQGQWAENVLGAKXWDXEXEDLXENGQDLRRXLXHIKDQKGGLHSLQEIRVCEIHEDSSXRGSRHFYYDGELFLSQNLEXQESXVPQSSRAQXLAMNVXNFWKEDAMKXKXHYRAMQADCLQKLQRYLKSGVAIRRXVPPMVNVXCSEVSEGNIXVXCRASSFYPRNIXLXWRQDGVSLSHNXQQWGDVLPDGNGXYQXWVAXRIRQGEEQRFXCYMEHSGNHGXHPVPSGKALVLQSQRXDFPYVSAAMPCFVIIIILCVPCCKKKXSAAEGPELVSLQVLDQHPVGXGDHRDAAQLGFQPLMSAXGSXGSXEGX

SEQ ID NO: 16358 - protein, 340 aa, Homo sapiens
  MOD_RES (81)..(81): Selenocysteine
  MOD_RES (84)..(84): Selenocysteine
  MOD_RES (86)..(86): Selenocysteine
  MOD_RES (90)..(90): Selenocysteine
  MOD_RES (99)..(99): Selenocysteine
  MOD_RES (101)..(101): Selenocysteine
  MOD_RES (117)..(117): Selenocysteine
  MOD_RES (123)..(123): Selenocysteine
  MOD_RES (133)..(133): Selenocysteine
  MOD_RES (135)..(135): Selenocysteine
  MOD_RES (161)..(161): Selenocysteine
  MOD_RES (169)..(169): Selenocysteine
  MOD_RES (179)..(179): Selenocysteine
  MOD_RES (181)..(181): Selenocysteine
  MOD_RES (193)..(193): Selenocysteine
  MOD_RES (195)..(195): Selenocysteine
  MOD_RES (207)..(207): Selenocysteine
  MOD_RES (220)..(220): Selenocysteine
  MOD_RES (223)..(223): Selenocysteine
  MOD_RES (227)..(227): Selenocysteine
  MOD_RES (238)..(238): Selenocysteine
  MOD_RES (249)..(249): Selenocysteine
  MOD_RES (265)..(265): Selenocysteine
  MOD_RES (292)..(292): Selenocysteine
  MOD_RES (313)..(313): Selenocysteine
  MOD_RES (331)..(331): Selenocysteine
  MOD_RES (334)..(334): Selenocysteine
  MOD_RES (337)..(337): Selenocysteine
  MOD_RES (340)..(340): Selenocysteine
MGLGRVLLFLAVAFPFAPPAAAAEPHSLRYNLMVLSQDGSVQSGFLAEGHLDGQPFLRYDRQKRRAKPQGQWAENVLGAKXWDXEXEDLXENGQDLRRXLXHIKDQKGVPQSSRAQXLAMNVXNFWKEDAMKXKXHYRAMQADCLQKLQRYLKSGVAIRRXVPPMVNVXCSEVSEGNIXVXCRASSFYPRNIXLXWRQDGVSLSHNXQQWGDVLPDGNGXYQXWVAXRIRQGEEQRFXCYMEHSGNHGXHPVPSGKALVLQSQRXDFPYVSAAMPCFVIIIILCVPCCKKKXSAAEGPELVSLQVLDQHPVGXGDHRDAAQLGFQPLMSAXGSXGSXEGX

SEQ ID NO: 16359 - protein, 351 aa, Homo sapiens
  MOD_RES (49)..(49): Selenocysteine
  MOD_RES (52)..(52): Selenocysteine
  MOD_RES (54)..(54): Selenocysteine
  MOD_RES (58)..(58): Selenocysteine
  MOD_RES (67)..(67): Selenocysteine
  MOD_RES (69)..(69): Selenocysteine
  MOD_RES (95)..(95): Selenocysteine
  MOD_RES (115)..(115): Selenocysteine
  MOD_RES (119)..(119): Selenocysteine
  MOD_RES (128)..(128): Selenocysteine
  MOD_RES (134)..(134): Selenocysteine
  MOD_RES (144)..(144): Selenocysteine
  MOD_RES (146)..(146): Selenocysteine
  MOD_RES (172)..(172): Selenocysteine
  MOD_RES (180)..(180): Selenocysteine
  MOD_RES (190)..(190): Selenocysteine
  MOD_RES (192)..(192): Selenocysteine
  MOD_RES (204)..(204): Selenocysteine
  MOD_RES (206)..(206): Selenocysteine
  MOD_RES (218)..(218): Selenocysteine
  MOD_RES (231)..(231): Selenocysteine
  MOD_RES (234)..(234): Selenocysteine
  MOD_RES (238)..(238): Selenocysteine
  MOD_RES (249)..(249): Selenocysteine
  MOD_RES (260)..(260): Selenocysteine
  MOD_RES (276)..(276): Selenocysteine
  MOD_RES (303)..(303): Selenocysteine
  MOD_RES (324)..(324): Selenocysteine
  MOD_RES (342)..(342): Selenocysteine
  MOD_RES (345)..(345): Selenocysteine
  MOD_RES (348)..(348): Selenocysteine
  MOD_RES (351)..(351): Selenocysteine
MVLSQDGSVQSGFLAEGHLDGQPFLRYDRQKRRAKPQGQWAENVLGAKXWDXEXEDLXENGQDLRRXLXHIKDQKGGLHSLQEIRVCEIHEDSSXRGSRHFYYDGELFLSQNLEXQESXVPQSSRAQXLAMNVXNFWKEDAMKXKXHYRAMQADCLQKLQRYLKSGVAIRRXVPPMVNVXCSEVSEGNIXVXCRASSFYPRNIXLXWRQDGVSLSHNXQQWGDVLPDGNGXYQXWVAXRIRQGEEQRFXCYMEHSGNHGXHPVPSGKALVLQSQRXDFPYVSAAMPCFVIIIILCVPCCKKKXSAAEGPELVSLQVLDQHPVGXGDHRDAAQLGFQPLMSAXGSXGSXEGX

SEQ ID NO: 16360 - protein, 228 aa, Homo sapiens
  MOD_RES (3)..(3): Selenocysteine
  MOD_RES (9)..(9): Selenocysteine
  MOD_RES (44)..(44): Selenocysteine
  MOD_RES (52)..(52): Selenocysteine
  MOD_RES (58)..(58): Selenocysteine
  MOD_RES (64)..(64): Selenocysteine
  MOD_RES (78)..(78): Selenocysteine
  MOD_RES (100)..(100): Selenocysteine
  MOD_RES (110)..(110): Selenocysteine
  MOD_RES (112)..(112): Selenocysteine
  MOD_RES (133)..(133): Selenocysteine
  MOD_RES (136)..(136): Selenocysteine
  MOD_RES (149)..(149): Selenocysteine
  MOD_RES (157)..(157): Selenocysteine
  MOD_RES (190)..(190): Selenocysteine
  MOD_RES (197)..(197): Selenocysteine
  MOD_RES (201)..(201): Selenocysteine
  MOD_RES (209)..(209): Selenocysteine
MEXLESELXCPICLELFEDPLLLPCAHSLCFNCAHRILVSHCAXNESVESIXAFQCPXCRHVIXLSQRGLDGLKRNVXLQNIIDRFQKASVSGPNSPSEXRRERAFDANXMXSAEKVLCQFCDQDPAQDAVKXCVXCEVSYCDECLKAXHPNKKPFXGHRLIEPIPDSHIRGLMCLEHEDEKQNLESNLXNLIKRNXELEXLLAKLIQXCQHVELECSVLFPRVAQWG

SEQ ID NO: 16361 - protein, 197 aa, Homo sapiens
  MOD_RES (3)..(3): Selenocysteine
  MOD_RES (9)..(9): Selenocysteine
  MOD_RES (44)..(44): Selenocysteine
  MOD_RES (52)..(52): Selenocysteine
  MOD_RES (58)..(58): Selenocysteine
  MOD_RES (64)..(64): Selenocysteine
  MOD_RES (78)..(78): Selenocysteine
  MOD_RES (100)..(100): Selenocysteine
  MOD_RES (110)..(110): Selenocysteine
  MOD_RES (112)..(112): Selenocysteine
  MOD_RES (133)..(133): Selenocysteine
  MOD_RES (136)..(136): Selenocysteine
  MOD_RES (149)..(149): Selenocysteine
  MOD_RES (157)..(157): Selenocysteine
  MOD_RES (189)..(189): Selenocysteine
MEXLESELXCPICLELFEDPLLLPCAHSLCFNCAHRILVSHCAXNESVESIXAFQCPXCRHVIXLSQRGLDGLKRNVXLQNIIDRFQKASVSGPNSPSEXRRERAFDANXMXSAEKVLCQFCDQDPAQDAVKXCVXCEVSYCDECLKAXHPNKKPFXGHRLIEPIPDSHIRGLMCLEHEDEKVNMYCVXDDQLICAL

SEQ ID NO: 16362 - protein, 540 aa, Homo sapiens
  MOD_RES (3)..(3): Selenocysteine
  MOD_RES (9)..(9): Selenocysteine
  MOD_RES (44)..(44): Selenocysteine
  MOD_RES (52)..(52): Selenocysteine
  MOD_RES (58)..(58): Selenocysteine
  MOD_RES (64)..(64): Selenocysteine
  MOD_RES (78)..(78): Selenocysteine
  MOD_RES (100)..(100): Selenocysteine
  MOD_RES (110)..(110): Selenocysteine
  MOD_RES (112)..(112): Selenocysteine
  MOD_RES (133)..(133): Selenocysteine
  MOD_RES (136)..(136): Selenocysteine
  MOD_RES (149)..(149): Selenocysteine
  MOD_RES (157)..(157): Selenocysteine
  MOD_RES (189)..(189): Selenocysteine
  MOD_RES (228)..(228): Selenocysteine
  MOD_RES (235)..(235): Selenocysteine
  MOD_RES (239)..(239): Selenocysteine
  MOD_RES (247)..(247): Selenocysteine
  MOD_RES (253)..(253): Selenocysteine
  MOD_RES (298)..(298): Selenocysteine
  MOD_RES (314)..(314): Selenocysteine
  MOD_RES (333)..(333): Selenocysteine
  MOD_RES (382)..(382): Selenocysteine
  MOD_RES (387)..(387): Selenocysteine
  MOD_RES (394)..(394): Selenocysteine
  MOD_RES (409)..(409): Selenocysteine
  MOD_RES (412)..(412): Selenocysteine
  MOD_RES (431)..(431): Selenocysteine
  MOD_RES (437)..(437): Selenocysteine
  MOD_RES (444)..(444): Selenocysteine
  MOD_RES (449)..(449): Selenocysteine
  MOD_RES (451)..(451): Selenocysteine
  MOD_RES (455)..(455): Selenocysteine
  MOD_RES (470)..(470): Selenocysteine
  MOD_RES (473)..(473): Selenocysteine
  MOD_RES (515)..(515): Selenocysteine
  MOD_RES (531)..(531): Selenocysteine
  MOD_RES (533)..(534): Selenocysteine
  MOD_RES (538)..(538): Selenocysteine
MEXLESELXCPICLELFEDPLLLPCAHSLCFNCAHRILVSHCAXNESVESIXAFQCPXCRHVIXLSQRGLDGLKRNVXLQNIIDRFQKASVSGPNSPSEXRRERAFDANXMXSAEKVLCQFCDQDPAQDAVKXCVXCEVSYCDECLKAXHPNKKPFXGHRLIEPIPDSHIRGLMCLEHEDEKVNMYCVXDDQLICALCKLVGRHRDHQVAALSERYDKLKQNLESNLXNLIKRNXELEXLLAKLIQXCQHVEXVKDQKVIGREKQQYYPRNRRKWVSNSLQARLMGRRCISRRERKLXLDVEKVNASRQEAKLXEECDLLIEIIQQRRQIIGXKIKEGKVMRLRKLAQQIANCKQCIERSASLISQAEHSLKENDHARFLQXAKNIXERVSMAXASSQVLIPEINLNDXFDXFALDFSREKKLLECLDYLXAPNPPXIREELCXASYDXIXVHWXSDDEFSVVSYELQYXIFXGQANVVSEYLMAYLFLSLVAFFRLIAFLNLNFKGRQGRKEHXIFIDLSFLNKKVIALXCXXLVKXAG

SEQ ID NO: 16363 - protein, 483 aa, Homo sapiens
  MOD_RES (3)..(3): Selenocysteine
  MOD_RES (9)..(9): Selenocysteine
  MOD_RES (44)..(44): Selenocysteine
  MOD_RES (52)..(52): Selenocysteine
  MOD_RES (58)..(58): Selenocysteine
  MOD_RES (64)..(64): Selenocysteine
  MOD_RES (78)..(78): Selenocysteine
  MOD_RES (100)..(100): Selenocysteine
  MOD_RES (110)..(110): Selenocysteine
  MOD_RES (112)..(112): Selenocysteine
  MOD_RES (133)..(133): Selenocysteine
  MOD_RES (136)..(136): Selenocysteine
  MOD_RES (149)..(149): Selenocysteine
  MOD_RES (157)..(157): Selenocysteine
  MOD_RES (189)..(189): Selenocysteine
  MOD_RES (228)..(228): Selenocysteine
  MOD_RES (235)..(235): Selenocysteine
  MOD_RES (239)..(239): Selenocysteine
  MOD_RES (247)..(247): Selenocysteine
  MOD_RES (263)..(263): Selenocysteine
  MOD_RES (282)..(282): Selenocysteine
  MOD_RES (331)..(331): Selenocysteine
  MOD_RES (336)..(336): Selenocysteine
  MOD_RES (343)..(343): Selenocysteine
  MOD_RES (358)..(358): Selenocysteine
  MOD_RES (361)..(361): Selenocysteine
  MOD_RES (380)..(380): Selenocysteine
  MOD_RES (386)..(386): Selenocysteine
  MOD_RES (393)..(393): Selenocysteine
  MOD_RES (398)..(398): Selenocysteine
  MOD_RES (400)..(400): Selenocysteine
  MOD_RES (404)..(404): Selenocysteine
  MOD_RES (419)..(419): Selenocysteine
  MOD_RES (422)..(422): Selenocysteine
  MOD_RES (449)..(449): Selenocysteine
  MOD_RES (457)..(457): Selenocysteine
  MOD_RES (481)..(481): Selenocysteine
MEXLESELXCPICLELFEDPLLLPCAHSLCFNCAHRILVSHCAXNESVESIXAFQCPXCRHVIXLSQRGLDGLKRNVXLQNIIDRFQKASVSGPNSPSEXRRERAFDANXMXSAEKVLCQFCDQDPAQDAVKXCVXCEVSYCDECLKAXHPNKKPFXGHRLIEPIPDSHIRGLMCLEHEDEKVNMYCVXDDQLICALCKLVGRHRDHQVAALSERYDKLKQNLESNLXNLIKRNXELEXLLAKLIQXCQHVEVNASRQEAKLXEECDLLIEIIQQRRQIIGXKIKEGKVMRLRKLAQQIANCKQCIERSASLISQAEHSLKENDHARFLQXAKNIXERVSMAXASSQVLIPEINLNDXFDXFALDFSREKKLLECLDYLXAPNPPXIREELCXASYDXIXVHWXSDDEFSVVSYELQYXIFXGQANVVSLCNSADSWMIVPNIKQNHYXVHGLQSGXKYIFMVKAINQAGSRSSEPGKLKXNS

SEQ ID NO: 16364 - protein, 552 aa, Homo sapiens
  MOD_RES (3)..(3): Selenocysteine
  MOD_RES (9)..(9): Selenocysteine
  MOD_RES (44)..(44): Selenocysteine
  MOD_RES (52)..(52): Selenocysteine
  MOD_RES (58)..(58): Selenocysteine
  MOD_RES (64)..(64): Selenocysteine
  MOD_RES (78)..(78): Selenocysteine
  MOD_RES (100)..(100): Selenocysteine
  MOD_RES (110)..(110): Selenocysteine
  MOD_RES (112)..(112): Selenocysteine
  MOD_RES (133)..(133): Selenocysteine
  MOD_RES (136)..(136): Selenocysteine
  MOD_RES (149)..(149): Selenocysteine
  MOD_RES (157)..(157): Selenocysteine
  MOD_RES (189)..(189): Selenocysteine
  MOD_RES (228)..(228): Selenocysteine
  MOD_RES (235)..(235): Selenocysteine
  MOD_RES (239)..(239): Selenocysteine
  MOD_RES (247)..(247): Selenocysteine
  MOD_RES (263)..(263): Selenocysteine
  MOD_RES (282)..(282): Selenocysteine
  MOD_RES (331)..(331): Selenocysteine
  MOD_RES (336)..(336): Selenocysteine
  MOD_RES (343)..(343): Selenocysteine
  MOD_RES (358)..(358): Selenocysteine
  MOD_RES (361)..(361): Selenocysteine
  MOD_RES (380)..(380): Selenocysteine
  MOD_RES (386)..(386): Selenocysteine
  MOD_RES (393)..(393): Selenocysteine
  MOD_RES (398)..(398): Selenocysteine
  MOD_RES (400)..(400): Selenocysteine
  MOD_RES (404)..(404): Selenocysteine
  MOD_RES (419)..(419): Selenocysteine
  MOD_RES (422)..(422): Selenocysteine
  MOD_RES (449)..(449): Selenocysteine
  MOD_RES (457)..(457): Selenocysteine
  MOD_RES (481)..(481): Selenocysteine
  MOD_RES (505)..(505): Selenocysteine
  MOD_RES (518)..(518): Selenocysteine
  MOD_RES (523)..(523): Selenocysteine
  MOD_RES (551)..(551): Selenocysteine
MEXLESELXCPICLELFEDPLLLPCAHSLCFNCAHRILVSHCAXNESVESIXAFQCPXCRHVIXLSQRGLDGLKRNVXLQNIIDRFQKASVSGPNSPSEXRRERAFDANXMXSAEKVLCQFCDQDPAQDAVKXCVXCEVSYCDECLKAXHPNKKPFXGHRLIEPIPDSHIRGLMCLEHEDEKVNMYCVXDDQLICALCKLVGRHRDHQVAALSERYDKLKQNLESNLXNLIKRNXELEXLLAKLIQXCQHVEVNASRQEAKLXEECDLLIEIIQQRRQIIGXKIKEGKVMRLRKLAQQIANCKQCIERSASLISQAEHSLKENDHARFLQXAKNIXERVSMAXASSQVLIPEINLNDXFDXFALDFSREKKLLECLDYLXAPNPPXIREELCXASYDXIXVHWXSDDEFSVVSYELQYXIFXGQANVVSLCNSADSWMIVPNIKQNHYXVHGLQSGXKYIFMVKAINQAGSRSSEPGKLKXNSQPFKLDPKSAHRKLKVSHDNLXVERDESSSKKSHXPERFXSQGSYGVAGNVFIDSGRHYWEVVISGSXW

SEQ ID NO: 16365 - protein, 667 aa, Homo sapiens
  MOD_RES (3)..(3): Selenocysteine
  MOD_RES (9)..(9): Selenocysteine
  MOD_RES (44)..(44): Selenocysteine
  MOD_RES (52)..(52): Selenocysteine
  MOD_RES (58)..(58): Selenocysteine
  MOD_RES (64)..(64): Selenocysteine
  MOD_RES (78)..(78): Selenocysteine
  MOD_RES (100)..(100): Selenocysteine
  MOD_RES (110)..(110): Selenocysteine
  MOD_RES (112)..(112): Selenocysteine
  MOD_RES (133)..(133): Selenocysteine
  MOD_RES (136)..(136): Selenocysteine
  MOD_RES (149)..(149): Selenocysteine
  MOD_RES (157)..(157): Selenocysteine
  MOD_RES (189)..(189): Selenocysteine
  MOD_RES (228)..(228): Selenocysteine
  MOD_RES (235)..(235): Selenocysteine
  MOD_RES (239)..(239): Selenocysteine
  MOD_RES (247)..(247): Selenocysteine
  MOD_RES (263)..(263): Selenocysteine
  MOD_RES (282)..(282): Selenocysteine
  MOD_RES (331)..(331): Selenocysteine
  MOD_RES (336)..(336): Selenocysteine
  MOD_RES (343)..(343): Selenocysteine
  MOD_RES (358)..(358): Selenocysteine
  MOD_RES (361)..(361): Selenocysteine
  MOD_RES (380)..(380): Selenocysteine
  MOD_RES (386)..(386): Selenocysteine
  MOD_RES (393)..(393): Selenocysteine
  MOD_RES (398)..(398): Selenocysteine
  MOD_RES (400)..(400): Selenocysteine
  MOD_RES (404)..(404): Selenocysteine
  MOD_RES (419)..(419): Selenocysteine
  MOD_RES (422)..(422): Selenocysteine
  MOD_RES (449)..(449): Selenocysteine
  MOD_RES (457)..(457): Selenocysteine
  MOD_RES (481)..(481): Selenocysteine
  MOD_RES (505)..(505): Selenocysteine
  MOD_RES (518)..(518): Selenocysteine
  MOD_RES (523)..(523): Selenocysteine
  MOD_RES (551)..(551): Selenocysteine
  MOD_RES (628)..(628): Selenocysteine
  MOD_RES (640)..(640): Selenocysteine
  MOD_RES (642)..(642): Selenocysteine
  MOD_RES (649)..(649): Selenocysteine
  MOD_RES (652)..(652): Selenocysteine
  MOD_RES (663)..(663): Selenocysteine
MEXLESELXCPICLELFEDPLLLPCAHSLCFNCAHRILVSHCAXNESVESIXAFQCPXCRHVIXLSQRGLDGLKRNVXLQNIIDRFQKASVSGPNSPSEXRRERAFDANXMXSAEKVLCQFCDQDPAQDAVKXCVXCEVSYCDECLKAXHPNKKPFXGHRLIEPIPDSHIRGLMCLEHEDEKVNMYCVXDDQLICALCKLVGRHRDHQVAALSERYDKLKQNLESNLXNLIKRNXELEXLLAKLIQXCQHVEVNASRQEAKLXEECDLLIEIIQQRRQIIGXKIKEGKVMRLRKLAQQIANCKQCIERSASLISQAEHSLKENDHARFLQXAKNIXERVSMAXASSQVLIPEINLNDXFDXFALDFSREKKLLECLDYLXAPNPPXIREELCXASYDXIXVHWXSDDEFSVVSYELQYXIFXGQANVVSLCNSADSWMIVPNIKQNHYXVHGLQSGXKYIFMVKAINQAGSRSSEPGKLKXNSQPFKLDPKSAHRKLKVSHDNLXVERDESSSKKSHXPERFXSQGSYGVAGNVFIDSGRHYWEVVISGSXWYAIGLAYKSAPKHEWIGKNSASWALCRCNNNWVVRHNSKEIPIEPAPHLRRVGILLDYDNGSIAFYDALNSIHLYXFDVAFAQPVCPXFXVWNKCLXIIXGLPIPDHLDCXEQLP

SEQ ID NO: 16366 - protein, 219 aa, Homo sapiens
  MOD_RES (3)..(3): Selenocysteine
  MOD_RES (9)..(9): Selenocysteine
  MOD_RES (52)..(52): Selenocysteine
  MOD_RES (58)..(58): Selenocysteine
  MOD_RES (78)..(78): Selenocysteine
  MOD_RES (105)..(105): Selenocysteine
  MOD_RES (109)..(110): Selenocysteine
  MOD_RES (133)..(133): Selenocysteine
  MOD_RES (136)..(136): Selenocysteine
  MOD_RES (149)..(149): Selenocysteine
  MOD_RES (157)..(157): Selenocysteine
  MOD_RES (168)..(168): Selenocysteine
  MOD_RES (174)..(174): Selenocysteine
MEXLESELXCPICLELFEDPLLLPCAHSLCFSCAHRILVSSCSSGESIEPIXAFQCPXCRYVISLNHRGLDGLKRNVXLQNIIDRFQKASVSGPNSPSESRRERXYRPXXAMSSERIACQFCEQDPPRDAVKXCIXCEVSYCDRCLRAXHPNKKPFXSHRLVEPVPDXHLRGIXCLDHENEKVNMYCVSDDQLICALCKLVGRHRDHQVASLNDRFEKL

SEQ ID NO: 16367 - protein, 705 aa, Homo sapiens
  MOD_RES (23)..(23): Selenocysteine
  MOD_RES (29)..(29): Selenocysteine
  MOD_RES (72)..(72): Selenocysteine
  MOD_RES (78)..(78): Selenocysteine
  MOD_RES (98)..(98): Selenocysteine
  MOD_RES (125)..(125): Selenocysteine
  MOD_RES (129)..(130): Selenocysteine
  MOD_RES (153)..(153): Selenocysteine
  MOD_RES (156)..(156): Selenocysteine
  MOD_RES (169)..(169): Selenocysteine
  MOD_RES (177)..(177): Selenocysteine
  MOD_RES (188)..(188): Selenocysteine
  MOD_RES (194)..(194): Selenocysteine
  MOD_RES (242)..(242): Selenocysteine
  MOD_RES (248)..(248): Selenocysteine
  MOD_RES (275)..(275): Selenocysteine
  MOD_RES (307)..(307): Selenocysteine
  MOD_RES (330)..(330): Selenocysteine
  MOD_RES (363)..(363): Selenocysteine
  MOD_RES (400)..(400): Selenocysteine
  MOD_RES (413)..(413): Selenocysteine
  MOD_RES (418)..(418): Selenocysteine
  MOD_RES (420)..(420): Selenocysteine
  MOD_RES (439)..(439): Selenocysteine
  MOD_RES (442)..(442): Selenocysteine
  MOD_RES (469)..(469): Selenocysteine
  MOD_RES (477)..(477): Selenocysteine
  MOD_RES (497)..(497): Selenocysteine
  MOD_RES (501)..(501): Selenocysteine
  MOD_RES (513)..(513): Selenocysteine
  MOD_RES (538)..(538): Selenocysteine
  MOD_RES (545)..(545): Selenocysteine
  MOD_RES (571)..(571): Selenocysteine
  MOD_RES (648)..(648): Selenocysteine
  MOD_RES (652)..(652): Selenocysteine
  MOD_RES (660)..(660): Selenocysteine
  MOD_RES (662)..(662): Selenocysteine
  MOD_RES (703)..(703): Selenocysteine
MGESPASVVLNASGGLFSLKMEXLESELXCPICLELFEDPLLLPCAHSLCFSCAHRILVSSCSSGESIEPIXAFQCPXCRYVISLNHRGLDGLKRNVXLQNIIDRFQKASVSGPNSPSESRRERXYRPXXAMSSERIACQFCEQDPPRDAVKXCIXCEVSYCDRCLRAXHPNKKPFXSHRLVEPVPDXHLRGIXCLDHENEKVNMYCVSDDQLICALCKLVGRHRDHQVASLNDRFEKLKQXLEMNLXNLVKRNSELENQMAKLIQICQQVEVNXAMHEAKLMEECDELVEIIQQRKQMIAVKIKEXKVMKLRKLAQQVANCRQCLERSXVLINQAEHILKENDQARFLQSAKNIAERVAMAXASSQVLIPDINFNDAFENFALDFSREKKLLEGLDYLXAPNPPSIREELCXASHDXIXVHWISDDEFSISSYELQYXIFXGQANFISLYNSVDSWMIVPNIKQNHYXVHGLQSGXRYIFIVKAINQAGSRNSEPXRLKXNSQPFKLDPKMXHKKLKISNDGLQMEKDESSLKKSHXPERFSGXGCYGAAGNIFIDSGCHYWEVVMGSSXWYAIGIAYKSAPKNEWIGKNASSWVFSRCNSNFVVRHNNKEMLVDVPPHLKRLGVLLDYDNNMLSFYDPANSLHLHXFDVXFILPVCPXFXIWNKSLMILSGLPAPDFIDYPERQECNCRPQESPYVSGMKXCH

SEQ ID NO: 16368 - protein, 735 aa, Homo sapiens
  MOD_RES (23)..(23): Selenocysteine
  MOD_RES (29)..(29): Selenocysteine
  MOD_RES (72)..(72): Selenocysteine
  MOD_RES (78)..(78): Selenocysteine
  MOD_RES (98)..(98): Selenocysteine
  MOD_RES (125)..(125): Selenocysteine
  MOD_RES (129)..(130): Selenocysteine
  MOD_RES (153)..(153): Selenocysteine
  MOD_RES (156)..(156): Selenocysteine
  MOD_RES (169)..(169): Selenocysteine
  MOD_RES (177)..(177): Selenocysteine
  MOD_RES (188)..(188): Selenocysteine
  MOD_RES (194)..(194): Selenocysteine
  MOD_RES (242)..(242): Selenocysteine
  MOD_RES (248)..(248): Selenocysteine
  MOD_RES (275)..(275): Selenocysteine
  MOD_RES (307)..(307): Selenocysteine
  MOD_RES (330)..(330): Selenocysteine
  MOD_RES (363)..(363): Selenocysteine
  MOD_RES (400)..(400): Selenocysteine
  MOD_RES (413)..(413): Selenocysteine
  MOD_RES (418)..(418): Selenocysteine
  MOD_RES (420)..(420): Selenocysteine
  MOD_RES (439)..(439): Selenocysteine
  MOD_RES (442)..(442): Selenocysteine
  MOD_RES (499)..(499): Selenocysteine
  MOD_RES (507)..(507): Selenocysteine
  MOD_RES (527)..(527): Selenocysteine
  MOD_RES (531)..(531): Selenocysteine
  MOD_RES (543)..(543): Selenocysteine
  MOD_RES (568)..(568): Selenocysteine
  MOD_RES (575)..(575): Selenocysteine
  MOD_RES (601)..(601): Selenocysteine
  MOD_RES (678)..(678): Selenocysteine
  MOD_RES (682)..(682): Selenocysteine
  MOD_RES (690)..(690): Selenocysteine
  MOD_RES (692)..(692): Selenocysteine
  MOD_RES (733)..(733): Selenocysteine
MGESPASVVLNASGGLFSLKMEXLESELXCPICLELFEDPLLLPCAHSLCFSCAHRILVSSCSSGESIEPIXAFQCPXCRYVISLNHRGLDGLKRNVXLQNIIDRFQKASVSGPNSPSESRRERXYRPXXAMSSERIACQFCEQDPPRDAVKXCIXCEVSYCDRCLRAXHPNKKPFXSHRLVEPVPDXHLRGIXCLDHENEKVNMYCVSDDQLICALCKLVGRHRDHQVASLNDRFEKLKQXLEMNLXNLVKRNSELENQMAKLIQICQQVEVNXAMHEAKLMEECDELVEIIQQRKQMIAVKIKEXKVMKLRKLAQQVANCRQCLERSXVLINQAEHILKENDQARFLQSAKNIAERVAMAXASSQVLIPDINFNDAFENFALDFSREKKLLEGLDYLXAPNPPSIREELCXASHDXIXVHWISDDEFSISSYELQYXIFXGQANFISKSWCSWGLWPEIRKCKEAVSCSRLAGAPRGLYNSVDSWMIVPNIKQNHYXVHGLQSGXRYIFIVKAINQAGSRNSEPXRLKXNSQPFKLDPKMXHKKLKISNDGLQMEKDESSLKKSHXPERFSGXGCYGAAGNIFIDSGCHYWEVVMGSSXWYAIGIAYKSAPKNEWIGKNASSWVFSRCNSNFVVRHNNKEMLVDVPPHLKRLGVLLDYDNNMLSFYDPANSLHLHXFDVXFILPVCPXFXIWNKSLMILSGLPAPDFIDYPERQECNCRPQESPYVSGMKXCH

SEQ ID NO: 16369 - protein, 433 aa, Homo sapiens
  MOD_RES (16)..(16): Selenocysteine
  MOD_RES (38)..(38): Selenocysteine
  MOD_RES (49)..(49): Selenocysteine
  MOD_RES (78)..(78): Selenocysteine
  MOD_RES (128)..(128): Selenocysteine
  MOD_RES (158)..(158): Selenocysteine
  MOD_RES (235)..(235): Selenocysteine
  MOD_RES (267)..(267): Selenocysteine
  MOD_RES (289)..(289): Selenocysteine
  MOD_RES (317)..(317): Selenocysteine
  MOD_RES (343)..(343): Selenocysteine
  MOD_RES (357)..(357): Selenocysteine
  MOD_RES (381)..(381): Selenocysteine
  MOD_RES (396)..(396): Selenocysteine
  MOD_RES (399)..(399): Selenocysteine
MAEPSVESSSPGGSAXSDDHEFDPSADMLVHDFDDERXLEEEEMMEGEXNFSSEIEDLAREGDMPIHELLSLYGYGSXVRLPEEDEEEEEEEEEGEDDEDADNDDNSGCSGENKEENIKDSSGQEDEXQSSNDDPSQSVASQDAQEIIRPRRCKYFDXNSEVEEESEEDEDYIPSEDWKKEIMVGSMFQAEIPVGICRYKENEKVYENDDQLLWDPEYLPEDKVIIFLKDASRRXGDEKGVEAIPEGSHIKDNEQALYELVKCNFDXEEALRRLRFNVKAAREELSVWXEEECRNFEQGLKAYGKDFHLIQANKVRXRSVGECVAFYYMWKKSERYDFFAQQXRFGKKKYNLHPGVXDYMDRLLDESESAASSRAPSPPPXASNSSNSQSEKEDGXVSXANQNGVSSNGPGILQMLLPVHFSAISSRANAFLK

SEQ ID NO: 16370 - protein, 512 aa, Homo sapiens
  MOD_RES (16)..(16): Selenocysteine
  MOD_RES (38)..(38): Selenocysteine
  MOD_RES (49)..(49): Selenocysteine
  MOD_RES (78)..(78): Selenocysteine
  MOD_RES (128)..(128): Selenocysteine
  MOD_RES (158)..(158): Selenocysteine
  MOD_RES (235)..(235): Selenocysteine
  MOD_RES (267)..(267): Selenocysteine
  MOD_RES (289)..(289): Selenocysteine
  MOD_RES (317)..(317): Selenocysteine
  MOD_RES (343)..(343): Selenocysteine
  MOD_RES (357)..(357): Selenocysteine
  MOD_RES (381)..(381): Selenocysteine
  MOD_RES (396)..(396): Selenocysteine
  MOD_RES (399)..(399): Selenocysteine
  MOD_RES (430)..(430): Selenocysteine
  MOD_RES (443)..(443): Selenocysteine
  MOD_RES (448)..(448): Selenocysteine
  MOD_RES (452)..(453): Selenocysteine
  MOD_RES (461)..(461): Selenocysteine
  MOD_RES (510)..(510): Selenocysteine
MAEPSVESSSPGGSAXSDDHEFDPSADMLVHDFDDERXLEEEEMMEGEXNFSSEIEDLAREGDMPIHELLSLYGYGSXVRLPEEDEEEEEEEEEGEDDEDADNDDNSGCSGENKEENIKDSSGQEDEXQSSNDDPSQSVASQDAQEIIRPRRCKYFDXNSEVEEESEEDEDYIPSEDWKKEIMVGSMFQAEIPVGICRYKENEKVYENDDQLLWDPEYLPEDKVIIFLKDASRRXGDEKGVEAIPEGSHIKDNEQALYELVKCNFDXEEALRRLRFNVKAAREELSVWXEEECRNFEQGLKAYGKDFHLIQANKVRXRSVGECVAFYYMWKKSERYDFFAQQXRFGKKKYNLHPGVXDYMDRLLDESESAASSRAPSPPPXASNSSNSQSEKEDGXVSXANQNGVSSNGPGEILNKEEVKVEGLHINGPXGGNKKPLHADMDXNGYEXDNLXXDPKLAHMXARNENDFDEKSERPAKRRRVNSNGKESPGSSEFFQEAVSHGKFEELENXDD

SEQ ID NO: 16371 - protein, 486 aa, Homo sapiens
  MOD_RES (38)..(38): Selenocysteine
  MOD_RES (42)..(42): Selenocysteine
  MOD_RES (52)..(52): Selenocysteine
  MOD_RES (69)..(69): Selenocysteine
  MOD_RES (91)..(91): Selenocysteine
  MOD_RES (102)..(102): Selenocysteine
  MOD_RES (131)..(131): Selenocysteine
  MOD_RES (181)..(181): Selenocysteine
  MOD_RES (211)..(211): Selenocysteine
  MOD_RES (288)..(288): Selenocysteine
  MOD_RES (320)..(320): Selenocysteine
  MOD_RES (342)..(342): Selenocysteine
  MOD_RES (370)..(370): Selenocysteine
  MOD_RES (396)..(396): Selenocysteine
  MOD_RES (410)..(410): Selenocysteine
  MOD_RES (434)..(434): Selenocysteine
  MOD_RES (449)..(449): Selenocysteine
  MOD_RES (452)..(452): Selenocysteine
MDGASSGGGGSSEGGGGSSGSGYGVVARFSQCLAEFRXWLRXNWLRFNADKXDVMLPSVESSSPGGSAXSDDHEFDPSADMLVHDFDDERXLEEEEMMEGEXNFSSEIEDLAREGDMPIHELLSLYGYGSXVRLPEEDEEEEEEEEEGEDDEDADNDDNSGCSGENKEENIKDSSGQEDEXQSSNDDPSQSVASQDAQEIIRPRRCKYFDXNSEVEEESEEDEDYIPSEDWKKEIMVGSMFQAEIPVGICRYKENEKVYENDDQLLWDPEYLPEDKVIIFLKDASRRXGDEKGVEAIPEGSHIKDNEQALYELVKCNFDXEEALRRLRFNVKAAREELSVWXEEECRNFEQGLKAYGKDFHLIQANKVRXRSVGECVAFYYMWKKSERYDFFAQQXRFGKKKYNLHPGVXDYMDRLLDESESAASSRAPSPPPXASNSSNSQSEKEDGXVSXANQNGVSSNGPGILQMLLPVHFSAISSRANAFLK

SEQ ID NO: 16372 - protein, 565 aa, Homo sapiens
  MOD_RES (38)..(38): Selenocysteine
  MOD_RES (42)..(42): Selenocysteine
  MOD_RES (52)..(52): Selenocysteine
  MOD_RES (69)..(69): Selenocysteine
  MOD_RES (91)..(91): Selenocysteine
  MOD_RES (102)..(102): Selenocysteine
  MOD_RES (131)..(131): Selenocysteine
  MOD_RES (181)..(181): Selenocysteine
  MOD_RES (211)..(211): Selenocysteine
  MOD_RES (288)..(288): Selenocysteine
  MOD_RES (320)..(320): Selenocysteine
  MOD_RES (342)..(342): Selenocysteine
  MOD_RES (370)..(370): Selenocysteine
  MOD_RES (396)..(396): Selenocysteine
  MOD_RES (410)..(410): Selenocysteine
  MOD_RES (434)..(434): Selenocysteine
  MOD_RES (449)..(449): Selenocysteine
  MOD_RES (452)..(452): Selenocysteine
  MOD_RES (483)..(483): Selenocysteine
  MOD_RES (496)..(496): Selenocysteine
  MOD_RES (501)..(501): Selenocysteine
  MOD_RES (505)..(506): Selenocysteine
  MOD_RES (514)..(514): Selenocysteine
  MOD_RES (563)..(563): Selenocysteine
MDGASSGGGGSSEGGGGSSGSGYGVVARFSQCLAEFRXWLRXNWLRFNADKXDVMLPSVESSSPGGSAXSDDHEFDPSADMLVHDFDDERXLEEEEMMEGEXNFSSEIEDLAREGDMPIHELLSLYGYGSXVRLPEEDEEEEEEEEEGEDDEDADNDDNSGCSGENKEENIKDSSGQEDEXQSSNDDPSQSVASQDAQEIIRPRRCKYFDXNSEVEEESEEDEDYIPSEDWKKEIMVGSMFQAEIPVGICRYKENEKVYENDDQLLWDPEYLPEDKVIIFLKDASRRXGDEKGVEAIPEGSHIKDNEQALYELVKCNFDXEEALRRLRFNVKAAREELSVWXEEECRNFEQGLKAYGKDFHLIQANKVRXRSVGECVAFYYMWKKSERYDFFAQQXRFGKKKYNLHPGVXDYMDRLLDESESAASSRAPSPPPXASNSSNSQSEKEDGXVSXANQNGVSSNGPGEILNKEEVKVEGLHINGPXGGNKKPLHADMDXNGYEXDNLXXDPKLAHMXARNENDFDEKSERPAKRRRVNSNGKESPGSSEFFQEAVSHGKFEELENXDD

SEQ ID NO: 16373 - protein, 450 aa, Homo sapiens
  MOD_RES (8)..(8): Selenocysteine
  MOD_RES (13)..(13): Selenocysteine
  MOD_RES (33)..(33): Selenocysteine
  MOD_RES (55)..(55): Selenocysteine
  MOD_RES (66)..(66): Selenocysteine
  MOD_RES (95)..(95): Selenocysteine
  MOD_RES (145)..(145): Selenocysteine
  MOD_RES (175)..(175): Selenocysteine
  MOD_RES (252)..(252): Selenocysteine
  MOD_RES (284)..(284): Selenocysteine
  MOD_RES (306)..(306): Selenocysteine
  MOD_RES (334)..(334): Selenocysteine
  MOD_RES (360)..(360): Selenocysteine
  MOD_RES (374)..(374): Selenocysteine
  MOD_RES (398)..(398): Selenocysteine
  MOD_RES (413)..(413): Selenocysteine
  MOD_RES (416)..(416): Selenocysteine
MFMFNWFXDCLWXLFLSNYQPSVESSSPGGSAXSDDHEFDPSADMLVHDFDDERXLEEEEMMEGEXNFSSEIEDLAREGDMPIHELLSLYGYGSXVRLPEEDEEEEEEEEEGEDDEDADNDDNSGCSGENKEENIKDSSGQEDEXQSSNDDPSQSVASQDAQEIIRPRRCKYFDXNSEVEEESEEDEDYIPSEDWKKEIMVGSMFQAEIPVGICRYKENEKVYENDDQLLWDPEYLPEDKVIIFLKDASRRXGDEKGVEAIPEGSHIKDNEQALYELVKCNFDXEEALRRLRFNVKAAREELSVWXEEECRNFEQGLKAYGKDFHLIQANKVRXRSVGECVAFYYMWKKSERYDFFAQQXRFGKKKYNLHPGVXDYMDRLLDESESAASSRAPSPPPXASNSSNSQSEKEDGXVSXANQNGVSSNGPGILQMLLPVHFSAISSRANAFLK

SEQ ID NO: 16374 - protein, 470 aa, Homo sapiens
  MOD_RES (8)..(8): Selenocysteine
  MOD_RES (13)..(13): Selenocysteine
  MOD_RES (33)..(33): Selenocysteine
  MOD_RES (55)..(55): Selenocysteine
  MOD_RES (66)..(66): Selenocysteine
  MOD_RES (95)..(95): Selenocysteine
  MOD_RES (145)..(145): Selenocysteine
  MOD_RES (175)..(175): Selenocysteine
  MOD_RES (252)..(252): Selenocysteine
  MOD_RES (284)..(284): Selenocysteine
  MOD_RES (306)..(306): Selenocysteine
  MOD_RES (334)..(334): Selenocysteine
  MOD_RES (360)..(360): Selenocysteine
  MOD_RES (374)..(374): Selenocysteine
  MOD_RES (398)..(398): Selenocysteine
  MOD_RES (413)..(413): Selenocysteine
  MOD_RES (416)..(416): Selenocysteine
  MOD_RES (447)..(447): Selenocysteine
MFMFNWFXDCLWXLFLSNYQPSVESSSPGGSAXSDDHEFDPSADMLVHDFDDERXLEEEEMMEGEXNFSSEIEDLAREGDMPIHELLSLYGYGSXVRLPEEDEEEEEEEEEGEDDEDADNDDNSGCSGENKEENIKDSSGQEDEXQSSNDDPSQSVASQDAQEIIRPRRCKYFDXNSEVEEESEEDEDYIPSEDWKKEIMVGSMFQAEIPVGICRYKENEKVYENDDQLLWDPEYLPEDKVIIFLKDASRRXGDEKGVEAIPEGSHIKDNEQALYELVKCNFDXEEALRRLRFNVKAAREELSVWXEEECRNFEQGLKAYGKDFHLIQANKVRXRSVGECVAFYYMWKKSERYDFFAQQXRFGKKKYNLHPGVXDYMDRLLDESESAASSRAPSPPPXASNSSNSQSEKEDGXVSXANQNGVSSNGPGEILNKEEVKVEGLHINGPXGILQMLLPVHFSAISSRANAFLK

SEQ ID NO: 16375 - protein, 529 aa, Homo sapiens
  MOD_RES (8)..(8): Selenocysteine
  MOD_RES (13)..(13): Selenocysteine
  MOD_RES (33)..(33): Selenocysteine
  MOD_RES (55)..(55): Selenocysteine
  MOD_RES (66)..(66): Selenocysteine
  MOD_RES (95)..(95): Selenocysteine
  MOD_RES (145)..(145): Selenocysteine
  MOD_RES (175)..(175): Selenocysteine
  MOD_RES (252)..(252): Selenocysteine
  MOD_RES (284)..(284): Selenocysteine
  MOD_RES (306)..(306): Selenocysteine
  MOD_RES (334)..(334): Selenocysteine
  MOD_RES (360)..(360): Selenocysteine
  MOD_RES (374)..(374): Selenocysteine
  MOD_RES (398)..(398): Selenocysteine
  MOD_RES (413)..(413): Selenocysteine
  MOD_RES (416)..(416): Selenocysteine
  MOD_RES (447)..(447): Selenocysteine
  MOD_RES (460)..(460): Selenocysteine
  MOD_RES (465)..(465): Selenocysteine
  MOD_RES (469)..(470): Selenocysteine
  MOD_RES (478)..(478): Selenocysteine
  MOD_RES (527)..(527): Selenocysteine
MFMFNWFXDCLWXLFLSNYQPSVESSSPGGSAXSDDHEFDPSADMLVHDFDDERXLEEEEMMEGEXNFSSEIEDLAREGDMPIHELLSLYGYGSXVRLPEEDEEEEEEEEEGEDDEDADNDDNSGCSGENKEENIKDSSGQEDEXQSSNDDPSQSVASQDAQEIIRPRRCKYFDXNSEVEEESEEDEDYIPSEDWKKEIMVGSMFQAEIPVGICRYKENEKVYENDDQLLWDPEYLPEDKVIIFLKDASRRXGDEKGVEAIPEGSHIKDNEQALYELVKCNFDXEEALRRLRFNVKAAREELSVWXEEECRNFEQGLKAYGKDFHLIQANKVRXRSVGECVAFYYMWKKSERYDFFAQQXRFGKKKYNLHPGVXDYMDRLLDESESAASSRAPSPPPXASNSSNSQSEKEDGXVSXANQNGVSSNGPGEILNKEEVKVEGLHINGPXGGNKKPLHADMDXNGYEXDNLXXDPKLAHMXARNENDFDEKSERPAKRRRVNSNGKESPGSSEFFQEAVSHGKFEELENXDD

SEQ ID NO: 16376 - protein, 81 aa, Homo sapiens
  MOD_RES (8)..(8): Selenocysteine
  MOD_RES (13)..(13): Selenocysteine
  MOD_RES (33)..(33): Selenocysteine
  MOD_RES (55)..(55): Selenocysteine
  MOD_RES (66)..(66): Selenocysteine
MFMFNWFXDCLWXLFLSNYQPSVESSSPGGSAXSDDHEFDPSADMLVHDFDDERXLEEEEMMEGEXNFSSEIEDLARVNNM

SEQ ID NO: 16377 - protein, 370 aa, Homo sapiens
  MOD_RES (15)..(15): Selenocysteine
  MOD_RES (65)..(65): Selenocysteine
  MOD_RES (95)..(95): Selenocysteine
  MOD_RES (172)..(172): Selenocysteine
  MOD_RES (204)..(204): Selenocysteine
  MOD_RES (226)..(226): Selenocysteine
  MOD_RES (254)..(254): Selenocysteine
  MOD_RES (280)..(280): Selenocysteine
  MOD_RES (294)..(294): Selenocysteine
  MOD_RES (318)..(318): Selenocysteine
  MOD_RES (333)..(333): Selenocysteine
  MOD_RES (336)..(336): Selenocysteine
MPIHELLSLYGYGSXVRLPEEDEEEEEEEEEGEDDEDADNDDNSGCSGENKEENIKDSSGQEDEXQSSNDDPSQSVASQDAQEIIRPRRCKYFDXNSEVEEESEEDEDYIPSEDWKKEIMVGSMFQAEIPVGICRYKENEKVYENDDQLLWDPEYLPEDKVIIFLKDASRRXGDEKGVEAIPEGSHIKDNEQALYELVKCNFDXEEALRRLRFNVKAAREELSVWXEEECRNFEQGLKAYGKDFHLIQANKVRXRSVGECVAFYYMWKKSERYDFFAQQXRFGKKKYNLHPGVXDYMDRLLDESESAASSRAPSPPPXASNSSNSQSEKEDGXVSXANQNGVSSNGPGILQMLLPVHFSAISSRANAFLK

SEQ ID NO: 16378 - protein, 555 aa, Homo sapiens
  MOD_RES (30)..(30): Selenocysteine
  MOD_RES (43)..(43): Selenocysteine
  MOD_RES (68)..(68): Selenocysteine
  MOD_RES (83)..(83): Selenocysteine
  MOD_RES (107)..(107): Selenocysteine
  MOD_RES (125)..(125): Selenocysteine
  MOD_RES (133)..(133): Selenocysteine
  MOD_RES (137)..(137): Selenocysteine
  MOD_RES (141)..(141): Selenocysteine
  MOD_RES (153)..(153): Selenocysteine
  MOD_RES (168)..(168): Selenocysteine
  MOD_RES (230)..(230): Selenocysteine
  MOD_RES (234)..(234): Selenocysteine
  MOD_RES (247)..(247): Selenocysteine
  MOD_RES (249)..(249): Selenocysteine
  MOD_RES (285)..(285): Selenocysteine
  MOD_RES (288)..(288): Selenocysteine
  MOD_RES (316)..(316): Selenocysteine
  MOD_RES (318)..(318): Selenocysteine
  MOD_RES (342)..(342): Selenocysteine
  MOD_RES (356)..(356): Selenocysteine
  MOD_RES (366)..(366): Selenocysteine
  MOD_RES (372)..(372): Selenocysteine
  MOD_RES (379)..(379): Selenocysteine
  MOD_RES (398)..(398): Selenocysteine
  MOD_RES (403)..(403): Selenocysteine
  MOD_RES (406)..(406): Selenocysteine
  MOD_RES (411)..(411): Selenocysteine
  MOD_RES (416)..(416): Selenocysteine
  MOD_RES (431)..(431): Selenocysteine
  MOD_RES (443)..(443): Selenocysteine
  MOD_RES (448)..(448): Selenocysteine
  MOD_RES (463)..(463): Selenocysteine
  MOD_RES (514)..(514): Selenocysteine
  MOD_RES (518)..(518): Selenocysteine
  MOD_RES (537)..(537): Selenocysteine
MAEASFGSSSPVCFIPVGSLSSEDHDFDPXAEMLVHDYDDERXLEEEEMMDEGKNFSSEIEDLEKEGXMPLEDLLAFYGYEPXIPAVANSSANSSPSELADELPDMXLDKEEIAKDLLSGDDEEXQSSADDLXPSVXSHEXSDFFPRPLRSNXACDGDKESEVEDVEXDSGNSPEDLRKEIMIGLQYQAEIPPYLGEYDGNEKVYENEDQLLWCPDVVLESKVKEYLVEXSLRXGSEKIMDRISAGXHXRDNEQALYELLKCNHNIKEAIERYCCNGKASQEGMXAWXEEECRSFEHALMLFGKDFHLIQKNKVRXRXVAECVAFYYMWKKSERYDYFAQQXRFGKKRYNHHPGVXDYMDRLVDEXEALGGXVNASALXSNRPEPIPDQQLNILNSFXASDLXALXNSVAXVCDPXDVNCLDDSFPPLGNXPRGQVNHVPVVXEELLXLPSNGESDCFNLFEXGFYHSELNPMNMCSEESERPAKRLKMGIAVPESFMNEVSVNNLGVDFENHXHHIXSAKMAVSVADFGSLSANEXNGFISAHALHQHAALHSE

SEQ ID NO: 16379 - protein, 549 aa, Homo sapiens
  MOD_RES (25)..(25): Selenocysteine
  MOD_RES (38)..(38): Selenocysteine
  MOD_RES (63)..(63): Selenocysteine
  MOD_RES (78)..(78): Selenocysteine
  MOD_RES (102)..(102): Selenocysteine
  MOD_RES (120)..(120): Selenocysteine
  MOD_RES (128)..(128): Selenocysteine
  MOD_RES (132)..(132): Selenocysteine
  MOD_RES (136)..(136): Selenocysteine
  MOD_RES (148)..(148): Selenocysteine
  MOD_RES (163)..(163): Selenocysteine
  MOD_RES (225)..(225): Selenocysteine
  MOD_RES (229)..(229): Selenocysteine
  MOD_RES (242)..(242): Selenocysteine
  MOD_RES (244)..(244): Selenocysteine
  MOD_RES (279)..(279): Selenocysteine
  MOD_RES (282)..(282): Selenocysteine
  MOD_RES (310)..(310): Selenocysteine
  MOD_RES (312)..(312): Selenocysteine
  MOD_RES (336)..(336): Selenocysteine
  MOD_RES (350)..(350): Selenocysteine
  MOD_RES (360)..(360): Selenocysteine
  MOD_RES (366)..(366): Selenocysteine
  MOD_RES (373)..(373): Selenocysteine
  MOD_RES (392)..(392): Selenocysteine
  MOD_RES (397)..(397): Selenocysteine
  MOD_RES (400)..(400): Selenocysteine
  MOD_RES (405)..(405): Selenocysteine
  MOD_RES (410)..(410): Selenocysteine
  MOD_RES (425)..(425): Selenocysteine
  MOD_RES (437)..(437): Selenocysteine
  MOD_RES (442)..(442): Selenocysteine
  MOD_RES (457)..(457): Selenocysteine
  MOD_RES (508)..(508): Selenocysteine
  MOD_RES (512)..(512): Selenocysteine
  MOD_RES (531)..(531): Selenocysteine
MAEASFGSSSPVGSLSSEDHDFDPXAEMLVHDYDDERXLEEEEMMDEGKNFSSEIEDLEKEGXMPLEDLLAFYGYEPXIPAVANSSANSSPSELADELPDMXLDKEEIAKDLLSGDDEEXQSSADDLXPSVXSHEXSDFFPRPLRSNXACDGDKESEVEDVEXDSGNSPEDLRKEIMIGLQYQAEIPPYLGEYDGNEKVYENEDQLLWCPDVVLESKVKEYLVEXSLRXGSEKIMDRISAGXHXRDNEQALYELLKCNHNIKEAIERYCCNGKASQGMXAWXEEECRSFEHALMLFGKDFHLIQKNKVRXRXVAECVAFYYMWKKSERYDYFAQQXRFGKKRYNHHPGVXDYMDRLVDEXEALGGXVNASALXSNRPEPIPDQQLNILNSFXASDLXALXNSVAXVCDPXDVNCLDDSFPPLGNXPRGQVNHVPVVXEELLXLPSNGESDCFNLFEXGFYHSELNPMNMCSEESERPAKRLKMGIAVPESFMNEVSVNNLGVDFENHXHHIXSAKMAVSVADFGSLSANEXNGFISAHALHQHAALHSE

SEQ ID NO: 16380 - protein, 550 aa, Homo sapiens
  MOD_RES (25)..(25): Selenocysteine
  MOD_RES (38)..(38): Selenocysteine
  MOD_RES (63)..(63): Selenocysteine
  MOD_RES (78)..(78): Selenocysteine
  MOD_RES (102)..(102): Selenocysteine
  MOD_RES (120)..(120): Selenocysteine
  MOD_RES (128)..(128): Selenocysteine
  MOD_RES (132)..(132): Selenocysteine
  MOD_RES (136)..(136): Selenocysteine
  MOD_RES (148)..(148): Selenocysteine
  MOD_RES (163)..(163): Selenocysteine
  MOD_RES (225)..(225): Selenocysteine
  MOD_RES (229)..(229): Selenocysteine
  MOD_RES (242)..(242): Selenocysteine
  MOD_RES (244)..(244): Selenocysteine
  MOD_RES (280)..(280): Selenocysteine
  MOD_RES (283)..(283): Selenocysteine
  MOD_RES (311)..(311): Selenocysteine
  MOD_RES (313)..(313): Selenocysteine
  MOD_RES (337)..(337): Selenocysteine
  MOD_RES (351)..(351): Selenocysteine
  MOD_RES (361)..(361): Selenocysteine
  MOD_RES (367)..(367): Selenocysteine
  MOD_RES (374)..(374): Selenocysteine
  MOD_RES (393)..(393): Selenocysteine
  MOD_RES (398)..(398): Selenocysteine
  MOD_RES (401)..(401): Selenocysteine
  MOD_RES (406)..(406): Selenocysteine
  MOD_RES (411)..(411): Selenocysteine
  MOD_RES (426)..(426): Selenocysteine
  MOD_RES (438)..(438): Selenocysteine
  MOD_RES (443)..(443): Selenocysteine
  MOD_RES (458)..(458): Selenocysteine
  MOD_RES (509)..(509): Selenocysteine
  MOD_RES (513)..(513): Selenocysteine
  MOD_RES (532)..(532): Selenocysteine
MAEASFGSSSPVGSLSSEDHDFDPXAEMLVHDYDDERXLEEEEMMDEGKNFSSEIEDLEKEGXMPLEDLLAFYGYEPXIPAVANSSANSSPSELADELPDMXLDKEEIAKDLLSGDDEEXQSSADDLXPSVXSHEXSDFFPRPLRSNXACDGDKESEVEDVEXDSGNSPEDLRKEIMIGLQYQAEIPPYLGEYDGNEKVYENEDQLLWCPDVVLESKVKEYLVEXSLRXGSEKIMDRISAGXHXRDNEQALYELLKCNHNIKEAIERYCCNGKASQEGMXAWXEEECRSFEHALMLFGKDFHLIQKNKVRXRXVAECVAFYYMWKKSERYDYFAQQXRFGKKRYNHHPGVXDYMDRLVDEXEALGGXVNASALXSNRPEPIPDQQLNILNSFXASDLXALXNSVAXVCDPXDVNCLDDSFPPLGNXPRGQVNHVPVVXEELLXLPSNGESDCFNLFEXGFYHSELNPMNMCSEESERPAKRLKMGIAVPESFMNEVSVNNLGVDFENHXHHIXSAKMAVSVADFGSLSANEXNGFISAHALHQHAALHSE

SEQ ID NO: 16381 - protein, 119 aa, Homo sapiens
  MOD_RES (25)..(25): Selenocysteine
  MOD_RES (38)..(38): Selenocysteine
  MOD_RES (63)..(63): Selenocysteine
  MOD_RES (78)..(78): Selenocysteine
  MOD_RES (102)..(102): Selenocysteine
  MOD_RES (117)..(117): Selenocysteine
MAEASFGSSSPVGSLSSEDHDFDPXAEMLVHDYDDERXLEEEEMMDEGKNFSSEIEDLEKEGXMPLEDLLAFYGYEPXIPAVANSSANSSPSELADELPDMXLDKISGRERNPHLGXSS

SEQ ID NO: 16382 - protein, 24 aa, Homo sapiens
  MOD_RES (5)..(5): Selenocysteine
  MOD_RES (24)..(24): Selenocysteine
MEWRXEALASLGSLSSEDHDFDPX

SEQ ID NO: 16383 - protein, 145 aa, Homo sapiens
  MOD_RES (11)..(11): Selenocysteine
  MOD_RES (36)..(36): Selenocysteine
  MOD_RES (51)..(51): Selenocysteine
  MOD_RES (75)..(75): Selenocysteine
  MOD_RES (93)..(93): Selenocysteine
  MOD_RES (101)..(101): Selenocysteine
  MOD_RES (105)..(105): Selenocysteine
  MOD_RES (109)..(109): Selenocysteine
  MOD_RES (121)..(121): Selenocysteine
  MOD_RES (136)..(136): Selenocysteine
MLVHDYDDERXLEEEEMMDEGKNFSSEIEDLEKEGXMPLEDLLAFYGYEPXIPAVANSSANSSPSELADELPDMXLDKEEIAKDLLSGDDEEXQSSADDLXPSVXSHEXSDFFPRPLRSNXACDGDKESEVEDVEXDSGNSPEDL

SEQ ID NO: 16384 - protein, 487 aa, Homo sapiens
  MOD_RES (15)..(15): Selenocysteine
  MOD_RES (39)..(39): Selenocysteine
  MOD_RES (57)..(57): Selenocysteine
  MOD_RES (65)..(65): Selenocysteine
  MOD_RES (69)..(69): Selenocysteine
  MOD_RES (73)..(73): Selenocysteine
  MOD_RES (85)..(85): Selenocysteine
  MOD_RES (100)..(100): Selenocysteine
  MOD_RES (162)..(162): Selenocysteine
  MOD_RES (166)..(166): Selenocysteine
  MOD_RES (179)..(179): Selenocysteine
  MOD_RES (181)..(181): Selenocysteine
  MOD_RES (217)..(217): Selenocysteine
  MOD_RES (220)..(220): Selenocysteine
  MOD_RES (248)..(248): Selenocysteine
  MOD_RES (250)..(250): Selenocysteine
  MOD_RES (274)..(274): Selenocysteine
  MOD_RES (288)..(288): Selenocysteine
  MOD_RES (298)..(298): Selenocysteine
  MOD_RES (304)..(304): Selenocysteine
  MOD_RES (311)..(311): Selenocysteine
  MOD_RES (330)..(330): Selenocysteine
  MOD_RES (335)..(335): Selenocysteine
  MOD_RES (338)..(338): Selenocysteine
  MOD_RES (343)..(343): Selenocysteine
  MOD_RES (348)..(348): Selenocysteine
  MOD_RES (363)..(363): Selenocysteine
  MOD_RES (375)..(375): Selenocysteine
  MOD_RES (380)..(380): Selenocysteine
  MOD_RES (395)..(395): Selenocysteine
  MOD_RES (446)..(446): Selenocysteine
  MOD_RES (450)..(450): Selenocysteine
  MOD_RES (469)..(469): Selenocysteine
MPLEDLLAFYGYEPXIPAVANSSANSSPSELADELPDMXLDKEEIAKDLLSGDDEEXQSSADDLXPSVXSHEXSDFFPRPLRSNXACDGDKESEVEDVEXDSGNSPEDLRKEIMIGLQYQAEIPPYLGEYDGNEKVYENEDQLLWCPDVVLESKVKEYLVEXSLRXGSEKIMDRISAGXHXRDNEQALYELLKCNHNIKEAIERYCCNGKASQEGMXAWXEEECRSFEHALMLFGKDFHLIQKNKVRXRXVAECVAFYYMWKKSERYDYFAQQXRFGKKRYNHHPGVXDYMDRLVDEXEALGGXVNASALXSNRPEPIPDQQLNILNSFXASDLXALXNSVAXVCDPXDVNCLDDSFPPLGNXPRGQVNHVPVVXEELLXLPSNGESDCFNLFEXGFYHSELNPMNMCSEESERPAKRLKMGIAVPESFMNEVSVNNLGVDFENHXHHIXSAKMAVSVADFGSLSANEXNGFISAHALHQHAALHSE

SEQ ID NO: 16385 - protein, 44 aa, Homo sapiens
  MOD_RES (1)..(1): Any amino acid
  MOD_RES (3)..(3): Selenocysteine
  MOD_RES (27)..(27): Selenocysteine
  MOD_RES (42)..(42): Selenocysteine
XPXIPAVANSSANSSPSELADELPDMXLDKISGRERNPHLGXSS

SEQ ID NO: 16386 - protein, 115 aa, Homo sapiens
  MOD_RES (8)..(8): Selenocysteine
  MOD_RES (24)..(24): Selenocysteine
  MOD_RES (31)..(31): Selenocysteine
  MOD_RES (113)..(113): Selenocysteine
MPMFIVNXNVPRASVPDGFLSELXQQLAQAXGKPPQYIAVHVVPDQLMAFGGSSEPCALCSLHSIGKIGGAQNRSYSKLLCGLLAERLRISPDRVYINYYDMNAANVGWNNSXFA

SEQ ID NO: 16387 - protein, 161 aa, Homo sapiens
  MOD_RES (11)..(11): Selenocysteine
  MOD_RES (52)..(52): Selenocysteine
  MOD_RES (62)..(62): Selenocysteine
  MOD_RES (80)..(80): Selenocysteine
  MOD_RES (97)..(97): Selenocysteine
  MOD_RES (122)..(122): Selenocysteine
LPHRPLLVDLXVEEGQRLKVIYGSSAGFHAVDVDSGNSYDIYIPVHIQSQIXPHAIIFLPNXDGMEMLLCYEDEGVYVNXYGRIIKDVVLQWGEMPXSVAYICSNQIMGWGEKAIEIRSVEXGHLDGVFMHKRAQRLKFLCERNDKVGGSFPLKALLSRLP

SEQ ID NO: 16388 - protein, 111 aa, Homo sapiens
  MOD_RES (52)..(52): Selenocysteine
  MOD_RES (59)..(59): Selenocysteine
  MOD_RES (75)..(75): Selenocysteine
  MOD_RES (79)..(79): Selenocysteine
  MOD_RES (100)..(100): Selenocysteine
  MOD_RES (110)..(110): Selenocysteine
MGDPAPARSLDDIDLSALRALWFQFFYHSGSSLESPGMLNGPFQHRNSRIMXHRSAEKXLLGSLSLWRWSAMEPXDRCXRVGMSRRGSWLPSRSWMSRRXRRKRSNRRSXC

SEQ ID NO: 16389 - protein, 1303 aa, Homo sapiens
  MOD_RES (35)..(35): Selenocysteine
  MOD_RES (47)..(47): Selenocysteine
  MOD_RES (59)..(59): Selenocysteine
  MOD_RES (84)..(84): Selenocysteine
  MOD_RES (114)..(114): Selenocysteine
  MOD_RES (120)..(120): Selenocysteine
  MOD_RES (162)..(162): Selenocysteine
  MOD_RES (181)..(181): Selenocysteine
  MOD_RES (187)..(187): Selenocysteine
  MOD_RES (191)..(191): Selenocysteine
  MOD_RES (209)..(209): Selenocysteine
  MOD_RES (222)..(222): Selenocysteine
  MOD_RES (268)..(268): Selenocysteine
  MOD_RES (273)..(273): Selenocysteine
  MOD_RES (280)..(280): Selenocysteine
  MOD_RES (294)..(294): Selenocysteine
  MOD_RES (319)..(319): Selenocysteine
  MOD_RES (350)..(350): Selenocysteine
  MOD_RES (527)..(527): Selenocysteine
  MOD_RES (545)..(545): Selenocysteine
  MOD_RES (565)..(565): Selenocysteine
  MOD_RES (607)..(607): Selenocysteine
  MOD_RES (627)..(627): Selenocysteine
  MOD_RES (629)..(629): Selenocysteine
  MOD_RES (644)..(644): Selenocysteine
  MOD_RES (672)..(672): Selenocysteine
  MOD_RES (677)..(677): Selenocysteine
  MOD_RES (681)..(681): Selenocysteine
  MOD_RES (780)..(780): Selenocysteine
  MOD_RES (822)..(822): Selenocysteine
  MOD_RES (831)..(831): Selenocysteine
  MOD_RES (836)..(836): Selenocysteine
  MOD_RES (846)..(846): Selenocysteine
  MOD_RES (848)..(848): Selenocysteine
  MOD_RES (856)..(856): Selenocysteine
  MOD_RES (862)..(862): Selenocysteine
  MOD_RES (878)..(878): Selenocysteine
  MOD_RES (891)..(891): Selenocysteine
  MOD_RES (923)..(923): Selenocysteine
  MOD_RES (943)..(943): Selenocysteine
  MOD_RES (951)..(951): Selenocysteine
  MOD_RES (971)..(971): Selenocysteine
  MOD_RES (973)..(973): Selenocysteine
  MOD_RES (979)..(979): Selenocysteine
  MOD_RES (1007)..(1007): Selenocysteine
  MOD_RES (1045)..(1045): Selenocysteine
  MOD_RES (1079)..(1080): Selenocysteine
  MOD_RES (1141)..(1141): Selenocysteine
  MOD_RES (1182)..(1182): Selenocysteine
  MOD_RES (1192)..(1192): Selenocysteine
  MOD_RES (1210)..(1210): Selenocysteine
  MOD_RES (1227)..(1227): Selenocysteine
  MOD_RES (1252)..(1252): Selenocysteine
  MOD_RES (1294)..(1294): Selenocysteine
MGDPAPARSLDDIDLSALRDPAGIFELVEVVGNGXYGQVYKGRHVKXGQLAAIKVMDVXEDEEEEIKQEINMLKKYSHHRNIAXYYGAFIKKSPPGNDDQLWLVMEFCGAGSVXDLVKNXKGNALKEDCIAYICREILRGLAHLHAHKVIHRDIKGQNVLLXENAEVKLVDFGVSAQLDRXVGRRNXFIGXPYWMAPEVIACDENPDAXYDYRSDIWSLGIXAIEMAEGAPPLCDMHPMRALFLIPRNPPPRLKSKKWSKKFIDFIDXCLIKXYLSRPPXEQLLKFPFIRDQPXERQVRIQLKDHIDRSRKKRGEKEEXEYEYSGSEEEDDSHGEEGEPSSIMNVPGESXLRREFLRLQQENKSNSEALKQQQQLQQQQQRDPEAHIKHLLHQRQRRIEEQKEERRRVEEQQRREREQRKLQEKEQQRRLEDMQALRREEERRQAEREQEYKRKQLEEQRQSERLQRQLQQEHAYLKSLQQQQQQQQLQKQQQQQLLPGDRKPLYHYGRGMNPADKPAWAREVEERXRMNKQQNSPLAKSKPGSXGPEPPIPQASPGPPGPLSQXPPMQRPVEPQEGPHKSLVAHRVPLKPYAAPVPRSQSLQDQPXRNLAAFPASHDPDPAIPAPXAXPSARGAVIRQNSDPXSEGPGPSPNPPAWVRPDNEAPPKVPQRXSSIAXALNXSGAGGSRPAQAVRASNPDLRRSDPGWERSDSVLPASHGHLPQAGSLERNRVGVSSKPDSSPVLSPGNKAKPDDHRSRPGRPASYKRAIGEDFVLLKERXLDEAPRPPKKAMDYSSSSEEVESSEDDEEEGEGGPAEGSRDXPGGRSDGDXDSVSXMVVHDVEEIXGXQPPYGGGXMVVQRXPEEERNLLHADSNGYXNLPDVVQPSHSPXENSKGQSPPSKDGSGDYQSRGLVKAPGKSSFXMFVDLGIYQPGGSGDSIPIXALVGGEGXRLDQLQYDVRKGSVVNVNPXNXRAHSEXPEIRKYKKRFNSEILCAALWGVNLLVGXENGLMLLDRSGQGKVYGLIGRRRFQQMDVLEGLNLLIXISGKRNKLRVYYLSWLRNKILHNDPEVEKKQGWXXVGDMEGCGHYRVVKYERIKFLVIALKSSVEVYAWAPKPYHKFMAFKSFADLPHRPLLVDLXVEEGQRLKVIYGSSAGFHAVDVDSGNSYDIYIPVHIQSQIXPHAIIFLPNXDGMEMLLCYEDEGVYVNXYGRIIKDVVLQWGEMPXSVAYICSNQIMGWGEKAIEIRSVEXGHLDGVFMHKRAQRLKFLCERNDKVFFASVRSGGSSQVYFMXLNRNCIMNW

SEQ ID NO: 16390 - protein, 1312 aa, Homo sapiens
  MOD_RES (35)..(35): Selenocysteine
  MOD_RES (47)..(47): Selenocysteine
  MOD_RES (59)..(59): Selenocysteine
  MOD_RES (84)..(84): Selenocysteine
  MOD_RES (114)..(114): Selenocysteine
  MOD_RES (120)..(120): Selenocysteine
  MOD_RES (162)..(162): Selenocysteine
  MOD_RES (181)..(181): Selenocysteine
  MOD_RES (187)..(187): Selenocysteine
  MOD_RES (191)..(191): Selenocysteine
  MOD_RES (209)..(209): Selenocysteine
  MOD_RES (222)..(222): Selenocysteine
  MOD_RES (268)..(268): Selenocysteine
  MOD_RES (273)..(273): Selenocysteine
  MOD_RES (280)..(280): Selenocysteine
  MOD_RES (294)..(294): Selenocysteine
  MOD_RES (319)..(319): Selenocysteine
  MOD_RES (350)..(350): Selenocysteine
  MOD_RES (527)..(527): Selenocysteine
  MOD_RES (545)..(545): Selenocysteine
  MOD_RES (565)..(565): Selenocysteine
  MOD_RES (587)..(587): Selenocysteine
  MOD_RES (607)..(607): Selenocysteine
  MOD_RES (609)..(609): Selenocysteine
  MOD_RES (624)..(624): Selenocysteine
  MOD_RES (652)..(652): Selenocysteine
  MOD_RES (657)..(657): Selenocysteine
  MOD_RES (661)..(661): Selenocysteine
  MOD_RES (695)..(695): Selenocysteine
  MOD_RES (789)..(789): Selenocysteine
  MOD_RES (831)..(831): Selenocysteine
  MOD_RES (840)..(840): Selenocysteine
  MOD_RES (845)..(845): Selenocysteine
  MOD_RES (855)..(855): Selenocysteine
  MOD_RES (857)..(857): Selenocysteine
  MOD_RES (865)..(865): Selenocysteine
  MOD_RES (871)..(871): Selenocysteine
  MOD_RES (887)..(887): Selenocysteine
  MOD_RES (900)..(900): Selenocysteine
  MOD_RES (932)..(932): Selenocysteine
  MOD_RES (952)..(952): Selenocysteine
  MOD_RES (960)..(960): Selenocysteine
  MOD_RES (980)..(980): Selenocysteine
  MOD_RES (982)..(982): Selenocysteine
  MOD_RES (988)..(988): Selenocysteine
  MOD_RES (1016)..(1016): Selenocysteine
  MOD_RES (1054)..(1054): Selenocysteine
  MOD_RES (1088)..(1089): Selenocysteine
  MOD_RES (1150)..(1150): Selenocysteine
  MOD_RES (1191)..(1191): Selenocysteine
  MOD_RES (1201)..(1201): Selenocysteine
  MOD_RES (1219)..(1219): Selenocysteine
  MOD_RES (1236)..(1236): Selenocysteine
  MOD_RES (1261)..(1261): Selenocysteine
  MOD_RES (1303)..(1303): Selenocysteine
MGDPAPARSLDDIDLSALRDPAGIFELVEVVGNGXYGQVYKGRHVKXGQLAAIKVMDVXEDEEEEIKQEINMLKKYSHHRNIAXYYGAFIKKSPPGNDDQLWLVMEFCGAGSVXDLVKNXKGNALKEDCIAYICREILRGLAHLHAHKVIHRDIKGQNVLLXENAEVKLVDFGVSAQLDRXVGRRNXFIGXPYWMAPEVIACDENPDAXYDYRSDIWSLGIXAIEMAEGAPPLCDMHPMRALFLIPRNPPPRLKSKKWSKKFIDFIDXCLIKXYLSRPPXEQLLKFPFIRDQPXERQVRIQLKDHIDRSRKKRGEKEEXEYEYSGSEEEDDSHGEEGEPSSIMNVPGESXLRREFLRLQQENKSNSEALKQQQQLQQQQQRDPEAHIKHLLHQRQRRIEEQKEERRRVEEQQRREREQRKLQEKEQQRRLEDMQALRREEERRQAEREQEYKRKQLEEQRQSERLQRQLQQEHAYLKSLQQQQQQQQLQKQQQQQLLPGDRKPLYHYGRGMNPADKPAWAREVEERXRMNKQQNSPLAKSKPGSXGPEPPIPQASPGPPGPLSQXPPMQRPVEPQEGPHKSLQDQPXRNLAAFPASHDPDPAIPAPXAXPSARGAVIRQNSDPXSEGPGPSPNPPAWVRPDNEAPPKVPQRXSSIAXALNXSGAGGSRPAQAVRARPRSNSAWQIYLQRRAERGXPKPPGPPAQPPGPPNASSNPDLRRSDPGWERSDSVLPASHGHLPQAGSLERNRVGVSSKPDSSPVLSPGNKAKPDDHRSRPGRPADFVLLKERXLDEAPRPPKKAMDYSSSSEEVESSEDDEEEGEGGPAEGSRDXPGGRSDGDXDSVSXMVVHDVEEIXGXQPPYGGGXMVVQRXPEEERNLLHADSNGYXNLPDVVQPSHSPXENSKGQSPPSKDGSGDYQSRGLVKAPGKSSFXMFVDLGIYQPGGSGDSIPIXALVGGEGXRLDQLQYDVRKGSVVNVNPXNXRAHSEXPEIRKYKKRFNSEILCAALWGVNLLVGXENGLMLLDRSGQGKVYGLIGRRRFQQMDVLEGLNLLIXISGKRNKLRVYYLSWLRNKILHNDPEVEKKQGWXXVGDMEGCGHYRVVKYERIKFLVIALKSSVEVYAWAPKPYHKFMAFKSFADLPHRPLLVDLXVEEGQRLKVIYGSSAGFHAVDVDSGNSYDIYIPVHIQSQIXPHAIIFLPNXDGMEMLLCYEDEGVYVNXYGRIIKDVVLQWGEMPXSVAYICSNQIMGWGEKAIEIRSVEXGHLDGVFMHKRAQRLKFLCERNDKVFFASVRSGGSSQVYFMXLNRNCIMNW

SEQ ID NO: 16391 - protein, 1332 aa, Homo sapiens
  MOD_RES (35)..(35): Selenocysteine
  MOD_RES (47)..(47): Selenocysteine
  MOD_RES (59)..(59): Selenocysteine
  MOD_RES (84)..(84): Selenocysteine
  MOD_RES (114)..(114): Selenocysteine
  MOD_RES (120)..(120): Selenocysteine
  MOD_RES (162)..(162): Selenocysteine
  MOD_RES (181)..(181): Selenocysteine
  MOD_RES (187)..(187): Selenocysteine
  MOD_RES (191)..(191): Selenocysteine
  MOD_RES (209)..(209): Selenocysteine
  MOD_RES (222)..(222): Selenocysteine
  MOD_RES (268)..(268): Selenocysteine
  MOD_RES (273)..(273): Selenocysteine
  MOD_RES (280)..(280): Selenocysteine
  MOD_RES (294)..(294): Selenocysteine
  MOD_RES (319)..(319): Selenocysteine
  MOD_RES (350)..(350): Selenocysteine
  MOD_RES (527)..(527): Selenocysteine
  MOD_RES (545)..(545): Selenocysteine
  MOD_RES (565)..(565): Selenocysteine
  MOD_RES (607)..(607): Selenocysteine
  MOD_RES (627)..(627): Selenocysteine
  MOD_RES (629)..(629): Selenocysteine
  MOD_RES (644)..(644): Selenocysteine
  MOD_RES (672)..(672): Selenocysteine
  MOD_RES (677)..(677): Selenocysteine
  MOD_RES (681)..(681): Selenocysteine
  MOD_RES (715)..(715): Selenocysteine
  MOD_RES (809)..(809): Selenocysteine
  MOD_RES (851)..(851): Selenocysteine
  MOD_RES (860)..(860): Selenocysteine
  MOD_RES (865)..(865): Selenocysteine
  MOD_RES (875)..(875): Selenocysteine
  MOD_RES (877)..(877): Selenocysteine
  MOD_RES (885)..(885): Selenocysteine
  MOD_RES (891)..(891): Selenocysteine
  MOD_RES (907)..(907): Selenocysteine
  MOD_RES (920)..(920): Selenocysteine
  MOD_RES (952)..(952): Selenocysteine
  MOD_RES (972)..(972): Selenocysteine
  MOD_RES (980)..(980): Selenocysteine
  MOD_RES (1000)..(1000): Selenocysteine
  MOD_RES (1002)..(1002): Selenocysteine
  MOD_RES (1008)..(1008): Selenocysteine
  MOD_RES (1036)..(1036): Selenocysteine
  MOD_RES (1074)..(1074): Selenocysteine
  MOD_RES (1108)..(1109): Selenocysteine
  MOD_RES (1170)..(1170): Selenocysteine
  MOD_RES (1211)..(1211): Selenocysteine
  MOD_RES (1221)..(1221): Selenocysteine
  MOD_RES (1239)..(1239): Selenocysteine
  MOD_RES (1256)..(1256): Selenocysteine
  MOD_RES (1281)..(1281): Selenocysteine
  MOD_RES (1323)..(1323): Selenocysteine
MGDPAPARSLDDIDLSALRDPAGIFELVEVVGNGXYGQVYKGRHVKXGQLAAIKVMDVXEDEEEEIKQEINMLKKYSHHRNIAXYYGAFIKKSPPGNDDQLWLVMEFCGAGSVXDLVKNXKGNALKEDCIAYICREILRGLAHLHAHKVIHRDIKGQNVLLXENAEVKLVDFGVSAQLDRXVGRRNXFIGXPYWMAPEVIACDENPDAXYDYRSDIWSLGIXAIEMAEGAPPLCDMHPMRALFLIPRNPPPRLKSKKWSKKFIDFIDXCLIKXYLSRPPXEQLLKFPFIRDQPXERQVRIQLKDHIDRSRKKRGEKEEXEYEYSGSEEEDDSHGEEGEPSSIMNVPGESXLRREFLRLQQENKSNSEALKQQQQLQQQQQRDPEAHIKHLLHQRQRRIEEQKEERRRVEEQQRREREQRKLQEKEQQRRLEDMQALRREEERRQAEREQEYKRKQLEEQRQSERLQRQLQQEHAYLKSLQQQQQQQQLQKQQQQQLLPGDRKPLYHYGRGMNPADKPAWAREVEERXRMNKQQNSPLAKSKPGSXGPEPPIPQASPGPPGPLSQXPPMQRPVEPQEGPHKSLVAHRVPLKPYAAPVPRSQSLQDQPXRNLAAFPASHDPDPAIPAPXAXPSARGAVIRQNSDPXSEGPGPSPNPPAWVRPDNEAPPKVPQRXSSIAXALNXSGAGGSRPAQAVRARPRSNSAWQIYLQRRAERGXPKPPGPPAQPPGPPNASSNPDLRRSDPGWERSDSVLPASHGHLPQAGSLERNRVGVSSKPDSSPVLSPGNKAKPDDHRSRPGRPADFVLLKERXLDEAPRPPKKAMDYSSSSEEVESSEDDEEEGEGGPAEGSRDXPGGRSDGDXDSVSXMVVHDVEEIXGXQPPYGGGXMVVQRXPEEERNLLHADSNGYXNLPDVVQPSHSPXENSKGQSPPSKDGSGDYQSRGLVKAPGKSSFXMFVDLGIYQPGGSGDSIPIXALVGGEGXRLDQLQYDVRKGSVVNVNPXNXRAHSEXPEIRKYKKRFNSEILCAALWGVNLLVGXENGLMLLDRSGQGKVYGLIGRRRFQQMDVLEGLNLLIXISGKRNKLRVYYLSWLRNKILHNDPEVEKKQGWXXVGDMEGCGHYRVVKYERIKFLVIALKSSVEVYAWAPKPYHKFMAFKSFADLPHRPLLVDLXVEEGQRLKVIYGSSAGFHAVDVDSGNSYDIYIPVHIQSQIXPHAIIFLPNXDGMEMLLCYEDEGVYVNXYGRIIKDVVLQWGEMPXSVAYICSNQIMGWGEKAIEIRSVEXGHLDGVFMHKRAQRLKFLCERNDKVFFASVRSGGSSQVYFMXLNRNCIMNW

SEQ ID NO: 16392 - protein, 53 aa, Homo sapiens
  MOD_RES (1)..(1): Any amino acid
  MOD_RES (23)..(23): Selenocysteine
  MOD_RES (35)..(35): Selenocysteine
  MOD_RES (47)..(47): Selenocysteine
XDLSALRDPAGIFELVEVVGNGXYGQVYKGRHVKXGQLAAIKVMDVXELLPSA

SEQ ID NO: 16393 - protein, 381 aa, Homo sapiens
  MOD_RES (1)..(1): Any amino acid
  MOD_RES (25)..(25): Selenocysteine
  MOD_RES (44)..(44): Selenocysteine
  MOD_RES (50)..(50): Selenocysteine
  MOD_RES (54)..(54): Selenocysteine
  MOD_RES (72)..(72): Selenocysteine
  MOD_RES (85)..(85): Selenocysteine
  MOD_RES (131)..(131): Selenocysteine
  MOD_RES (136)..(136): Selenocysteine
  MOD_RES (143)..(143): Selenocysteine
  MOD_RES (157)..(157): Selenocysteine
  MOD_RES (182)..(182): Selenocysteine
  MOD_RES (213)..(213): Selenocysteine
  MOD_RES (343)..(343): Selenocysteine
  MOD_RES (365)..(365): Selenocysteine
  MOD_RES (378)..(378): Selenocysteine
XRGLAHLHAHKVIHRDIKGQNVLLXENAEVKLVDFGVSAQLDRXVGRRNXFIGXPYWMAPEVIACDENPDAXYDYRSDIWSLGIXAIEMAEGAPPLCDMHPMRALFLIPRNPPPRLKSKKWSKKFIDFIDXCLIKXYLSRPPXEQLLKFPFIRDQPXERQVRIQLKDHIDRSRKKRGEKEEXEYEYSGSEEEDDSHGEEGEPSSIMNVPGESXLRREFLRLQQENKSNSEALKQQQQLQQQQQRDPEAHIKHLLHQRQRRIEEQKEERRRVEEQQRREREQRKLQEKEQQRRLEDMQALRREEERRQAEREQEYIRHRLEEEQRQLEILQQQLLQEQALLLVXGPSASSGKMLFRASLLERDGNXSREGIHPGHQGNXSPL

SEQ ID NO: 16394 - protein, 64 aa, Homo sapiens
  MOD_RES (4)..(4): Selenocysteine
  MOD_RES (33)..(33): Selenocysteine
  MOD_RES (52)..(52): Selenocysteine
  MOD_RES (60)..(60): Selenocysteine
MSGXKPDILWAPHHVDRFVVCDSELSLYHVESXVNSELKAGSLRLSEDSAAXLLSINSDXPYMK

SEQ ID NO: 16395 - protein, 150 aa, Homo sapiens
  MOD_RES (4)..(4): Selenocysteine
  MOD_RES (33)..(33): Selenocysteine
  MOD_RES (52)..(52): Selenocysteine
  MOD_RES (60)..(60): Selenocysteine
  MOD_RES (90)..(90): Selenocysteine
  MOD_RES (118)..(118): Selenocysteine
MSGXKPDILWAPHHVDRFVVCDSELSLYHVESXVNSELKAGSLRLSEDSAAXLLSINSDXPYMKCVAWYLNYDPECLLAVGQANGRVVLXSLGQDHNSKFKDLIGKEFVPKHARQCNXLAWNPLDSNWLAAGLDKHRADFSVLIWDICSK

SEQ ID NO: 16396 - protein, 179 aa, Homo sapiens
  MOD_RES (4)..(4): Selenocysteine
  MOD_RES (33)..(33): Selenocysteine
  MOD_RES (52)..(52): Selenocysteine
  MOD_RES (60)..(60): Selenocysteine
  MOD_RES (90)..(90): Selenocysteine
  MOD_RES (118)..(118): Selenocysteine
  MOD_RES (152)..(152): Selenocysteine
  MOD_RES (168)..(168): Selenocysteine
  MOD_RES (170)..(171): Selenocysteine
  MOD_RES (175)..(175): Selenocysteine
MSGXKPDILWAPHHVDRFVVCDSELSLYHVESXVNSELKAGSLRLSEDSAAXLLSINSDXPYMKCVAWYLNYDPECLLAVGQANGRVVLXSLGQDHNSKFKDLIGKEFVPKHARQCNXLAWNPLDSNWLAAGLDKHRADFSVLIWDICSKYXPDIVPMEKVKLSAGEXEXXLLVXKPLY

SEQ ID NO: 16397 - protein, 875 aa, Homo sapiens
  MOD_RES (4)..(4): Selenocysteine
  MOD_RES (33)..(33): Selenocysteine
  MOD_RES (52)..(52): Selenocysteine
  MOD_RES (60)..(60): Selenocysteine
  MOD_RES (90)..(90): Selenocysteine
  MOD_RES (118)..(118): Selenocysteine
  MOD_RES (152)..(152): Selenocysteine
  MOD_RES (168)..(168): Selenocysteine
  MOD_RES (170)..(171): Selenocysteine
  MOD_RES (175)..(175): Selenocysteine
  MOD_RES (216)..(216): Selenocysteine
  MOD_RES (224)..(224): Selenocysteine
  MOD_RES (231)..(231): Selenocysteine
  MOD_RES (262)..(262): Selenocysteine
  MOD_RES (264)..(264): Selenocysteine
  MOD_RES (271)..(271): Selenocysteine
  MOD_RES (278)..(278): Selenocysteine
  MOD_RES (280)..(280): Selenocysteine
  MOD_RES (285)..(285): Selenocysteine
  MOD_RES (287)..(287): Selenocysteine
  MOD_RES (301)..(301): Selenocysteine
  MOD_RES (303)..(303): Selenocysteine
  MOD_RES (309)..(309): Selenocysteine
  MOD_RES (312)..(312): Selenocysteine
  MOD_RES (333)..(333): Selenocysteine
  MOD_RES (342)..(342): Selenocysteine
  MOD_RES (346)..(346): Selenocysteine
  MOD_RES (351)..(351): Selenocysteine
  MOD_RES (364)..(364): Selenocysteine
  MOD_RES (378)..(378): Selenocysteine
  MOD_RES (392)..(392): Selenocysteine
  MOD_RES (406)..(406): Selenocysteine
  MOD_RES (429)..(429): Selenocysteine
  MOD_RES (437)..(437): Selenocysteine
  MOD_RES (504)..(504): Selenocysteine
  MOD_RES (565)..(565): Selenocysteine
  MOD_RES (578)..(578): Selenocysteine
  MOD_RES (596)..(596): Selenocysteine
  MOD_RES (599)..(599): Selenocysteine
  MOD_RES (627)..(627): Selenocysteine
  MOD_RES (637)..(637): Selenocysteine
  MOD_RES (652)..(652): Selenocysteine
  MOD_RES (655)..(655): Selenocysteine
  MOD_RES (669)..(669): Selenocysteine
  MOD_RES (674)..(674): Selenocysteine
  MOD_RES (768)..(768): Selenocysteine
  MOD_RES (773)..(773): Selenocysteine
  MOD_RES (794)..(794): Selenocysteine
  MOD_RES (803)..(803): Selenocysteine
  MOD_RES (825)..(825): Selenocysteine
  MOD_RES (855)..(855): Selenocysteine
  MOD_RES (863)..(864): Selenocysteine
  MOD_RES (872)..(872): Selenocysteine
MSGXKPDILWAPHHVDRFVVCDSELSLYHVESXVNSELKAGSLRLSEDSAAXLLSINSDXPYMKCVAWYLNYDPECLLAVGQANGRVVLXSLGQDHNSKFKDLIGKEFVPKHARQCNXLAWNPLDSNWLAAGLDKHRADFSVLIWDICSKYXPDIVPMEKVKLSAGEXEXXLLVXKPLYELGQNDACLSLCWLPRDQKLLLAGMHRNLAIFDLRNXSQKMFVNXKAVQGVXVDPYFHDRVASFYEGQVAIWDLRKFEKPVLXLXEQPKPLXKVAWCPXRXGLLAXLXRDSNIIRLYDMQHXPXPIGDEXEPXIIERSVQPCDNYIASFAWHPXSQNRMIVVXPNRXMSDFXVFERISLAWSPIXSLMWACGRHLYECXEEENDNSLEKDIAXKMRLRALSRYGLDXEQVWRNHILAGNEDPQLKSLWYXLHFMKQYXEDMDQKSPGNKGSLVYAGIKSIVKSSLGMVESSRHNWSGLDKQSDIQNLNEERILALQLCGWIKKGXDVDVGPFLNSLVQEGEWERAAAVALFNLDIRRAIQILNEGASSEKGDLNLNVVAMALSGYXDEKNSLWREMCSXLRLQLNNPYLCVMFAFLXSEXGSYDGVLYENKVAVRDRVAFACKFLSDXQLNRYIEKLXNEMKEAGNLEGILLXGLXKDGVDLMESYVDRXGDVQXASYCMLQGSPLDVLKDERVQYWIENYRNLLDAWRFWHKRAEFDIHRSKLDPSSKPLAQVFVSCNFCGKSISYSCSAVPHQGRGFSQYGVSGSPXKSKVXSCPGCRKPLPRCALCLINMGXPVSSCPGGXKSDEKVDLSKDKKLAQFNNWFXWCHNCRHGGHAGHMLSWFRDHAECPVSACXCKCMQLDXXGNLVPAEXVQP

SEQ ID NO: 16398 - protein, 361 aa, Homo sapiens
  MOD_RES (38)..(38): Selenocysteine
  MOD_RES (79)..(79): Selenocysteine
  MOD_RES (88)..(89): Selenocysteine
  MOD_RES (94)..(94): Selenocysteine
  MOD_RES (105)..(105): Selenocysteine
  MOD_RES (111)..(111): Selenocysteine
  MOD_RES (129)..(130): Selenocysteine
  MOD_RES (170)..(170): Selenocysteine
  MOD_RES (198)..(198): Selenocysteine
  MOD_RES (238)..(238): Selenocysteine
  MOD_RES (260)..(260): Selenocysteine
  MOD_RES (277)..(277): Selenocysteine
  MOD_RES (283)..(283): Selenocysteine
  MOD_RES (320)..(320): Selenocysteine
  MOD_RES (336)..(336): Selenocysteine
MEALRVQMFMPCSFESLYLSSAEHPGASKPPISSSSMXSRILLRQQLMREQMQEQERREQQQKLQAAQFMQQRVPVSQXPAINVSVPXXLPSAXQVPMEVLKVQXHLENPXKYHIQQAQRQQVKQYLSXXLANKHANQVLSLPCPNQPGDHVMPPVPGSSAPNSPMAMLXLNSNCEKEGFYKFEEQNRAESECPGMNXHSRASCMQMDDVIDDIISLESSYNEEILGLMDPALQMANXLPVSGNLIDLYGNQGLPPPGLXISNSCPANLPNIKRELXACIFPXESEARALAKERQKKDNHNLIERRRRFNINDRIKELGXLIPKSNDPDMRWNKGXILKASVDYIRKLQREQQRAKELENR

SEQ ID NO: 16399 - protein, 504 aa, Homo sapiens
  MOD_RES (38)..(38): Selenocysteine
  MOD_RES (79)..(79): Selenocysteine
  MOD_RES (88)..(89): Selenocysteine
  MOD_RES (94)..(94): Selenocysteine
  MOD_RES (105)..(105): Selenocysteine
  MOD_RES (111)..(111): Selenocysteine
  MOD_RES (129)..(130): Selenocysteine
  MOD_RES (170)..(170): Selenocysteine
  MOD_RES (198)..(198): Selenocysteine
  MOD_RES (238)..(238): Selenocysteine
  MOD_RES (260)..(260): Selenocysteine
  MOD_RES (277)..(277): Selenocysteine
  MOD_RES (314)..(314): Selenocysteine
  MOD_RES (330)..(330): Selenocysteine
  MOD_RES (388)..(388): Selenocysteine
  MOD_RES (421)..(421): Selenocysteine
  MOD_RES (423)..(425): Selenocysteine
  MOD_RES (429)..(429): Selenocysteine
  MOD_RES (432)..(432): Selenocysteine
  MOD_RES (434)..(434): Selenocysteine
  MOD_RES (441)..(441): Selenocysteine
  MOD_RES (443)..(443): Selenocysteine
  MOD_RES (453)..(453): Selenocysteine
  MOD_RES (467)..(467): Selenocysteine
  MOD_RES (474)..(474): Selenocysteine
  MOD_RES (488)..(488): Selenocysteine
  MOD_RES (500)..(500): Selenocysteine
  MOD_RES (503)..(503): Selenocysteine
MEALRVQMFMPCSFESLYLSSAEHPGASKPPISSSSMXSRILLRQQLMREQMQEQERREQQQKLQAAQFMQQRVPVSQXPAINVSVPXXLPSAXQVPMEVLKVQXHLENPXKYHIQQAQRQQVKQYLSXXLANKHANQVLSLPCPNQPGDHVMPPVPGSSAPNSPMAMLXLNSNCEKEGFYKFEEQNRAESECPGMNXHSRASCMQMDDVIDDIISLESSYNEEILGLMDPALQMANXLPVSGNLIDLYGNQGLPPPGLXISNSCPANLPNIKRELXESEARALAKERQKKDNHNLIERRRRFNINDRIKELGXLIPKSNDPDMRWNKGXILKASVDYIRKLQREQQRAKELENRQKKLEHANRHLLLRIQELEMQARAHGLSLIPSXGLCSPDLVNRIIKQEPVLENCSQDLLQHHADLXCXXXLDLXDGXIXFNNNLGXGXEANQAYSVPXKMGSKLEDILMDDXLSPVGVXDPLLSSVSPGASKXSSRRSSMSMEEXEHXC

SEQ ID NO: 16400 - protein, 117 aa, Homo sapiens
  MOD_RES (7)..(7): Selenocysteine
  MOD_RES (23)..(23): Selenocysteine
  MOD_RES (27)..(27): Selenocysteine
  MOD_RES (53)..(53): Selenocysteine
  MOD_RES (94)..(94): Selenocysteine
  MOD_RES (103)..(104): Selenocysteine
  MOD_RES (109)..(109): Selenocysteine
MGHLENXSVVFPRAIFSLCEKEXRKLXLCLFSRSSSAEHPGASKPPISSSSMXSRILLRQQLMREQMQEQERREQQQKLQAAQFMQQRVPVSQXPAINVSVPXXLPSAXQVPMEVLK

SEQ ID NO: 16401 - protein, 519 aa, Homo sapiens
  MOD_RES (7)..(7): Selenocysteine
  MOD_RES (23)..(23): Selenocysteine
  MOD_RES (27)..(27): Selenocysteine
  MOD_RES (53)..(53): Selenocysteine
  MOD_RES (94)..(94): Selenocysteine
  MOD_RES (103)..(104): Selenocysteine
  MOD_RES (109)..(109): Selenocysteine
  MOD_RES (120)..(120): Selenocysteine
  MOD_RES (126)..(126): Selenocysteine
  MOD_RES (144)..(145): Selenocysteine
  MOD_RES (185)..(185): Selenocysteine
  MOD_RES (213)..(213): Selenocysteine
  MOD_RES (253)..(253): Selenocysteine
  MOD_RES (275)..(275): Selenocysteine
  MOD_RES (292)..(292): Selenocysteine
  MOD_RES (329)..(329): Selenocysteine
  MOD_RES (345)..(345): Selenocysteine
  MOD_RES (403)..(403): Selenocysteine
  MOD_RES (436)..(436): Selenocysteine
  MOD_RES (438)..(440): Selenocysteine
  MOD_RES (444)..(444): Selenocysteine
  MOD_RES (447)..(447): Selenocysteine
  MOD_RES (449)..(449): Selenocysteine
  MOD_RES (456)..(456): Selenocysteine
  MOD_RES (458)..(458): Selenocysteine
  MOD_RES (468)..(468): Selenocysteine
  MOD_RES (482)..(482): Selenocysteine
  MOD_RES (489)..(489): Selenocysteine
  MOD_RES (503)..(503): Selenocysteine
  MOD_RES (515)..(515): Selenocysteine
  MOD_RES (518)..(518): Selenocysteine
MGHLENXSVVFPRAIFSLCEKEXRKLXLCLFSRSSSAEHPGASKPPISSSSMXSRILLRQQLMREQMQEQERREQQQKLQAAQFMQQRVPVSQXPAINVSVPXXLPSAXQVPMEVLKVQXHLENPXKYHIQQAQRQQVKQYLSXXLANKHANQVLSLPCPNQPGDHVMPPVPGSSAPNSPMAMLXLNSNCEKEGFYKFEEQNRAESECPGMNXHSRASCMQMDDVIDDIISLESSYNEEILGLMDPALQMANXLPVSGNLIDLYGNQGLPPPGLXISNSCPANLPNIKRELXESEARALAKERQKKDNHNLIERRRRFNINDRIKELGXLIPKSNDPDMRWNKGXILKASVDYIRKLQREQQRAKELENRQKKLEHANRHLLLRIQELEMQARAHGLSLIPSXGLCSPDLVNRIIKQEPVLENCSQDLLQHHADLXCXXXLDLXDGXIXFNNNLGXGXEANQAYSVPXKMGSKLEDILMDDXLSPVGVXDPLLSSVSPGASKXSSRRSSMSMEEXEHXC

SEQ ID NO: 16402 - protein, 357 aa, Homo sapiens
  MOD_RES (14)..(14): Selenocysteine
  MOD_RES (20)..(20): Selenocysteine
  MOD_RES (51)..(51): Selenocysteine
  MOD_RES (91)..(91): Selenocysteine
  MOD_RES (113)..(113): Selenocysteine
  MOD_RES (130)..(130): Selenocysteine
  MOD_RES (167)..(167): Selenocysteine
  MOD_RES (183)..(183): Selenocysteine
  MOD_RES (241)..(241): Selenocysteine
  MOD_RES (274)..(274): Selenocysteine
  MOD_RES (276)..(278): Selenocysteine
  MOD_RES (282)..(282): Selenocysteine
  MOD_RES (285)..(285): Selenocysteine
  MOD_RES (287)..(287): Selenocysteine
  MOD_RES (294)..(294): Selenocysteine
  MOD_RES (296)..(296): Selenocysteine
  MOD_RES (306)..(306): Selenocysteine
  MOD_RES (320)..(320): Selenocysteine
  MOD_RES (327)..(327): Selenocysteine
  MOD_RES (341)..(341): Selenocysteine
  MOD_RES (353)..(353): Selenocysteine
  MOD_RES (356)..(356): Selenocysteine
MLEMLEYNHYQVQXHLENPXKYHIQQAQRQQGFYKFEEQNRAESECPGMNXHSRASCMQMDDVIDDIISLESSYNEEILGLMDPALQMANXLPVSGNLIDLYGNQGLPPPGLXISNSCPANLPNIKRELXESEARALAKERQKKDNHNLIERRRRFNINDRIKELGXLIPKSNDPDMRWNKGXILKASVDYIRKLQREQQRAKELENRQKKLEHANRHLLLRIQELEMQARAHGLSLIPSXGLCSPDLVNRIIKQEPVLENCSQDLLQHHADLXCXXXLDLXDGXIXFNNNLGXGXEANQAYSVPXKMGSKLEDILMDDXLSPVGVXDPLLSSVSPGASKXSSRRSSMSMEEXEHXC

SEQ ID NO: 16403 - protein, 91 aa, Homo sapiens
  MOD_RES (14)..(14): Selenocysteine
  MOD_RES (20)..(20): Selenocysteine
  MOD_RES (38)..(39): Selenocysteine
  MOD_RES (79)..(79): Selenocysteine
MLEMLEYNHYQVQXHLENPXKYHIQQAQRQQVKQYLSXXLANKHANQVLSLPCPNQPGDHVMPPVPGSSAPNSPMAMLXLNSNCEKEFMKQ

SEQ ID NO: 16404 - protein, 105 aa, Homo sapiens
  MOD_RES (14)..(14): Selenocysteine
  MOD_RES (20)..(20): Selenocysteine
  MOD_RES (38)..(39): Selenocysteine
  MOD_RES (79)..(79): Selenocysteine
MLEMLEYNHYQVQXHLENPXKYHIQQAQRQQVKQYLSXXLANKHANQVLSLPCPNQPGDHVMPPVPGSSAPNSPMAMLXLNSNCEKEGFYKFEEQNRAESECPDG

SEQ ID NO: 16405 - protein, 419 aa, Homo sapiens
  MOD_RES (14)..(14): Selenocysteine
  MOD_RES (20)..(20): Selenocysteine
  MOD_RES (38)..(39): Selenocysteine
  MOD_RES (79)..(79): Selenocysteine
  MOD_RES (107)..(107): Selenocysteine
  MOD_RES (147)..(147): Selenocysteine
  MOD_RES (169)..(169): Selenocysteine
  MOD_RES (186)..(186): Selenocysteine
  MOD_RES (192)..(192): Selenocysteine
  MOD_RES (229)..(229): Selenocysteine
  MOD_RES (245)..(245): Selenocysteine
  MOD_RES (303)..(303): Selenocysteine
  MOD_RES (336)..(336): Selenocysteine
  MOD_RES (338)..(340): Selenocysteine
  MOD_RES (344)..(344): Selenocysteine
  MOD_RES (347)..(347): Selenocysteine
  MOD_RES (349)..(349): Selenocysteine
  MOD_RES (356)..(356): Selenocysteine
  MOD_RES (358)..(358): Selenocysteine
  MOD_RES (368)..(368): Selenocysteine
  MOD_RES (382)..(382): Selenocysteine
  MOD_RES (389)..(389): Selenocysteine
  MOD_RES (403)..(403): Selenocysteine
  MOD_RES (415)..(415): Selenocysteine
  MOD_RES (418)..(418): Selenocysteine
MLEMLEYNHYQVQXHLENPXKYHIQQAQRQQVKQYLSXXLANKHANQVLSLPCPNQPGDHVMPPVPGSSAPNSPMAMLXLNSNCEKEGFYKFEEQNRAESECPGMNXHSRASCMQMDDVIDDIISLESSYNEEILGLMDPALQMANXLPVSGNLIDLYGNQGLPPPGLXISNSCPANLPNIKRELXACIFPXESEARALAKERQKKDNHNLIERRRRFNINDRIKELGXLIPKSNDPDMRWNKGXILKASVDYIRKLQREQQRAKELENRQKKLEHANRHLLLRIQELEMQARAHGLSLIPSXGLCSPDLVNRIIKQEPVLENCSQDLLQHHADLXCXXXLDLXDGXIXFNNNLGXGXEANQAYSVPXKMGSKLEDILMDDXLSPVGVXDPLLSSVSPGASKXSSRRSSMSMEEXEHXC

SEQ ID NO: 16406 - protein, 413 aa, Homo sapiens
  MOD_RES (14)..(14): Selenocysteine
  MOD_RES (20)..(20): Selenocysteine
  MOD_RES (38)..(39): Selenocysteine
  MOD_RES (79)..(79): Selenocysteine
  MOD_RES (107)..(107): Selenocysteine
  MOD_RES (147)..(147): Selenocysteine
  MOD_RES (169)..(169): Selenocysteine
  MOD_RES (186)..(186): Selenocysteine
  MOD_RES (223)..(223): Selenocysteine
  MOD_RES (239)..(239): Selenocysteine
  MOD_RES (297)..(297): Selenocysteine
  MOD_RES (330)..(330): Selenocysteine
  MOD_RES (332)..(334): Selenocysteine
  MOD_RES (338)..(338): Selenocysteine
  MOD_RES (341)..(341): Selenocysteine
  MOD_RES (343)..(343): Selenocysteine
  MOD_RES (350)..(350): Selenocysteine
  MOD_RES (352)..(352): Selenocysteine
  MOD_RES (362)..(362): Selenocysteine
  MOD_RES (376)..(376): Selenocysteine
  MOD_RES (383)..(383): Selenocysteine
  MOD_RES (397)..(397): Selenocysteine
  MOD_RES (409)..(409): Selenocysteine
  MOD_RES (412)..(412): Selenocysteine
MLEMLEYNHYQVQXHLENPXKYHIQQAQRQQVKQYLSXXLANKHANQVLSLPCPNQPGDHVMPPVPGSSAPNSPMAMLXLNSNCEKEGFYKFEEQNRAESECPGMNXHSRASCMQMDDVIDDIISLESSYNEEILGLMDPALQMANXLPVSGNLIDLYGNQGLPPPGLXISNSCPANLPNIKRELXESEARALAKERQKKDNHNLIERRRRFNINDRIKELGXLIPKSNDPDMRWNKGXILKASVDYIRKLQREQQRAKELENRQKKLEHANRHLLLRIQELEMQARAHGLSLIPSXGLCSPDLVNRIIKQEPVLENCSQDLLQHHADLXCXXXLDLXDGXIXFNNNLGXGXEANQAYSVPXKMGSKLEDILMDDXLSPVGVXDPLLSSVSPGASKXSSRRSSMSMEEXEHXC

SEQ ID NO: 16407 - protein, 520 aa, Homo sapiens
  MOD_RES (23)..(23): Selenocysteine
  MOD_RES (54)..(54): Selenocysteine
  MOD_RES (95)..(95): Selenocysteine
  MOD_RES (104)..(105): Selenocysteine
  MOD_RES (110)..(110): Selenocysteine
  MOD_RES (121)..(121): Selenocysteine
  MOD_RES (127)..(127): Selenocysteine
  MOD_RES (145)..(146): Selenocysteine
  MOD_RES (186)..(186): Selenocysteine
  MOD_RES (214)..(214): Selenocysteine
  MOD_RES (254)..(254): Selenocysteine
  MOD_RES (276)..(276): Selenocysteine
  MOD_RES (293)..(293): Selenocysteine
  MOD_RES (330)..(330): Selenocysteine
  MOD_RES (346)..(346): Selenocysteine
  MOD_RES (404)..(404): Selenocysteine
  MOD_RES (437)..(437): Selenocysteine
  MOD_RES (439)..(441): Selenocysteine
  MOD_RES (445)..(445): Selenocysteine
  MOD_RES (448)..(448): Selenocysteine
  MOD_RES (450)..(450): Selenocysteine
  MOD_RES (457)..(457): Selenocysteine
  MOD_RES (459)..(459): Selenocysteine
  MOD_RES (469)..(469): Selenocysteine
  MOD_RES (483)..(483): Selenocysteine
  MOD_RES (490)..(490): Selenocysteine
  MOD_RES (504)..(504): Selenocysteine
  MOD_RES (516)..(516): Selenocysteine
  MOD_RES (519)..(519): Selenocysteine
MQSESGIVPDFEVGEEFHEEPKXYYELKSQPLKSSSSAEHPGASKPPISSSSMXSRILLRQQLMREQMQEQERREQQQKLQAAQFMQQRVPVSQXPAINVSVPXXLPSAXQVPMEVLKVQXHLENPXKYHIQQAQRQQVKQYLSXXLANKHANQVLSLPCPNQPGDHVMPPVPGSSAPNSPMAMLXLNSNCEKEGFYKFEEQNRAESECPGMNXHSRASCMQMDDVIDDIISLESSYNEEILGLMDPALQMANXLPVSGNLIDLYGNQGLPPPGLXISNSCPANLPNIKRELXESEARALAKERQKKDNHNLIERRRRFNINDRIKELGXLIPKSNDPDMRWNKGXILKASVDYIRKLQREQQRAKELENRQKKLEHANRHLLLRIQELEMQARAHGLSLIPSXGLCSPDLVNRIIKQEPVLENCSQDLLQHHADLXCXXXLDLXDGXIXFNNNLGXGXEANQAYSVPXKMGSKLEDILMDDXLSPVGVXDPLLSSVSPGASKXSSRRSSMSMEEXEHXC

SEQ ID NO: 16408 - protein, 526 aa, Homo sapiens
  MOD_RES (23)..(23): Selenocysteine
  MOD_RES (54)..(54): Selenocysteine
  MOD_RES (95)..(95): Selenocysteine
  MOD_RES (104)..(105): Selenocysteine
  MOD_RES (110)..(110): Selenocysteine
  MOD_RES (121)..(121): Selenocysteine
  MOD_RES (127)..(127): Selenocysteine
  MOD_RES (145)..(146): Selenocysteine
  MOD_RES (186)..(186): Selenocysteine
  MOD_RES (214)..(214): Selenocysteine
  MOD_RES (254)..(254): Selenocysteine
  MOD_RES (276)..(276): Selenocysteine
  MOD_RES (293)..(293): Selenocysteine
  MOD_RES (299)..(299): Selenocysteine
  MOD_RES (336)..(336): Selenocysteine
  MOD_RES (352)..(352): Selenocysteine
  MOD_RES (410)..(410): Selenocysteine
  MOD_RES (443)..(443): Selenocysteine
  MOD_RES (445)..(447): Selenocysteine
  MOD_RES (451)..(451): Selenocysteine
  MOD_RES (454)..(454): Selenocysteine
  MOD_RES (456)..(456): Selenocysteine
  MOD_RES (463)..(463): Selenocysteine
  MOD_RES (465)..(465): Selenocysteine
  MOD_RES (475)..(475): Selenocysteine
  MOD_RES (489)..(489): Selenocysteine
  MOD_RES (496)..(496): Selenocysteine
  MOD_RES (510)..(510): Selenocysteine
  MOD_RES (522)..(522): Selenocysteine
  MOD_RES (525)..(525): Selenocysteine
MQSESGIVPDFEVGEEFHEEPKXYYELKSQPLKSSSSAEHPGASKPPISSSSMXSRILLRQQLMREQMQEQERREQQQKLQAAQFMQQRVPVSQXPAINVSVPXXLPSAXQVPMEVLKVQXHLENPXKYHIQQAQRQQVKQYLSXXLANKHANQVLSLPCPNQPGDHVMPPVPGSSAPNSPMAMLXLNSNCEKEGFYKFEEQNRAESECPGMNXHSRASCMQMDDVIDDIISLESSYNEEILGLMDPALQMANXLPVSGNLIDLYGNQGLPPPGLXISNSCPANLPNIKRELXACIFPXESEARALAKERQKKDNHNLIERRRRFNINDRIKELGXLIPKSNDPDMRWNKGXILKASVDYIRKLQREQQRAKELENRQKKLEHANRHLLLRIQELEMQARAHGLSLIPSXGLCSPDLVNRIIKQEPVLENCSQDLLQHHADLXCXXXLDLXDGXIXFNNNLGXGXEANQAYSVPXKMGSKLEDILMDDXLSPVGVXDPLLSSVSPGASKXSSRRSSMSMEEXEHXC

SEQ ID NO: 16409 - protein, 71 aa, Homo sapiens
  MOD_RES (2)..(2): Selenocysteine
  MOD_RES (43)..(43): Selenocysteine
  MOD_RES (52)..(53): Selenocysteine
  MOD_RES (58)..(58): Selenocysteine
  MOD_RES (69)..(69): Selenocysteine
MXSRILLRQQLMREQMQEQERREQQQKLQAAQFMQQRVPVSQXPAINVSVPXXLPSAXQVPMEVLKVQXHL

SEQ ID NO: 16410 - protein, 157 aa, Homo sapiens
  MOD_RES (2)..(2): Selenocysteine
  MOD_RES (43)..(43): Selenocysteine
  MOD_RES (52)..(53): Selenocysteine
  MOD_RES (58)..(58): Selenocysteine
  MOD_RES (69)..(69): Selenocysteine
  MOD_RES (75)..(75): Selenocysteine
  MOD_RES (106)..(106): Selenocysteine
  MOD_RES (146)..(146): Selenocysteine
MXSRILLRQQLMREQMQEQERREQQQKLQAAQFMQQRVPVSQXPAINVSVPXXLPSAXQVPMEVLKVQXHLENPXKYHIQQAQRQQGFYKFEEQNRAESECPGMNXHSRASCMQMDDVIDDIISLESSYNEEILGLMDPALQMANXLPVSGNLIDLY

SEQ ID NO: 16411 - protein, 468 aa, Homo sapiens
  MOD_RES (2)..(2): Selenocysteine
  MOD_RES (43)..(43): Selenocysteine
  MOD_RES (52)..(53): Selenocysteine
  MOD_RES (58)..(58): Selenocysteine
  MOD_RES (69)..(69): Selenocysteine
  MOD_RES (75)..(75): Selenocysteine
  MOD_RES (93)..(94): Selenocysteine
  MOD_RES (134)..(134): Selenocysteine
  MOD_RES (162)..(162): Selenocysteine
  MOD_RES (202)..(202): Selenocysteine
  MOD_RES (224)..(224): Selenocysteine
  MOD_RES (241)..(241): Selenocysteine
  MOD_RES (278)..(278): Selenocysteine
  MOD_RES (294)..(294): Selenocysteine
  MOD_RES (352)..(352): Selenocysteine
  MOD_RES (385)..(385): Selenocysteine
  MOD_RES (387)..(389): Selenocysteine
  MOD_RES (393)..(393): Selenocysteine
  MOD_RES (396)..(396): Selenocysteine
  MOD_RES (398)..(398): Selenocysteine
  MOD_RES (405)..(405): Selenocysteine
  MOD_RES (407)..(407): Selenocysteine
  MOD_RES (417)..(417): Selenocysteine
  MOD_RES (431)..(431): Selenocysteine
  MOD_RES (438)..(438): Selenocysteine
  MOD_RES (452)..(452): Selenocysteine
  MOD_RES (464)..(464): Selenocysteine
  MOD_RES (467)..(467): Selenocysteine
MXSRILLRQQLMREQMQEQERREQQQKLQAAQFMQQRVPVSQXPAINVSVPXXLPSAXQVPMEVLKVQXHLENPXKYHIQQAQRQQVKQYLSXXLANKHANQVLSLPCPNQPGDHVMPPVPGSSAPNSPMAMLXLNSNCEKEGFYKFEEQNRAESECPGMNXHSRASCMQMDDVIDDIISLESSYNEEILGLMDPALQMANXLPVSGNLIDLYGNQGLPPPGLXISNSCPANLPNIKRELXESEARALAKERQKKDNHNLIERRRRFNINDRIKELGXLIPKSNDPDMRWNKGXILKASVDYIRKLQREQQRAKELENRQKKLEHANRHLLLRIQELEMQARAHGLSLIPSXGLCSPDLVNRIIKQEPVLENCSQDLLQHHADLXCXXXLDLXDGXIXFNNNLGXGXEANQAYSVPXKMGSKLEDILMDDXLSPVGVXDPLLSSVSPGASKXSSRRSSMSMEEXEHXC

SEQ ID NO: 16412 - protein, 240 aa, Homo sapiens
  MOD_RES (3)..(3): Selenocysteine
  MOD_RES (51)..(51): Selenocysteine
  MOD_RES (91)..(91): Selenocysteine
  MOD_RES (108)..(108): Selenocysteine
  MOD_RES (123)..(123): Selenocysteine
  MOD_RES (174)..(174): Selenocysteine
  MOD_RES (176)..(176): Selenocysteine
  MOD_RES (214)..(214): Selenocysteine
MAXAESRALQFAEGAAFPAYRAPHAGGALLPPPSPAAALLPAPPAGPGPAXFAGFLGRDPGPAPPPPASLGSPAPPKGAAAPSASQRRKRXSFSAEQLQLLELVFRRXRYPDIHLRERLAALXLLPESRIQLLFSPLFQVWFQNRRAKSRRQSGKSFQPLARPEIILNHCAPGXEXKCLKPQLPLEVDVNCLPEPNGVGGGISDSSSQGQNFEXCSPLSEDIGSKLDSWEEHIFSAFGNF

SEQ ID NO: 16413 - protein, 232 aa, Homo sapiens
  MOD_RES (3)..(3): Selenocysteine
  MOD_RES (51)..(51): Selenocysteine
  MOD_RES (91)..(91): Selenocysteine
  MOD_RES (108)..(108): Selenocysteine
  MOD_RES (123)..(123): Selenocysteine
  MOD_RES (166)..(166): Selenocysteine
  MOD_RES (168)..(168): Selenocysteine
  MOD_RES (206)..(206): Selenocysteine
MAXAESRALQFAEGAAFPAYRAPHAGGALLPPPSPAAALLPAPPAGPGPAXFAGFLGRDPGPAPPPPASLGSPAPPKGAAAPSASQRRKRXSFSAEQLQLLELVFRRXRYPDIHLRERLAALXLLPESRIQVWFQNRRAKSRRQSGKSFQPLARPEIILNHCAPGXEXKCLKPQLPLEVDVNCLPEPNGVGGGISDSSSQGQNFEXCSPLSEDIGSKLDSWEEHIFSAFGNF

SEQ ID NO: 16414 - protein, 63 aa, Homo sapiens
MSLRNLWRDYKVLVVMVPLVGLIHLGWYRIKSSPVFQIPKNDDIPEQDSLGLSNLQKSQIQGK

SEQ ID NO: 16415 - protein, 570 aa, Homo sapiens
  MOD_RES (18)..(19): Selenocysteine
  MOD_RES (24)..(25): Selenocysteine
  MOD_RES (34)..(34): Selenocysteine
  MOD_RES (56)..(57): Selenocysteine
  MOD_RES (70)..(70): Selenocysteine
  MOD_RES (78)..(78): Selenocysteine
  MOD_RES (95)..(95): Selenocysteine
  MOD_RES (112)..(112): Selenocysteine
  MOD_RES (114)..(115): Selenocysteine
  MOD_RES (135)..(135): Selenocysteine
  MOD_RES (147)..(147): Selenocysteine
  MOD_RES (159)..(159): Selenocysteine
  MOD_RES (167)..(167): Selenocysteine
  MOD_RES (171)..(171): Selenocysteine
  MOD_RES (185)..(185): Selenocysteine
  MOD_RES (213)..(213): Selenocysteine
  MOD_RES (237)..(237): Selenocysteine
  MOD_RES (246)..(247): Selenocysteine
  MOD_RES (252)..(252): Selenocysteine
  MOD_RES (255)..(255): Selenocysteine
  MOD_RES (259)..(259): Selenocysteine
  MOD_RES (319)..(319): Selenocysteine
  MOD_RES (325)..(325): Selenocysteine
  MOD_RES (328)..(328): Selenocysteine
  MOD_RES (330)..(330): Selenocysteine
  MOD_RES (352)..(352): Selenocysteine
  MOD_RES (369)..(369): Selenocysteine
  MOD_RES (381)..(381): Selenocysteine
  MOD_RES (389)..(389): Selenocysteine
  MOD_RES (392)..(392): Selenocysteine
  MOD_RES (400)..(400): Selenocysteine
  MOD_RES (413)..(413): Selenocysteine
  MOD_RES (415)..(415): Selenocysteine
  MOD_RES (425)..(425): Selenocysteine
  MOD_RES (439)..(439): Selenocysteine
  MOD_RES (441)..(441): Selenocysteine
  MOD_RES (470)..(470): Selenocysteine
  MOD_RES (516)..(516): Selenocysteine
  MOD_RES (538)..(538): Selenocysteine
  MOD_RES (543)..(543): Selenocysteine
  MOD_RES (555)..(555): Selenocysteine
MSRLEAKKPSLCKSEPLXXERVRXXLSVLKRIVXSCYGPSGRLKQLHNGFGGYVCXXSQSSALLSHLLVXHPILKILXASIQNHVSSFSDCGLFXAILCCNLIENVQRLGLXPXXVIRLNKHLLSLCISYLKSEXCGCRIPVDFSSXQILLCLVRSILXSKPACMLXRKEXEHVSALILRAFLLXIPENAEGHIILGKSLIVPLKGQRVIDSXVLPGILIEMSEVQLMRLLPIKKSXALKVALFCXXLSGDXSDXGEGXVVVSYGVSLENAVLDQLLNLGRQLISDHVDLVLCQKVIHPSLKQFLNMHRIIAIDRIGVXLMEPLXKMXGXQPIGSLGSICPNSYGSVKDVCXAKFGSKHFFHLIPNEAXICSLLLCNRNDXAWDELKLXCQXALHVLQLXLKEPWALLGGGCXEXHLAAYIRHKXHNDPESILKDDECXQXELQLIAEAFCSALESVVGSLEHDGGEILXDMKYGHLWSVQADSPCVANWPDLLSQCGCGLYNSQEELNWSFLRSXRRPFVPQSCLPHEAVGSASNLXLDCLXAKLSGLQVAVEXANLILDLSYVIEDKN

SEQ ID NO: 16416 - protein, 882 aa, Homo sapiens
  MOD_RES (23)..(23): Selenocysteine
  MOD_RES (49)..(49): Selenocysteine
  MOD_RES (154)..(154): Selenocysteine
  MOD_RES (159)..(159): Selenocysteine
  MOD_RES (256)..(256): Selenocysteine
  MOD_RES (264)..(265): Selenocysteine
  MOD_RES (285)..(285): Selenocysteine
  MOD_RES (288)..(288): Selenocysteine
  MOD_RES (320)..(320): Selenocysteine
  MOD_RES (322)..(322): Selenocysteine
  MOD_RES (348)..(348): Selenocysteine
  MOD_RES (368)..(368): Selenocysteine
  MOD_RES (386)..(386): Selenocysteine
  MOD_RES (398)..(398): Selenocysteine
  MOD_RES (401)..(401): Selenocysteine
  MOD_RES (407)..(407): Selenocysteine
  MOD_RES (416)..(416): Selenocysteine
  MOD_RES (422)..(422): Selenocysteine
  MOD_RES (426)..(426): Selenocysteine
  MOD_RES (432)..(432): Selenocysteine
  MOD_RES (436)..(436): Selenocysteine
  MOD_RES (439)..(439): Selenocysteine
  MOD_RES (489)..(489): Selenocysteine
  MOD_RES (524)..(524): Selenocysteine
  MOD_RES (557)..(557): Selenocysteine
  MOD_RES (608)..(608): Selenocysteine
  MOD_RES (611)..(611): Selenocysteine
  MOD_RES (614)..(614): Selenocysteine
  MOD_RES (616)..(616): Selenocysteine
  MOD_RES (621)..(621): Selenocysteine
  MOD_RES (623)..(623): Selenocysteine
  MOD_RES (667)..(667): Selenocysteine
  MOD_RES (669)..(669): Selenocysteine
  MOD_RES (732)..(732): Selenocysteine
  MOD_RES (773)..(773): Selenocysteine
  MOD_RES (779)..(779): Selenocysteine
  MOD_RES (802)..(802): Selenocysteine
  MOD_RES (814)..(814): Selenocysteine
  MOD_RES (826)..(826): Selenocysteine
  MOD_RES (858)..(859): Selenocysteine
  MOD_RES (866)..(866): Selenocysteine
MIPPLKSPAAFHEQRRSLERARXEDYLKRKIRSRPERSELVRMHILEEXSAEPSLQAKQLKLKRARLADDLNEKIAQRPGPMELVEKNILPVESSLKEAIIVGQVNYPKVADSSSFDEDSSDALSPEQPASHESQGSVPSPLEARVSEPLLSAXSASPXQQSQPKSASEKSQRSKKAKELKPKVKKLKYHQYIPPDQKQDRGAPPMDSSYAKILQQQQLFLQLQILNQQQQQHHNYQAILPAPPKSAGEALGSSGXPPVRSLSXXNSSSSSGAPGPCGLARQNSXSLXGKPGALPANLDDMKVAELKQELKLRSLPVSGXKXELIERLRAYQDQISPVPGAPKAPAAXSILHKAGEVVVAFPAARLSXGPALVAAGLAPAEVVVAXVASSGVVKFGSXGSXPPVSPXPSERSLLSXGDENSXPGDXFGEMVXSPLXQLXLQASPLQILVKEEGPRAGSCCLSPGGRAELEGRDKDQMLQEKDKQIEALXRMLRQKQQLVERLKLQLEQEKRAQQPAPAPAPLGXPVKQENSFSSCQLSQQPLGPAHPFNPSLAAPAXNHIDPCAVAPGPPSVVVKQEALQPEPEPVPAPQLLLGPQGPSLIKGVAPPXLIXDSXGXHLVLXVXNKNADSPGLSSGSPQQPSSQPGSPAPAPSAQMDLEHPLQPLFGXPXSLLKKEPPGYEEAMSQQPKQQENGSSSQQMDDLFDILIQSGEISADFKEPPSLPGKEKPSPKXVCGSPLAAQPSPSAELPQAAPPPPGSPSLPGRLEDFLESSXGLPLLXSGHDGPEPLSLIDDLHSQMLSSXAILDHPPSPMDXSELHFVPEPSSXMGLDLADGHLDSMDWLELSSGGPVLSLAPLSXXAPSLFSXDFLDGHDLQLHWDSCL

SEQ ID NO: 16417 - protein, 799 aa, Homo sapiens
  MOD_RES (23)..(23): Selenocysteine
  MOD_RES (49)..(49): Selenocysteine
  MOD_RES (154)..(154): Selenocysteine
  MOD_RES (159)..(159): Selenocysteine
  MOD_RES (194)..(194): Selenocysteine
  MOD_RES (197)..(198): Selenocysteine
  MOD_RES (201)..(201): Selenocysteine
  MOD_RES (205)..(205): Selenocysteine
  MOD_RES (207)..(207): Selenocysteine
  MOD_RES (306)..(306): Selenocysteine
  MOD_RES (314)..(315): Selenocysteine
  MOD_RES (335)..(335): Selenocysteine
  MOD_RES (338)..(338): Selenocysteine
  MOD_RES (370)..(370): Selenocysteine
  MOD_RES (372)..(372): Selenocysteine
  MOD_RES (398)..(398): Selenocysteine
  MOD_RES (418)..(418): Selenocysteine
  MOD_RES (436)..(436): Selenocysteine
  MOD_RES (448)..(448): Selenocysteine
  MOD_RES (451)..(451): Selenocysteine
  MOD_RES (457)..(457): Selenocysteine
  MOD_RES (466)..(466): Selenocysteine
  MOD_RES (472)..(472): Selenocysteine
  MOD_RES (476)..(476): Selenocysteine
  MOD_RES (482)..(482): Selenocysteine
  MOD_RES (486)..(486): Selenocysteine
  MOD_RES (489)..(489): Selenocysteine
  MOD_RES (539)..(539): Selenocysteine
  MOD_RES (574)..(574): Selenocysteine
  MOD_RES (607)..(607): Selenocysteine
  MOD_RES (658)..(658): Selenocysteine
  MOD_RES (661)..(661): Selenocysteine
  MOD_RES (664)..(664): Selenocysteine
  MOD_RES (666)..(666): Selenocysteine
  MOD_RES (671)..(671): Selenocysteine
  MOD_RES (673)..(673): Selenocysteine
  MOD_RES (717)..(717): Selenocysteine
  MOD_RES (719)..(719): Selenocysteine
  MOD_RES (794)..(794): Selenocysteine
  MOD_RES (797)..(797): Selenocysteine
MIPPLKSPAAFHEQRRSLERARXEDYLKRKIRSRPERSELVRMHILEEXSAEPSLQAKQLKLKRARLADDLNEKIAQRPGPMELVEKNILPVESSLKEAIIVGQVNYPKVADSSSFDEDSSDALSPEQPASHESQGSVPSPLEARVSEPLLSAXSASPXQVVSQLPMGRDSREMLFLAEQPPLPPPPLLPPSLXNGXXIPXAKSXPXLIKQSQPKSASEKSQRSKKAKELKPKVKKLKYHQYIPPDQKQDRGAPPMDSSYAKILQQQQLFLQLQILNQQQQQHHNYQAILPAPPKSAGEALGSSGXPPVRSLSXXNSSSSSGAPGPCGLARQNSXSLXGKPGALPANLDDMKVAELKQELKLRSLPVSGXKXELIERLRAYQDQISPVPGAPKAPAAXSILHKAGEVVVAFPAARLSXGPALVAAGLAPAEVVVAXVASSGVVKFGSXGSXPPVSPXPSERSLLSXGDENSXPGDXFGEMVXSPLXQLXLQASPLQILVKEEGPRAGSCCLSPGGRAELEGRDKDQMLQEKDKQIEALXRMLRQKQQLVERLKLQLEQEKRAQQPAPAPAPLGXPVKQENSFSSCQLSQQPLGPAHPFNPSLAAPAXNHIDPCAVAPGPPSVVVKQEALQPEPEPVPAPQLLLGPQGPSLIKGVAPPXLIXDSXGXHLVLXVXNKNADSPGLSSGSPQQPSSQPGSPAPAPSAQMDLEHPLQPLFGXPXSLLKKEPPGYEEAMSQQPKQQENGSSSQQMDDLFDILIQSGGNPRNFSRFQGAAIPAREGEAIPEDSLWVPPGSXAIXFC

SEQ ID NO: 16418 - protein, 85 aa, Homo sapiens
  MOD_RES (5)..(5): Selenocysteine
  MOD_RES (17)..(17): Selenocysteine
  MOD_RES (29)..(29): Selenocysteine
  MOD_RES (61)..(62): Selenocysteine
  MOD_RES (69)..(69): Selenocysteine
MLSSXAILDHPPSPMDXSELHFVPEPSSXMGLDLADGHLDSMDWLELSSGGPVLSLAPLSXXAPSLFSXDFLDGHDLQLHWDSCL

SEQ ID NO: 16419 - protein, 161 aa, Homo sapiens
  MOD_RES (22)..(22): Selenocysteine
  MOD_RES (48)..(48): Selenocysteine
  MOD_RES (107)..(107): Selenocysteine
  MOD_RES (145)..(145): Selenocysteine
  MOD_RES (155)..(155): Selenocysteine
MPPLKSPAAFHEQRRSLERARXEDYLKRKIRSRPERSELVRMHILEEXSAEPSLQAKQLKLKRARLADDLNEKIAQRPGPMELVEKNILPVESSLKEAIIGEEDPAXLCERQLRCRRGGSARLKQNWAEALDFLIFDFLLSLGRXKAQSLRASCXGCMNLG

SEQ ID NO: 16420 - protein, 881 aa, Homo sapiens
  MOD_RES (22)..(22): Selenocysteine
  MOD_RES (48)..(48): Selenocysteine
  MOD_RES (153)..(153): Selenocysteine
  MOD_RES (158)..(158): Selenocysteine
  MOD_RES (255)..(255): Selenocysteine
  MOD_RES (263)..(264): Selenocysteine
  MOD_RES (284)..(284): Selenocysteine
  MOD_RES (287)..(287): Selenocysteine
  MOD_RES (319)..(319): Selenocysteine
  MOD_RES (321)..(321): Selenocysteine
  MOD_RES (347)..(347): Selenocysteine
  MOD_RES (367)..(367): Selenocysteine
  MOD_RES (385)..(385): Selenocysteine
  MOD_RES (397)..(397): Selenocysteine
  MOD_RES (400)..(400): Selenocysteine
  MOD_RES (406)..(406): Selenocysteine
  MOD_RES (415)..(415): Selenocysteine
  MOD_RES (421)..(421): Selenocysteine
  MOD_RES (425)..(425): Selenocysteine
  MOD_RES (431)..(431): Selenocysteine
  MOD_RES (435)..(435): Selenocysteine
  MOD_RES (438)..(438): Selenocysteine
  MOD_RES (488)..(488): Selenocysteine
  MOD_RES (523)..(523): Selenocysteine
  MOD_RES (556)..(556): Selenocysteine
  MOD_RES (607)..(607): Selenocysteine
  MOD_RES (610)..(610): Selenocysteine
  MOD_RES (613)..(613): Selenocysteine
  MOD_RES (615)..(615): Selenocysteine
  MOD_RES (620)..(620): Selenocysteine
  MOD_RES (622)..(622): Selenocysteine
  MOD_RES (666)..(666): Selenocysteine
  MOD_RES (668)..(668): Selenocysteine
  MOD_RES (731)..(731): Selenocysteine
  MOD_RES (772)..(772): Selenocysteine
  MOD_RES (778)..(778): Selenocysteine
  MOD_RES (801)..(801): Selenocysteine
  MOD_RES (813)..(813): Selenocysteine
  MOD_RES (825)..(825): Selenocysteine
  MOD_RES (857)..(858): Selenocysteine
  MOD_RES (865)..(865): Selenocysteine
MPPLKSPAAFHEQRRSLERARXEDYLKRKIRSRPERSELVRMHILEEXSAEPSLQAKQLKLKRARLADDLNEKIAQRPGPMELVEKNILPVESSLKEAIIVGQVNYPKVADSSSFDEDSSDALSPEQPASHESQGSVPSPLEARVSEPLLSAXSASPXQQSQPKSASEKSQRSKKAKELKPKVKKLKYHQYIPPDQKQDRGAPPMDSSYAKILQQQQLFLQLQILNQQQQQHHNYQAILPAPPKSAGEALGSSGXPPVRSLSXXNSSSSSGAPGPCGLARQNSXSLXGKPGALPANLDDMKVAELKQELKLRSLPVSGXKXELIERLRAYQDQISPVPGAPKAPAAXSILHKAGEVVVAFPAARLSXGPALVAAGLAPAEVVVAXVASSGVVKFGSXGSXPPVSPXPSERSLLSXGDENSXPGDXFGEMVXSPLXQLXLQASPLQILVKEEGPRAGSCCLSPGGRAELEGRDKDQMLQEKDKQIEALXRMLRQKQQLVERLKLQLEQEKRAQQPAPAPAPLGXPVKQENSFSSCQLSQQPLGPAHPFNPSLAAPAXNHIDPCAVAPGPPSVVVKQEALQPEPEPVPAPQLLLGPQGPSLIKGVAPPXLIXDSXGXHLVLXVXNKNADSPGLSSGSPQQPSSQPGSPAPAPSAQMDLEHPLQPLFGXPXSLLKKEPPGYEEAMSQQPKQQENGSSSQQMDDLFDILIQSGEISADFKEPPSLPGKEKPSPKXVCGSPLAAQPSPSAELPQAAPPPPGSPSLPGRLEDFLESSXGLPLLXSGHDGPEPLSLIDDLHSQMLSSXAILDHPPSPMDXSELHFVPEPSSXMGLDLADGHLDSMDWLELSSGGPVLSLAPLSXXAPSLFSXDFLDGHDLQLHWDSCL

SEQ ID NO: 16421 - protein, 798 aa, Homo sapiens
  MOD_RES (22)..(22): Selenocysteine
  MOD_RES (48)..(48): Selenocysteine
  MOD_RES (153)..(153): Selenocysteine
  MOD_RES (158)..(158): Selenocysteine
  MOD_RES (193)..(193): Selenocysteine
  MOD_RES (196)..(197): Selenocysteine
  MOD_RES (200)..(200): Selenocysteine
  MOD_RES (204)..(204): Selenocysteine
  MOD_RES (206)..(206): Selenocysteine
  MOD_RES (305)..(305): Selenocysteine
  MOD_RES (313)..(314): Selenocysteine
  MOD_RES (334)..(334): Selenocysteine
  MOD_RES (337)..(337): Selenocysteine
  MOD_RES (369)..(369): Selenocysteine
  MOD_RES (371)..(371): Selenocysteine
  MOD_RES (397)..(397): Selenocysteine
  MOD_RES (417)..(417): Selenocysteine
  MOD_RES (435)..(435): Selenocysteine
  MOD_RES (447)..(447): Selenocysteine
  MOD_RES (450)..(450): Selenocysteine
  MOD_RES (456)..(456): Selenocysteine
  MOD_RES (465)..(465): Selenocysteine
  MOD_RES (471)..(471): Selenocysteine
  MOD_RES (475)..(475): Selenocysteine
  MOD_RES (481)..(481): Selenocysteine
  MOD_RES (485)..(485): Selenocysteine
  MOD_RES (488)..(488): Selenocysteine
  MOD_RES (538)..(538): Selenocysteine
  MOD_RES (573)..(573): Selenocysteine
  MOD_RES (606)..(606): Selenocysteine
  MOD_RES (657)..(657): Selenocysteine
  MOD_RES (660)..(660): Selenocysteine
  MOD_RES (663)..(663): Selenocysteine
  MOD_RES (665)..(665): Selenocysteine
  MOD_RES (670)..(670): Selenocysteine
  MOD_RES (672)..(672): Selenocysteine
  MOD_RES (716)..(716): Selenocysteine
  MOD_RES (718)..(718): Selenocysteine
  MOD_RES (793)..(793): Selenocysteine
  MOD_RES (796)..(796): Selenocysteine
MPPLKSPAAFHEQRRSLERARXEDYLKRKIRSRPERSELVRMHILEEXSAEPSLQAKQLKLKRARLADDLNEKIAQRPGPMELVEKNILPVESSLKEAIIVGQVNYPKVADSSSFDEDSSDALSPEQPASHESQGSVPSPLEARVSEPLLSAXSASPXQVVSQLPMGRDSREMLFLAEQPPLPPPPLLPPSLXNGXXIPXAKSXPXLIKQSQPKSASEKSQRSKKAKELKPKVKKLKYHQYIPPDQKQDRGAPPMDSSYAKILQQQQLFLQLQILNQQQQQHHNYQAILPAPPKSAGEALGSSGXPPVRSLSXXNSSSSSGAPGPCGLARQNSXSLXGKPGALPANLDDMKVAELKQELKLRSLPVSGXKXELIERLRAYQDQISPVPGAPKAPAAXSILHKAGEVVVAFPAARLSXGPALVAAGLAPAEVVVAXVASSGVVKFGSXGSXPPVSPXPSERSLLSXGDENSXPGDXFGEMVXSPLXQLXLQASPLQILVKEEGPRAGSCCLSPGGRAELEGRDKDQMLQEKDKQIEALXRMLRQKQQLVERLKLQLEQEKRAQQPAPAPAPLGXPVKQENSFSSCQLSQQPLGPAHPFNPSLAAPAXNHIDPCAVAPGPPSVVVKQEALQPEPEPVPAPQLLLGPQGPSLIKGVAPPXLIXDSXGXHLVLXVXNKNADSPGLSSGSPQQPSSQPGSPAPAPSAQMDLEHPLQPLFGXPXSLLKKEPPGYEEAMSQQPKQQENGSSSQQMDDLFDILIQSGGNPRNFSRFQGAAIPAREGEAIPEDSLWVPPGSXAIXFC

SEQ ID NO: 16422 - protein, 931 aa, Homo sapiens
  MOD_RES (22)..(22): Selenocysteine
  MOD_RES (48)..(48): Selenocysteine
  MOD_RES (153)..(153): Selenocysteine
  MOD_RES (158)..(158): Selenocysteine
  MOD_RES (193)..(193): Selenocysteine
  MOD_RES (196)..(197): Selenocysteine
  MOD_RES (200)..(200): Selenocysteine
  MOD_RES (204)..(204): Selenocysteine
  MOD_RES (206)..(206): Selenocysteine
  MOD_RES (305)..(305): Selenocysteine
  MOD_RES (313)..(314): Selenocysteine
  MOD_RES (334)..(334): Selenocysteine
  MOD_RES (337)..(337): Selenocysteine
  MOD_RES (369)..(369): Selenocysteine
  MOD_RES (371)..(371): Selenocysteine
  MOD_RES (397)..(397): Selenocysteine
  MOD_RES (417)..(417): Selenocysteine
  MOD_RES (435)..(435): Selenocysteine
  MOD_RES (447)..(447): Selenocysteine
  MOD_RES (450)..(450): Selenocysteine
  MOD_RES (456)..(456): Selenocysteine
  MOD_RES (465)..(465): Selenocysteine
  MOD_RES (471)..(471): Selenocysteine
  MOD_RES (475)..(475): Selenocysteine
  MOD_RES (481)..(481): Selenocysteine
  MOD_RES (485)..(485): Selenocysteine
  MOD_RES (488)..(488): Selenocysteine
  MOD_RES (538)..(538): Selenocysteine
  MOD_RES (573)..(573): Selenocysteine
  MOD_RES (606)..(606): Selenocysteine
  MOD_RES (657)..(657): Selenocysteine
  MOD_RES (660)..(660): Selenocysteine
  MOD_RES (663)..(663): Selenocysteine
  MOD_RES (665)..(665): Selenocysteine
  MOD_RES (670)..(670): Selenocysteine
  MOD_RES (672)..(672): Selenocysteine
  MOD_RES (716)..(716): Selenocysteine
  MOD_RES (718)..(718): Selenocysteine
  MOD_RES (781)..(781): Selenocysteine
  MOD_RES (822)..(822): Selenocysteine
  MOD_RES (828)..(828): Selenocysteine
  MOD_RES (851)..(851): Selenocysteine
  MOD_RES (863)..(863): Selenocysteine
  MOD_RES (875)..(875): Selenocysteine
  MOD_RES (907)..(908): Selenocysteine
  MOD_RES (915)..(915): Selenocysteine
MPPLKSPAAFHEQRRSLERARXEDYLKRKIRSRPERSELVRMHILEEXSAEPSLQAKQLKLKRARLADDLNEKIAQRPGPMELVEKNILPVESSLKEAIIVGQVNYPKVADSSSFDEDSSDALSPEQPASHESQGSVPSPLEARVSEPLLSAXSASPXQVVSQLPMGRDSREMLFLAEQPPLPPPPLLPPSLXNGXXIPXAKSXPXLIKQSQPKSASEKSQRSKKAKELKPKVKKLKYHQYIPPDQKQDRGAPPMDSSYAKILQQQQLFLQLQILNQQQQQHHNYQAILPAPPKSAGEALGSSGXPPVRSLSXXNSSSSSGAPGPCGLARQNSXSLXGKPGALPANLDDMKVAELKQELKLRSLPVSGXKXELIERLRAYQDQISPVPGAPKAPAAXSILHKAGEVVVAFPAARLSXGPALVAAGLAPAEVVVAXVASSGVVKFGSXGSXPPVSPXPSERSLLSXGDENSXPGDXFGEMVXSPLXQLXLQASPLQILVKEEGPRAGSCCLSPGGRAELEGRDKDQMLQEKDKQIEALXRMLRQKQQLVERLKLQLEQEKRAQQPAPAPAPLGXPVKQENSFSSCQLSQQPLGPAHPFNPSLAAPAXNHIDPCAVAPGPPSVVVKQEALQPEPEPVPAPQLLLGPQGPSLIKGVAPPXLIXDSXGXHLVLXVXNKNADSPGLSSGSPQQPSSQPGSPAPAPSAQMDLEHPLQPLFGXPXSLLKKEPPGYEEAMSQQPKQQENGSSSQQMDDLFDILIQSGEISADFKEPPSLPGKEKPSPKXVCGSPLAAQPSPSAELPQAAPPPPGSPSLPGRLEDFLESSXGLPLLXSGHDGPEPLSLIDDLHSQMLSSXAILDHPPSPMDXSELHFVPEPSSXMGLDLADGHLDSMDWLELSSGGPVLSLAPLSXXAPSLFSXDFLDGHDLQLHWDSCL

SEQ ID NO: 16423 - protein, 73 aa, Homo sapiens
  MOD_RES (7)..(7): Selenocysteine
  MOD_RES (18)..(18): Selenocysteine
  MOD_RES (49)..(49): Selenocysteine
MRREGSXVLQLKLQQRRXREELVSQGIMPPLKSPAAFHEQRRSLERARXEDYLKRKIRSRPERSELVRMHILE

SEQ ID NO: 16424 - protein, 966 aa, Homo sapiens
  MOD_RES (2)..(2): Selenocysteine
  MOD_RES (26)..(26): Selenocysteine
  MOD_RES (57)..(57): Selenocysteine
  MOD_RES (83)..(83): Selenocysteine
  MOD_RES (188)..(188): Selenocysteine
  MOD_RES (193)..(193): Selenocysteine
  MOD_RES (228)..(228): Selenocysteine
  MOD_RES (231)..(232): Selenocysteine
  MOD_RES (235)..(235): Selenocysteine
  MOD_RES (239)..(239): Selenocysteine
  MOD_RES (241)..(241): Selenocysteine
  MOD_RES (340)..(340): Selenocysteine
  MOD_RES (348)..(349): Selenocysteine
  MOD_RES (369)..(369): Selenocysteine
  MOD_RES (372)..(372): Selenocysteine
  MOD_RES (404)..(404): Selenocysteine
  MOD_RES (406)..(406): Selenocysteine
  MOD_RES (432)..(432): Selenocysteine
  MOD_RES (452)..(452): Selenocysteine
  MOD_RES (470)..(470): Selenocysteine
  MOD_RES (482)..(482): Selenocysteine
  MOD_RES (485)..(485): Selenocysteine
  MOD_RES (491)..(491): Selenocysteine
  MOD_RES (500)..(500): Selenocysteine
  MOD_RES (506)..(506): Selenocysteine
  MOD_RES (510)..(510): Selenocysteine
  MOD_RES (516)..(516): Selenocysteine
  MOD_RES (520)..(520): Selenocysteine
  MOD_RES (523)..(523): Selenocysteine
  MOD_RES (573)..(573): Selenocysteine
  MOD_RES (608)..(608): Selenocysteine
  MOD_RES (641)..(641): Selenocysteine
  MOD_RES (692)..(692): Selenocysteine
  MOD_RES (695)..(695): Selenocysteine
  MOD_RES (698)..(698): Selenocysteine
  MOD_RES (700)..(700): Selenocysteine
  MOD_RES (705)..(705): Selenocysteine
  MOD_RES (707)..(707): Selenocysteine
  MOD_RES (751)..(751): Selenocysteine
  MOD_RES (753)..(753): Selenocysteine
  MOD_RES (816)..(816): Selenocysteine
  MOD_RES (857)..(857): Selenocysteine
  MOD_RES (863)..(863): Selenocysteine
  MOD_RES (886)..(886): Selenocysteine
  MOD_RES (898)..(898): Selenocysteine
  MOD_RES (910)..(910): Selenocysteine
  MOD_RES (942)..(943): Selenocysteine
  MOD_RES (950)..(950): Selenocysteine
MXLLEPEMLMMAVQSVLQLKLQQRRXREELVSQGIMPPLKSPAAFHEQRRSLERARXEDYLKRKIRSRPERSELVRMHILEEXSAEPSLQAKQLKLKRARLADDLNEKIAQRPGPMELVEKNILPVESSLKEAIIVGQVNYPKVADSSSFDEDSSDALSPEQPASHESQGSVPSPLEARVSEPLLSAXSASPXQVVSQLPMGRDSREMLFLAEQPPLPPPPLLPPSLXNGXXIPXAKSXPXLIKQSQPKSASEKSQRSKKAKELKPKVKKLKYHQYIPPDQKQDRGAPPMDSSYAKILQQQQLFLQLQILNQQQQQHHNYQAILPAPPKSAGEALGSSGXPPVRSLSXXNSSSSSGAPGPCGLARQNSXSLXGKPGALPANLDDMKVAELKQELKLRSLPVSGXKXELIERLRAYQDQISPVPGAPKAPAAXSILHKAGEVVVAFPAARLSXGPALVAAGLAPAEVVVAXVASSGVVKFGSXGSXPPVSPXPSERSLLSXGDENSXPGDXFGEMVXSPLXQLXLQASPLQILVKEEGPRAGSCCLSPGGRAELEGRDKDQMLQEKDKQIEALXRMLRQKQQLVERLKLQLEQEKRAQQPAPAPAPLGXPVKQENSFSSCQLSQQPLGPAHPFNPSLAAPAXNHIDPCAVAPGPPSVVVKQEALQPEPEPVPAPQLLLGPQGPSLIKGVAPPXLIXDSXGXHLVLXVXNKNADSPGLSSGSPQQPSSQPGSPAPAPSAQMDLEHPLQPLFGXPXSLLKKEPPGYEEAMSQQPKQQENGSSSQQMDDLFDILIQSGEISADFKEPPSLPGKEKPSPKXVCGSPLAAQPSPSAELPQAAPPPPGSPSLPGRLEDFLESSXGLPLLXSGHDGPEPLSLIDDLHSQMLSSXAILDHPPSPMDXSELHFVPEPSSXMGLDLADGHLDSMDWLELSSGGPVLSLAPLSXXAPSLFSXDFLDGHDLQLHWDSCL

SEQ ID NO: 16425 - protein, 170 aa, Homo sapiens
  MOD_RES (29)..(29): Selenocysteine
  MOD_RES (72)..(72): Selenocysteine
  MOD_RES (79)..(79): Selenocysteine
  MOD_RES (99)..(99): Selenocysteine
  MOD_RES (114)..(114): Selenocysteine
  MOD_RES (116)..(116): Selenocysteine
MAAGGAVAAAPECRLLPYALHKWSSFSSXYLPENILVDKPNDQSSRWSSESNYPPQYLILKLERPAIVQNIXFGKYEKXHVCNLKKFKVFGGMNEENMXELLSSGLKNDYNKEXFXLKHKIDEQMFPCRFIKIVPLLSWGPSFNFSIWYVELSGIDDPDIVQPCLNWYSK

SEQ ID NO: 16426 - protein, 735 aa, Homo sapiens
  MOD_RES (29)..(29): Selenocysteine
  MOD_RES (72)..(72): Selenocysteine
  MOD_RES (79)..(79): Selenocysteine
  MOD_RES (99)..(99): Selenocysteine
  MOD_RES (114)..(114): Selenocysteine
  MOD_RES (116)..(116): Selenocysteine
  MOD_RES (190)..(190): Selenocysteine
  MOD_RES (200)..(200): Selenocysteine
  MOD_RES (210)..(210): Selenocysteine
  MOD_RES (259)..(259): Selenocysteine
  MOD_RES (282)..(282): Selenocysteine
  MOD_RES (284)..(284): Selenocysteine
  MOD_RES (294)..(294): Selenocysteine
  MOD_RES (311)..(311): Selenocysteine
  MOD_RES (317)..(317): Selenocysteine
  MOD_RES (342)..(342): Selenocysteine
  MOD_RES (368)..(368): Selenocysteine
  MOD_RES (370)..(370): Selenocysteine
  MOD_RES (378)..(378): Selenocysteine
  MOD_RES (403)..(403): Selenocysteine
  MOD_RES (410)..(410): Selenocysteine
  MOD_RES (437)..(437): Selenocysteine
  MOD_RES (480)..(480): Selenocysteine
  MOD_RES (502)..(502): Selenocysteine
  MOD_RES (512)..(512): Selenocysteine
  MOD_RES (515)..(515): Selenocysteine
  MOD_RES (519)..(519): Selenocysteine
  MOD_RES (573)..(573): Selenocysteine
  MOD_RES (666)..(666): Selenocysteine
  MOD_RES (675)..(675): Selenocysteine
  MOD_RES (693)..(693): Selenocysteine
  MOD_RES (703)..(703): Selenocysteine
  MOD_RES (708)..(708): Selenocysteine
  MOD_RES (713)..(713): Selenocysteine
  MOD_RES (723)..(723): Selenocysteine
  MOD_RES (734)..(734): Selenocysteine
MAAGGAVAAAPECRLLPYALHKWSSFSSXYLPENILVDKPNDQSSRWSSESNYPPQYLILKLERPAIVQNIXFGKYEKXHVCNLKKFKVFGGMNEENMXELLSSGLKNDYNKEXFXLKHKIDEQMFPCRFIKIVPLLSWGPSFNFSIWYVELSGIDDPDIVQPCLNWYSKYREQEAIRLCLKHFRQHNYXEAFESLQKKXKIALEHPMLXDIHDKLVLKGDFDACEELIEKAVNDGLFNQYISQQEYKPRWSQIIPKSXKGDGEDNRPGMRGGHQMVIDVQXEXVYLFGGWDGXQDLADFWAYSVKENQWXCISRDXEKENGPSARSCHKMCIDIQRRQIYXLGRYLDSSVRNSKSLKSDFYRYDIDXNXWMLLSEDXAADGGPKLVFDHQMCMDSEKHMIYXFGGRILXCNGSVDDSRASEPQFSGLFAFNCQCQXWKLLREDSCNAGPEDIQSRIGHCMLFHSKNRCLYVFGGQRSKXYLNDFFSYDVDSDHVDIISDGXKKDSGMVPMXGFXQRAXIDPELNEIHVLSGLSKDKEKREENVRNSFWIYDIVRNSWSCVYKNDQAAKDNPXKSLQEEEPCPRFAHQLVYDELHKVHYLFGGNPGKSCSPKMRLDDFWSLKLCRPSKDYLLRHCKYLIRKHRFEEKAQVDPLSALKYLQNDLYIXVDHSDPEEXKEFQLLASALFKSGSDFXALGFSDVDHXYAQRXQLFDXLVNFFPDSMXPPKGNLVDLIXL

SEQ ID NO: 16427 - protein, 78 aa, Homo sapiens
  MOD_RES (7)..(7): Selenocysteine
  MOD_RES (22)..(22): Selenocysteine
  MOD_RES (24)..(24): Selenocysteine
MNEENMXELLSSGLKNDYNKEXFXLKHKIDEQMFPCRFIKIVPLLSWGPSFNFSIWYVELSGIDDPDIVQPCLNWYSK

SEQ ID NO: 16428 - protein, 97 aa, Homo sapiens
  MOD_RES (7)..(7): Selenocysteine
  MOD_RES (22)..(22): Selenocysteine
  MOD_RES (24)..(24): Selenocysteine
MNEENMXELLSSGLKNDYNKEXFXLKHKIDEQMFPCRFIKIVPLLSWGPSFNFSIWYVELSGIDDPDIVQPCLNWYSKYREQEAIRLCLKHFRQHNY

SEQ ID NO: 16429 - protein, 126 aa, Homo sapiens
  MOD_RES (7)..(7): Selenocysteine
  MOD_RES (22)..(22): Selenocysteine
  MOD_RES (24)..(24): Selenocysteine
  MOD_RES (98)..(98): Selenocysteine
  MOD_RES (108)..(108): Selenocysteine
  MOD_RES (118)..(118): Selenocysteine
MNEENMXELLSSGLKNDYNKEXFXLKHKIDEQMFPCRFIKIVPLLSWGPSFNFSIWYVELSGIDDPDIVQPCLNWYSKYREQEAIRLCLKHFRQHNYXEAFESLQKKXKIALEHPMLXDIHDKLVL

SEQ ID NO: 16430 - protein, 643 aa, Homo sapiens
  MOD_RES (7)..(7): Selenocysteine
  MOD_RES (22)..(22): Selenocysteine
  MOD_RES (24)..(24): Selenocysteine
  MOD_RES (98)..(98): Selenocysteine
  MOD_RES (108)..(108): Selenocysteine
  MOD_RES (118)..(118): Selenocysteine
  MOD_RES (167)..(167): Selenocysteine
  MOD_RES (190)..(190): Selenocysteine
  MOD_RES (192)..(192): Selenocysteine
  MOD_RES (202)..(202): Selenocysteine
  MOD_RES (219)..(219): Selenocysteine
  MOD_RES (225)..(225): Selenocysteine
  MOD_RES (250)..(250): Selenocysteine
  MOD_RES (276)..(276): Selenocysteine
  MOD_RES (278)..(278): Selenocysteine
  MOD_RES (286)..(286): Selenocysteine
  MOD_RES (311)..(311): Selenocysteine
  MOD_RES (318)..(318): Selenocysteine
  MOD_RES (345)..(345): Selenocysteine
  MOD_RES (388)..(388): Selenocysteine
  MOD_RES (410)..(410): Selenocysteine
  MOD_RES (420)..(420): Selenocysteine
  MOD_RES (423)..(423): Selenocysteine
  MOD_RES (427)..(427): Selenocysteine
  MOD_RES (481)..(481): Selenocysteine
  MOD_RES (574)..(574): Selenocysteine
  MOD_RES (583)..(583): Selenocysteine
  MOD_RES (601)..(601): Selenocysteine
  MOD_RES (611)..(611): Selenocysteine
  MOD_RES (616)..(616): Selenocysteine
  MOD_RES (621)..(621): Selenocysteine
  MOD_RES (631)..(631): Selenocysteine
  MOD_RES (642)..(642): Selenocysteine
MNEENMXELLSSGLKNDYNKEXFXLKHKIDEQMFPCRFIKIVPLLSWGPSFNFSIWYVELSGIDDPDIVQPCLNWYSKYREQEAIRLCLKHFRQHNYXEAFESLQKKXKIALEHPMLXDIHDKLVLKGDFDACEELIEKAVNDGLFNQYISQQEYKPRWSQIIPKSXKGDGEDNRPGMRGGHQMVIDVQXEXVYLFGGWDGXQDLADFWAYSVKENQWXCISRDXEKENGPSARSCHKMCIDIQRRQIYXLGRYLDSSVRNSKSLKSDFYRYDIDXNXWMLLSEDXAADGGPKLVFDHQMCMDSEKHMIYXFGGRILXCNGSVDDSRASEPQFSGLFAFNCQCQXWKLLREDSCNAGPEDIQSRIGHCMLFHSKNRCLYVFGGQRSKXYLNDFFSYDVDSDHVDIISDGXKKDSGMVPMXGFXQRAXIDPELNEIHVLSGLSKDKEKREENVRNSFWIYDIVRNSWSCVYKNDQAAKDNPXKSLQEEEPCPRFAHQLVYDELHKVHYLFGGNPGKSCSPKMRLDDFWSLKLCRPSKDYLLRHCKYLIRKHRFEEKAQVDPLSALKYLQNDLYIXVDHSDPEEXKEFQLLASALFKSGSDFXALGFSDVDHXYAQRXQLFDXLVNFFPDSMXPPKGNLVDLIXL

SEQ ID NO: 16431 - protein, 329 aa, Homo sapiens
  MOD_RES (16)..(16): Selenocysteine
  MOD_RES (34)..(34): Selenocysteine
  MOD_RES (68)..(68): Selenocysteine
  MOD_RES (110)..(110): Selenocysteine
  MOD_RES (113)..(114): Selenocysteine
  MOD_RES (118)..(119): Selenocysteine
  MOD_RES (136)..(136): Selenocysteine
  MOD_RES (140)..(140): Selenocysteine
  MOD_RES (249)..(249): Selenocysteine
  MOD_RES (259)..(259): Selenocysteine
  MOD_RES (263)..(263): Selenocysteine
  MOD_RES (327)..(327): Selenocysteine
MAKSMPSKSSRNKQGXVGVGCFERWRRCISVREXSSILAHIQKQKHFNEREASRVVRDVAAALDFLHXKGIAHRDLKPENILCESPEKVSPVKICDFDLGSGMKLNNSCXPIXXPELXXPCGSAEYMAPEVVEVFXDQAXFYDKRCDLWSLGVVLYIMLSGYPPFVGHCGADCGWDRGEVCRVCQNKLFESIQEGKYEFPDKDWAHISSEAKDLISKLLVRDAKQRLSAAQVLQHPWVQGQAPEKGLPXPQVLQRNSSXMDLXLFAAEAIALNRQLSQHEENELAEEPEALADGLCSMKLSPPCKSRLARRRALAQAGRGEDRSPPXAL

SEQ ID NO: 16432 - protein, 126 aa, Homo sapiens
  MOD_RES (18)..(18): Selenocysteine
  MOD_RES (25)..(25): Selenocysteine
  MOD_RES (35)..(35): Selenocysteine
  MOD_RES (42)..(42): Selenocysteine
  MOD_RES (47)..(47): Selenocysteine
  MOD_RES (107)..(107): Selenocysteine
  MOD_RES (121)..(121): Selenocysteine
MILGHCSLDLLGSSNPPXSASQAAXGFHVRGRWRXEDCHLRXKAIEXLRVAGRHQLPDRSFISFGISSLQMVSSQKLEKPIEMGSSEPLPIADGDRRRKKKRRGRAXDSLPGKFEDMYKLXSELLG

SEQ ID NO: 16433 - protein, 56 aa, Homo sapiens
  MOD_RES (37)..(37): Selenocysteine
  MOD_RES (50)..(50): Selenocysteine
MVSSQKLEKPIEMGSSEPLPIADGDRRRKKKRRGRAXDSLPGKFEDHREXSRAQSE

SEQ ID NO: 16434 - protein, 100 aa, Homo sapiens
  MOD_RES (37)..(37): Selenocysteine
  MOD_RES (51)..(51): Selenocysteine
  MOD_RES (97)..(97): Selenocysteine
MVSSQKLEKPIEMGSSEPLPIADGDRRRKKKRRGRAXDSLPGKFEDMYKLXSELLGEGAYAKVQGAVSLQNGKEYAVKIIEKQAGHSRSRVFREVEXLYQ

SEQ ID NO: 16435 - protein, 101 aa, Homo sapiens
  MOD_RES (37)..(37): Selenocysteine
  MOD_RES (51)..(51): Selenocysteine
  MOD_RES (97)..(97): Selenocysteine
MVSSQKLEKPIEMGSSEPLPIADGDRRRKKKRRGRAXDSLPGKFEDMYKLXSELLGEGAYAKVQGAVSLQNGKEYAVKIIEKQAGHSRSRVFREVEXLYQC

SEQ ID NO: 16436 - protein, 118 aa, Homo sapiens
  MOD_RES (37)..(37): Selenocysteine
  MOD_RES (51)..(51): Selenocysteine
  MOD_RES (97)..(97): Selenocysteine
MVSSQKLEKPIEMGSSEPLPIADGDRRRKKKRRGRAXDSLPGKFEDMYKLXSELLGEGAYAKVQGAVSLQNGKEYAVKIIEKQAGHSRSRVFREVEXLYQCQGNKFHLSPHPEAKALQ

SEQ ID NO: 16437 - protein, 465 aa, Homo sapiens
  MOD_RES (37)..(37): Selenocysteine
  MOD_RES (51)..(51): Selenocysteine
  MOD_RES (97)..(97): Selenocysteine
  MOD_RES (118)..(118): Selenocysteine
  MOD_RES (163)..(163): Selenocysteine
  MOD_RES (183)..(183): Selenocysteine
  MOD_RES (187)..(187): Selenocysteine
  MOD_RES (196)..(196): Selenocysteine
  MOD_RES (204)..(205): Selenocysteine
  MOD_RES (246)..(246): Selenocysteine
  MOD_RES (249)..(250): Selenocysteine
  MOD_RES (254)..(255): Selenocysteine
  MOD_RES (272)..(272): Selenocysteine
  MOD_RES (276)..(276): Selenocysteine
  MOD_RES (385)..(385): Selenocysteine
  MOD_RES (395)..(395): Selenocysteine
  MOD_RES (399)..(399): Selenocysteine
  MOD_RES (463)..(463): Selenocysteine
MVSSQKLEKPIEMGSSEPLPIADGDRRRKKKRRGRAXDSLPGKFEDMYKLXSELLGEGAYAKVQGAVSLQNGKEYAVKIIEKQAGHSRSRVFREVEXLYQCQGNKNILELIEFFEDDXRFYLVFEKLQGGSILAHIQKQKHFNEREASRVVRDVAAALDFLHXKDKVSLCHLGWSAMAPSGLXAAPXSLGSSDPPXSASQVAGXXGIAHRDLKPENILCESPEKVSPVKICDFDLGSGMKLNNSCXPIXXPELXXPCGSAEYMAPEVVEVFXDQAXFYDKRCDLWSLGVVLYIMLSGYPPFVGHCGADCGWDRGEVCRVCQNKLFESIQEGKYEFPDKDWAHISSEAKDLISKLLVRDAKQRLSAAQVLQHPWVQGQAPEKGLPXPQVLQRNSSXMDLXLFAAEAIALNRQLSQHEENELAEEPEALADGLCSMKLSPPCKSRLARRRALAQAGRGEDRSPPXAL

SEQ ID NO: 16438 - protein, 178 aa, Homo sapiens
  MOD_RES (37)..(37): Selenocysteine
  MOD_RES (51)..(51): Selenocysteine
  MOD_RES (97)..(97): Selenocysteine
  MOD_RES (118)..(118): Selenocysteine
  MOD_RES (163)..(163): Selenocysteine
MVSSQKLEKPIEMGSSEPLPIADGDRRRKKKRRGRAXDSLPGKFEDMYKLXSELLGEGAYAKVQGAVSLQNGKEYAVKIIEKQAGHSRSRVFREVEXLYQCQGNKNILELIEFFEDDXRFYLVFEKLQGGSILAHIQKQKHFNEREASRVVRDVAAALDFLHXKGIAHRDLKPENILC

SEQ ID NO: 16439 - protein, 347 aa, Homo sapiens
  MOD_RES (37)..(37): Selenocysteine
  MOD_RES (51)..(51): Selenocysteine
  MOD_RES (97)..(97): Selenocysteine
  MOD_RES (118)..(118): Selenocysteine
  MOD_RES (163)..(163): Selenocysteine
  MOD_RES (205)..(205): Selenocysteine
  MOD_RES (208)..(209): Selenocysteine
  MOD_RES (213)..(214): Selenocysteine
  MOD_RES (231)..(231): Selenocysteine
  MOD_RES (235)..(235): Selenocysteine
MVSSQKLEKPIEMGSSEPLPIADGDRRRKKKRRGRAXDSLPGKFEDMYKLXSELLGEGAYAKVQGAVSLQNGKEYAVKIIEKQAGHSRSRVFREVEXLYQCQGNKNILELIEFFEDDXRFYLVFEKLQGGSILAHIQKQKHFNEREASRVVRDVAAALDFLHXKGIAHRDLKPENILCESPEKVSPVKICDFDLGSGMKLNNSCXPIXXPELXXPCGSAEYMAPEVVEVFXDQAXFYDKRCDLWSLGVVLYIMLSGYPPFVGHCGADCGWDRGEVCRVCQNKLFESIQEGKYEFPDKDWAHISSEAKDLISKLLVRDAKQRLSAAQVLQHPWVQGEQQHNGPDALRS

SEQ ID NO: 16440 - protein, 424 aa, Homo sapiens
  MOD_RES (37)..(37): Selenocysteine
  MOD_RES (51)..(51): Selenocysteine
  MOD_RES (97)..(97): Selenocysteine
  MOD_RES (118)..(118): Selenocysteine
  MOD_RES (163)..(163): Selenocysteine
  MOD_RES (205)..(205): Selenocysteine
  MOD_RES (208)..(209): Selenocysteine
  MOD_RES (213)..(214): Selenocysteine
  MOD_RES (231)..(231): Selenocysteine
  MOD_RES (235)..(235): Selenocysteine
  MOD_RES (344)..(344): Selenocysteine
  MOD_RES (354)..(354): Selenocysteine
  MOD_RES (358)..(358): Selenocysteine
  MOD_RES (422)..(422): Selenocysteine
MVSSQKLEKPIEMGSSEPLPIADGDRRRKKKRRGRAXDSLPGKFEDMYKLXSELLGEGAYAKVQGAVSLQNGKEYAVKIIEKQAGHSRSRVFREVEXLYQCQGNKNILELIEFFEDDXRFYLVFEKLQGGSILAHIQKQKHFNEREASRVVRDVAAALDFLHXKGIAHRDLKPENILCESPEKVSPVKICDFDLGSGMKLNNSCXPIXXPELXXPCGSAEYMAPEVVEVFXDQAXFYDKRCDLWSLGVVLYIMLSGYPPFVGHCGADCGWDRGEVCRVCQNKLFESIQEGKYEFPDKDWAHISSEAKDLISKLLVRDAKQRLSAAQVLQHPWVQGQAPEKGLPXPQVLQRNSSXMDLXLFAAEAIALNRQLSQHEENELAEEPEALADGLCSMKLSPPCKSRLARRRALAQAGRGEDRSPPXAL

SEQ ID NO: 16441 - protein, 91 aa, Homo sapiens
  MOD_RES (37)..(37): Selenocysteine
  MOD_RES (51)..(51): Selenocysteine
MVSSQKLEKPIEMGSSEPLPIADGDRRRKKKRRGRAXDSLPGKFEDMYKLXSELLGEGAYAKVQGAVSLQNGKEYAVKVSVSAECQALLCK

SEQ ID NO: 16442 - protein, 60 aa, Homo sapiens
  MOD_RES (37)..(37): Selenocysteine
MVSSQKLEKPIEMGSSEPLPIADGDRRRKKKRRGRAXDSLPGKFEDVILPSAIPGGAAER

SEQ ID NO: 16443 - protein, 37 aa, Homo sapiens
  MOD_RES (15)..(16): Selenocysteine
  MOD_RES (27)..(27): Selenocysteine
  MOD_RES (34)..(34): Selenocysteine
MVSSQKLEKPIVSEXXLQVPFPRKVLXICPFWRXLFH

SEQ ID NO: 16444 - protein, 85 aa, Homo sapiens
  MOD_RES (1)..(1): Any amino acid
  MOD_RES (2)..(2): Selenocysteine
  MOD_RES (6)..(7): Selenocysteine
  MOD_RES (24)..(24): Selenocysteine
  MOD_RES (28)..(28): Selenocysteine
XXPELXXPCGSAEYMAPEVVEVFXDQAXFYDKRCDLWSLGVVLYIMLSGYPPFVGHCGADCGWDRGEVCRVCQEQQHNGPDALRS

SEQ ID NO: 16445 - protein, 129 aa, Homo sapiens
  MOD_RES (120)..(120): Selenocysteine
  MOD_RES (123)..(123): Selenocysteine
MAPEVVEAFSEEASIYDKRCDLWSLGVILYILLSGYPPFVGRCGSDCGWDRGEACPACQNMLFESIQEGKYEFPDKDWAHISCAAKDLISKLLVRDAKQRLSAAQVLQHPWVQGCAPENXLPXPMVLQR

SEQ ID NO: 16446 - protein, 158 aa, Homo sapiens
  MOD_RES (120)..(120): Selenocysteine
  MOD_RES (123)..(123): Selenocysteine
  MOD_RES (153)..(153): Selenocysteine
  MOD_RES (155)..(155): Selenocysteine
MAPEVVEAFSEEASIYDKRCDLWSLGVILYILLSGYPPFVGRCGSDCGWDRGEACPACQNMLFESIQEGKYEFPDKDWAHISCAAKDLISKLLVRDAKQRLSAAQVLQHPWVQGCAPENXLPXPMVLQRWDSHFLLPPHPCRIHVRPGGLVRXVXVNE

SEQ ID NO: 16447 - protein, 82 aa, Homo sapiens
  MOD_RES (72)..(72): Selenocysteine
MVQKKPAELQGFHRSFKGQNPFELAFSLDQPDHGDSDFGLQCSARPDMPASQPIDIPDAKKRGKKKKRGRAXDSFSGRFEDH

SEQ ID NO: 16448 - protein, 414 aa, Homo sapiens
  MOD_RES (72)..(72): Selenocysteine
  MOD_RES (100)..(100): Selenocysteine
  MOD_RES (106)..(106): Selenocysteine
  MOD_RES (244)..(244): Selenocysteine
  MOD_RES (249)..(249): Selenocysteine
  MOD_RES (376)..(376): Selenocysteine
  MOD_RES (379)..(379): Selenocysteine
  MOD_RES (409)..(409): Selenocysteine
  MOD_RES (411)..(411): Selenocysteine
MVQKKPAELQGFHRSFKGQNPFELAFSLDQPDHGDSDFGLQCSARPDMPASQPIDIPDAKKRGKKKKRGRAXDSFSGRFEDVYQLQEDVLGEGAHARVQXCINLIXSQEYAVKIIEKQPGHIRSRVFREVEMLYQCQGHRNVLELIEFFEEEDRFYLVFEKMRGGSILSHIHKRRHFNELEASVVVQDVASALDFLHNKGIAHRDLKPENILCEHPNQVSPVKICDFDLGSGIKLNGDCSPISXPELLXPCGSAEYMAPEVVEAFSEEASIYDKRCDLWSLGVILYILLSGYPPFVGRCGSDCGWDRGEACPACQNMLFESIQEGKYEFPDKDWAHISCAAKDLISKLLVRDAKQRLSAAQVLQHPWVQGCAPENXLPXPMVLQRWDSHFLLPPHPCRIHVRPGGLVRXVXVNE

SEQ ID NO: 16449 - protein, 465 aa, Homo sapiens
  MOD_RES (72)..(72): Selenocysteine
  MOD_RES (100)..(100): Selenocysteine
  MOD_RES (106)..(106): Selenocysteine
  MOD_RES (244)..(244): Selenocysteine
  MOD_RES (249)..(249): Selenocysteine
  MOD_RES (376)..(376): Selenocysteine
  MOD_RES (379)..(379): Selenocysteine
  MOD_RES (393)..(393): Selenocysteine
  MOD_RES (430)..(430): Selenocysteine
MVQKKPAELQGFHRSFKGQNPFELAFSLDQPDHGDSDFGLQCSARPDMPASQPIDIPDAKKRGKKKKRGRAXDSFSGRFEDVYQLQEDVLGEGAHARVQXCINLIXSQEYAVKIIEKQPGHIRSRVFREVEMLYQCQGHRNVLELIEFFEEEDRFYLVFEKMRGGSILSHIHKRRHFNELEASVVVQDVASALDFLHNKGIAHRDLKPENILCEHPNQVSPVKICDFDLGSGIKLNGDCSPISXPELLXPCGSAEYMAPEVVEAFSEEASIYDKRCDLWSLGVILYILLSGYPPFVGRCGSDCGWDRGEACPACQNMLFESIQEGKYEFPDKDWAHISCAAKDLISKLLVRDAKQRLSAAQVLQHPWVQGCAPENXLPXPMVLQRNSCAKDLXSFAAEAIAMNRQLAQHDEDLAEEEAAGQGQPVLVRAXSRCLQLSPPSQSKLAQRRQRASLSSAPVVLVGDHA

SEQ ID NO: 16450 - protein, 74 aa, Homo sapiens
  MOD_RES (56)..(56): Selenocysteine
MVQKKPAELQGFHRSFKGQNPFELAFSLDQPDHGDSDFGLQCSARPGEGPEGEEGXGQLLSLPWQWPAPAGGWG

SEQ ID NO: 16451 - protein, 76 aa, Homo sapiens
  MOD_RES (56)..(56): Selenocysteine
MVQKKPAELQGFHRSFKGQNPFELAFSLDQPDHGDSDFGLQCSARPGEGPEGEEGXGQLLSLPWQWPAPAGGWGHA

SEQ ID NO: 16452 - protein, 176 aa, Homo sapiens
  MOD_RES (35)..(35): Selenocysteine
  MOD_RES (40)..(40): Selenocysteine
  MOD_RES (167)..(167): Selenocysteine
  MOD_RES (170)..(170): Selenocysteine
NILCEHPNQVSPVKICDFDLGSGIKLNGDCSPISXPELLXPCGSAEYMAPEVVEAFSEEASIYDKRCDLWSLGVILYILLSGYPPFVGRCGSDCGWDRGEACPACQNMLFESIQEGKYEFPDKDWAHISCAAKDLISKLLVRDAKQRLSAAQVLQHPWVQGCAPENXLPXPMVLQR

SEQ ID NO: 16453 - protein, 43 aa, Homo sapiens
  MOD_RES (1)..(1): Any amino acid
  MOD_RES (3)..(3): Selenocysteine
  MOD_RES (14)..(14): Selenocysteine
  MOD_RES (18)..(18): Selenocysteine
  MOD_RES (20)..(20): Selenocysteine
  MOD_RES (23)..(23): Selenocysteine
  MOD_RES (30)..(30): Selenocysteine
  MOD_RES (39)..(39): Selenocysteine
XRXCCLRASRRASXSSPXRXGPXSPALPKXSSPSCWSVXPSRG

SEQ ID NO: 16454 - protein, 211 aa, Homo sapiens
  MOD_RES (5)..(5): Selenocysteine
  MOD_RES (42)..(42): Selenocysteine
  MOD_RES (47)..(47): Selenocysteine
  MOD_RES (81)..(81): Selenocysteine
  MOD_RES (96)..(96): Selenocysteine
  MOD_RES (98)..(98): Selenocysteine
  MOD_RES (100)..(101): Selenocysteine
  MOD_RES (117)..(117): Selenocysteine
  MOD_RES (164)..(164): Selenocysteine
  MOD_RES (185)..(185): Selenocysteine
  MOD_RES (187)..(187): Selenocysteine
LWKYXIDNVSPHAQPEEEERERRVFKDLYGRHKEYLSSLVGXDFEMXVPGALRLFVNGEVVSAQGYEYDNLYVHFFVELPXAHWSSPAFQQLSGVXQXCXXKSLAMDKVAHFSYPFXFEAFFLHEDESSDALPEWPVLYCEVLSLDFWQRYRVEGYGAVVLPAXPGNRSSLPFCGPHALGPKNKXNXRMLLVRGGDNWELEMFGLKEFLFL

SEQ ID NO: 16455 - protein, 164 aa, Homo sapiens
  MOD_RES (4)..(4): Selenocysteine
  MOD_RES (8)..(8): Selenocysteine
  MOD_RES (10)..(10): Selenocysteine
  MOD_RES (34)..(34): Selenocysteine
  MOD_RES (56)..(56): Selenocysteine
  MOD_RES (62)..(62): Selenocysteine
  MOD_RES (97)..(97): Selenocysteine
  MOD_RES (127)..(127): Selenocysteine
  MOD_RES (129)..(129): Selenocysteine
  MOD_RES (135)..(135): Selenocysteine
  MOD_RES (147)..(147): Selenocysteine
MAEXVWSXDXGEAVYRSRDPVRNLRLRVHLQRIXSSNFLHYQPAAELGKDLIDLAXFRPQPXASGHRPEEDEEEEIVIGWQEKLFSQFEVDLYQNEXACQSPLDYQYRQEILKLENSGGKKNRRIFXYXDSDRYXNLEEGGRHPQVXHRHLGALRRVCQEQPRH

SEQ ID NO: 16456 - protein, 456 aa, Homo sapiens
  MOD_RES (4)..(4): Selenocysteine
  MOD_RES (8)..(8): Selenocysteine
  MOD_RES (10)..(10): Selenocysteine
  MOD_RES (34)..(34): Selenocysteine
  MOD_RES (56)..(56): Selenocysteine
  MOD_RES (62)..(62): Selenocysteine
  MOD_RES (97)..(97): Selenocysteine
  MOD_RES (127)..(127): Selenocysteine
  MOD_RES (129)..(129): Selenocysteine
  MOD_RES (135)..(135): Selenocysteine
  MOD_RES (145)..(146): Selenocysteine
  MOD_RES (183)..(183): Selenocysteine
  MOD_RES (199)..(199): Selenocysteine
  MOD_RES (203)..(203): Selenocysteine
  MOD_RES (227)..(227): Selenocysteine
  MOD_RES (237)..(237): Selenocysteine
  MOD_RES (243)..(243): Selenocysteine
  MOD_RES (253)..(253): Selenocysteine
  MOD_RES (264)..(264): Selenocysteine
  MOD_RES (301)..(301): Selenocysteine
  MOD_RES (306)..(306): Selenocysteine
  MOD_RES (340)..(340): Selenocysteine
  MOD_RES (355)..(355): Selenocysteine
  MOD_RES (357)..(357): Selenocysteine
  MOD_RES (359)..(360): Selenocysteine
  MOD_RES (376)..(376): Selenocysteine
  MOD_RES (423)..(423): Selenocysteine
  MOD_RES (442)..(442): Selenocysteine
  MOD_RES (454)..(454): Selenocysteine
MAEXVWSXDXGEAVYRSRDPVRNLRLRVHLQRIXSSNFLHYQPAAELGKDLIDLAXFRPQPXASGHRPEEDEEEEIVIGWQEKLFSQFEVDLYQNEXACQSPLDYQYRQEILKLENSGGKKNRRIFXYXDSDRYXNLEEHCQRMXXAASEVPSFLVERMANVRRRRQDRRGMEGGILKSRIVXWEPSEEFVRNNHVINXPLQXMHIMADLGPYKKLGYKKYEHVLCXLKVDSNGVIXVKPDFXGLKGPYRIEXEGEKQELWKYXIDNVSPHAQPEEEERERRVFKDLYGRHKEYLSSLVGXDFEMXVPGALRLFVNGEVVSAQGYEYDNLYVHFFVELPXAHWSSPAFQQLSGVXQXCXXKSLAMDKVAHFSYPFXFEAFFLHEDESSDALPEWPVLYCEVLSLDFWQRYRVEGYGAVVLPAXPGPSWNRAPFRKGCGVCWXVWKGSASRVPFXMC

SEQ ID NO: 16457 - protein, 559 aa, Homo sapiens
  MOD_RES (4)..(4): Selenocysteine
  MOD_RES (8)..(8): Selenocysteine
  MOD_RES (10)..(10): Selenocysteine
  MOD_RES (34)..(34): Selenocysteine
  MOD_RES (56)..(56): Selenocysteine
  MOD_RES (62)..(62): Selenocysteine
  MOD_RES (97)..(97): Selenocysteine
  MOD_RES (127)..(127): Selenocysteine
  MOD_RES (129)..(129): Selenocysteine
  MOD_RES (135)..(135): Selenocysteine
  MOD_RES (145)..(146): Selenocysteine
  MOD_RES (183)..(183): Selenocysteine
  MOD_RES (199)..(199): Selenocysteine
  MOD_RES (203)..(203): Selenocysteine
  MOD_RES (227)..(227): Selenocysteine
  MOD_RES (237)..(237): Selenocysteine
  MOD_RES (243)..(243): Selenocysteine
  MOD_RES (253)..(253): Selenocysteine
  MOD_RES (264)..(264): Selenocysteine
  MOD_RES (301)..(301): Selenocysteine
  MOD_RES (306)..(306): Selenocysteine
  MOD_RES (340)..(340): Selenocysteine
  MOD_RES (355)..(355): Selenocysteine
  MOD_RES (357)..(357): Selenocysteine
  MOD_RES (359)..(360): Selenocysteine
  MOD_RES (376)..(376): Selenocysteine
  MOD_RES (423)..(423): Selenocysteine
  MOD_RES (428)..(428): Selenocysteine
  MOD_RES (430)..(430): Selenocysteine
  MOD_RES (433)..(433): Selenocysteine
  MOD_RES (441)..(441): Selenocysteine
  MOD_RES (480)..(480): Selenocysteine
  MOD_RES (482)..(483): Selenocysteine
  MOD_RES (485)..(485): Selenocysteine
  MOD_RES (487)..(487): Selenocysteine
  MOD_RES (556)..(556): Selenocysteine
MAEXVWSXDXGEAVYRSRDPVRNLRLRVHLQRIXSSNFLHYQPAAELGKDLIDLAXFRPQPXASGHRPEEDEEEEIVIGWQEKLFSQFEVDLYQNEXACQSPLDYQYRQEILKLENSGGKKNRRIFXYXDSDRYXNLEEHCQRMXXAASEVPSFLVERMANVRRRRQDRRGMEGGILKSRIVXWEPSEEFVRNNHVINXPLQXMHIMADLGPYKKLGYKKYEHVLCXLKVDSNGVIXVKPDFXGLKGPYRIEXEGEKQELWKYXIDNVSPHAQPEEEERERRVFKDLYGRHKEYLSSLVGXDFEMXVPGALRLFVNGEVVSAQGYEYDNLYVHFFVELPXAHWSSPAFQQLSGVXQXCXXKSLAMDKVAHFSYPFXFEAFFLHEDESSDALPEWPVLYCEVLSLDFWQRYRVEGYGAVVLPAXPGSHXLXVSXWRPVELGXVAELRRFFIGGSLELEDLSYVRIPGSFKGERLSRFGLRXEXXGXVXFRLHCLQQSRAFMESSSLQKRMRSVLDRLEGFSQQSSIHNVLEAFRRARRRMQEARESLPQDLVSPSGXLVS

SEQ ID NO: 16458 - protein, 146 aa, Homo sapiens
  MOD_RES (4)..(4): Selenocysteine
  MOD_RES (8)..(8): Selenocysteine
  MOD_RES (10)..(10): Selenocysteine
  MOD_RES (34)..(34): Selenocysteine
  MOD_RES (56)..(56): Selenocysteine
  MOD_RES (62)..(62): Selenocysteine
  MOD_RES (97)..(97): Selenocysteine
  MOD_RES (127)..(127): Selenocysteine
  MOD_RES (129)..(129): Selenocysteine
  MOD_RES (135)..(135): Selenocysteine
MAEXVWSXDXGEAVYRSRDPVRNLRLRVHLQRIXSSNFLHYQPAAELGKDLIDLAXFRPQPXASGHRPEEDEEEEIVIGWQEKLFSQFEVDLYQNEXACQSPLDYQYRQEILKLENSGGKKNRRIFXYXDSDRYXNLEEVLGSMWP

SEQ ID NO: 16459 - protein, 121 aa, Homo sapiens
  MOD_RES (4)..(4): Selenocysteine
  MOD_RES (8)..(8): Selenocysteine
  MOD_RES (10)..(10): Selenocysteine
  MOD_RES (34)..(34): Selenocysteine
  MOD_RES (56)..(56): Selenocysteine
  MOD_RES (62)..(62): Selenocysteine
  MOD_RES (64)..(64): Selenocysteine
  MOD_RES (104)..(104): Selenocysteine
MAEXVWSXDXGEAVYRSRDPVRNLRLRVHLQRIXSSNFLHYQPAAELGKDLIDLAXFRPQPXAXLSENDHCSQRGAFILGRANGKCQASPAGQARDGGRHPQVXHRHLGALRRVCQEQPRH

SEQ ID NO: 16460 - protein, 48 aa, Homo sapiens
  MOD_RES (4)..(4): Selenocysteine
  MOD_RES (8)..(8): Selenocysteine
  MOD_RES (10)..(10): Selenocysteine
  MOD_RES (29)..(29): Selenocysteine
MAEXVWSXDXGEAVYRSRDPVRNLRLRWXPPRGRRRGGDCDWVAGEAL

SEQ ID NO: 16461 - protein, 549 aa, Homo sapiens
  MOD_RES (12)..(12): Selenocysteine
  MOD_RES (24)..(24): Selenocysteine
  MOD_RES (46)..(46): Selenocysteine
  MOD_RES (52)..(52): Selenocysteine
  MOD_RES (87)..(87): Selenocysteine
  MOD_RES (117)..(117): Selenocysteine
  MOD_RES (119)..(119): Selenocysteine
  MOD_RES (125)..(125): Selenocysteine
  MOD_RES (135)..(136): Selenocysteine
  MOD_RES (173)..(173): Selenocysteine
  MOD_RES (189)..(189): Selenocysteine
  MOD_RES (193)..(193): Selenocysteine
  MOD_RES (217)..(217): Selenocysteine
  MOD_RES (227)..(227): Selenocysteine
  MOD_RES (233)..(233): Selenocysteine
  MOD_RES (243)..(243): Selenocysteine
  MOD_RES (254)..(254): Selenocysteine
  MOD_RES (291)..(291): Selenocysteine
  MOD_RES (296)..(296): Selenocysteine
  MOD_RES (330)..(330): Selenocysteine
  MOD_RES (345)..(345): Selenocysteine
  MOD_RES (347)..(347): Selenocysteine
  MOD_RES (349)..(350): Selenocysteine
  MOD_RES (366)..(366): Selenocysteine
  MOD_RES (413)..(413): Selenocysteine
  MOD_RES (418)..(418): Selenocysteine
  MOD_RES (420)..(420): Selenocysteine
  MOD_RES (423)..(423): Selenocysteine
  MOD_RES (431)..(431): Selenocysteine
  MOD_RES (470)..(470): Selenocysteine
  MOD_RES (472)..(473): Selenocysteine
  MOD_RES (475)..(475): Selenocysteine
  MOD_RES (477)..(477): Selenocysteine
  MOD_RES (546)..(546): Selenocysteine
MAVPVSSFAQRXRSRFRVHLQRIXSSNFLHYQPAAELGKDLIDLAXFRPQPXASGHRPEEDEEEEIVIGWQEKLFSQFEVDLYQNEXACQSPLDYQYRQEILKLENSGGKKNRRIFXYXDSDRYXNLEEHCQRMXXAASEVPSFLVERMANVRRRRQDRRGMEGGILKSRIVXWEPSEEFVRNNHVINXPLQXMHIMADLGPYKKLGYKKYEHVLCXLKVDSNGVIXVKPDFXGLKGPYRIEXEGEKQELWKYXIDNVSPHAQPEEEERERRVFKDLYGRHKEYLSSLVGXDFEMXVPGALRLFVNGEVVSAQGYEYDNLYVHFFVELPXAHWSSPAFQQLSGVXQXCXXKSLAMDKVAHFSYPFXFEAFFLHEDESSDALPEWPVLYCEVLSLDFWQRYRVEGYGAVVLPAXPGSHXLXVSXWRPVELGXVAELRRFFIGGSLELEDLSYVRIPGSFKGERLSRFGLRXEXXGXVXFRLHCLQQSRAFMESSSLQKRMRSVLDRLEGFSQQSSIHNVLEAFRRARRRMQEARESLPQDLVSPSGXLVS

SEQ ID NO: 16462 - protein, 117 aa, Homo sapiens
  MOD_RES (1)..(1): Any amino acid
  MOD_RES (25)..(25): Selenocysteine
  MOD_RES (40)..(40): Selenocysteine
  MOD_RES (42)..(42): Selenocysteine
  MOD_RES (44)..(45): Selenocysteine
  MOD_RES (61)..(61): Selenocysteine
  MOD_RES (108)..(108): Selenocysteine
  MOD_RES (111)..(111): Selenocysteine
  MOD_RES (113)..(113): Selenocysteine
XGEVVSAQGYEYDNLYVHFFVELPXAHWSSPAFQQLSGVXQXCXXKSLAMDKVAHFSYPFXFEAFFLHEDESSDALPEWPVLYCEVLSLDFWQRYRVEGYGAVVLPAXPAXMXWPWH

SEQ ID NO: 16463 - protein, 228 aa, Homo sapiens
  MOD_RES (1)..(1): Any amino acid
  MOD_RES (9)..(9): Selenocysteine
  MOD_RES (25)..(25): Selenocysteine
  MOD_RES (29)..(29): Selenocysteine
  MOD_RES (53)..(53): Selenocysteine
  MOD_RES (63)..(63): Selenocysteine
  MOD_RES (69)..(69): Selenocysteine
  MOD_RES (79)..(79): Selenocysteine
  MOD_RES (90)..(90): Selenocysteine
  MOD_RES (127)..(127): Selenocysteine
  MOD_RES (132)..(132): Selenocysteine
  MOD_RES (166)..(166): Selenocysteine
  MOD_RES (181)..(181): Selenocysteine
  MOD_RES (183)..(183): Selenocysteine
  MOD_RES (185)..(186): Selenocysteine
  MOD_RES (193)..(193): Selenocysteine
  MOD_RES (198)..(198): Selenocysteine
  MOD_RES (201)..(201): Selenocysteine
  MOD_RES (212)..(212): Selenocysteine
XILKSRIVXWEPSEEFVRNNHVINXPLQXMHIMADLGPYKKLGYKKYEHVLCXLKVDSNGVIXVKPDFXGLKGPYRIEXEGEKQELWKYXIDNVSPHAQPEEEERERRVFKDLYGRHKEYLSSLVGXDFEMXVPGALRLFVNGEVVSAQGYEYDNLYVHFFVELPXAHWSSPAFQQLSGVXQXCXXKSLAMIXLSLAXRRXDSKGGLAHPMXLLFIGQGGSLLLPIHV

SEQ ID NO: 16464 - protein, 58 aa, Homo sapiens
  MOD_RES (3)..(3): Selenocysteine
MNXIVFNKLSGAVLFEDGGASERERGGRPYSGVLDSPHARPEVGIPDGPPLKDNLGLR

SEQ ID NO: 16465 - protein, 290 aa, Homo sapiens
  MOD_RES (3)..(3): Selenocysteine
  MOD_RES (62)..(62): Selenocysteine
  MOD_RES (99)..(99): Selenocysteine
  MOD_RES (101)..(101): Selenocysteine
  MOD_RES (113)..(113): Selenocysteine
  MOD_RES (131)..(131): Selenocysteine
  MOD_RES (175)..(175): Selenocysteine
  MOD_RES (184)..(184): Selenocysteine
  MOD_RES (237)..(237): Selenocysteine
  MOD_RES (239)..(240): Selenocysteine
  MOD_RES (245)..(245): Selenocysteine
  MOD_RES (271)..(271): Selenocysteine
  MOD_RES (279)..(279): Selenocysteine
MNXIVFNKLSGAVLFEDGGASERERGGRPYSGVLDSPHARPEVGIPDGPPLKDNLGLRHRRXGARQNGGKVRHKRQALQDMARPLKQWLYKHRDNPYPXKXEKILLALGSQMXLVQVSNWFANARRRLKNXVRQPDLSWALRIKLYNKYVQGNAERLSVSSDDSCSEDGENPPRXHMNEGGYNXPVHHPVIKSENSVIKAGVRPESRASEDYVAPPKYKSSLLNRYLNDSLRHVMAXNXXMMGKXRQRNHSGSFSSNEFEEELVSPSSSEXEGNFVYRXVENLGSLSEDS

SEQ ID NO: 16466 - protein, 352 aa, Homo sapiens
  MOD_RES (3)..(3): Selenocysteine
  MOD_RES (62)..(62): Selenocysteine
  MOD_RES (99)..(99): Selenocysteine
  MOD_RES (101)..(101): Selenocysteine
  MOD_RES (113)..(113): Selenocysteine
  MOD_RES (131)..(131): Selenocysteine
  MOD_RES (175)..(175): Selenocysteine
  MOD_RES (184)..(184): Selenocysteine
  MOD_RES (237)..(237): Selenocysteine
  MOD_RES (239)..(240): Selenocysteine
  MOD_RES (245)..(245): Selenocysteine
  MOD_RES (271)..(271): Selenocysteine
  MOD_RES (279)..(279): Selenocysteine
  MOD_RES (281)..(281): Selenocysteine
  MOD_RES (303)..(303): Selenocysteine
  MOD_RES (315)..(315): Selenocysteine
  MOD_RES (327)..(328): Selenocysteine
  MOD_RES (343)..(343): Selenocysteine
MNXIVFNKLSGAVLFEDGGASERERGGRPYSGVLDSPHARPEVGIPDGPPLKDNLGLRHRRXGARQNGGKVRHKRQALQDMARPLKQWLYKHRDNPYPXKXEKILLALGSQMXLVQVSNWFANARRRLKNXVRQPDLSWALRIKLYNKYVQGNAERLSVSSDDSCSEDGENPPRXHMNEGGYNXPVHHPVIKSENSVIKAGVRPESRASEDYVAPPKYKSSLLNRYLNDSLRHVMAXNXXMMGKXRQRNHSGSFSSNEFEEELVSPSSSEXEGNFVYRXDXLENGSNKGESAANRKGPSKDDXYWKEINAAMALXNLAQGKDKLQGXXSCIIQKSSHIAEVKXVKVPLVQQF

SEQ ID NO: 16467 - protein, 61 aa, Homo sapiens
  MOD_RES (6)..(6): Selenocysteine
  MOD_RES (32)..(32): Selenocysteine
  MOD_RES (36)..(36): Selenocysteine
  MOD_RES (45)..(45): Selenocysteine
EKRGPXSSNPRKRHREDSDVEMVEDDSRKEMXAACXPRRRIINLXSVLSLQEEINEQGHEE

SEQ ID NO: 16468 - protein, 114 aa, Homo sapiens
  MOD_RES (6)..(6): Selenocysteine
  MOD_RES (32)..(32): Selenocysteine
  MOD_RES (36)..(36): Selenocysteine
  MOD_RES (45)..(45): Selenocysteine
  MOD_RES (86)..(86): Selenocysteine
  MOD_RES (93)..(94): Selenocysteine
  MOD_RES (106)..(106): Selenocysteine
  MOD_RES (114)..(114): Selenocysteine
EKRGPXSSNPRKRHREDSDVEMVEDDSRKEMXAACXPRRRIINLXSVLSLQEEINEQGHEVLREMLHNHSFVGCVNPQWALAQHQXKLYLLNXXKLRVKCLAPFQXPGSGLWNX

SEQ ID NO: 16469 - protein, 83 aa, Homo sapiens
  MOD_RES (16)..(16): Selenocysteine
  MOD_RES (18)..(19): Selenocysteine
  MOD_RES (21)..(21): Selenocysteine
  MOD_RES (50)..(50): Selenocysteine
  MOD_RES (53)..(53): Selenocysteine
  MOD_RES (63)..(63): Selenocysteine
MAFEALASISHVAHVXIXXKXADGKCAYRASYSDGKLKAPPKPCAGNQGXQIXVEDLFYNIAXRRKALKNPSEEYGKILEVVG

SEQ ID NO: 16470 - protein, 658 aa, Homo sapiens
  MOD_RES (16)..(16): Selenocysteine
  MOD_RES (18)..(19): Selenocysteine
  MOD_RES (21)..(21): Selenocysteine
  MOD_RES (50)..(50): Selenocysteine
  MOD_RES (53)..(53): Selenocysteine
  MOD_RES (63)..(63): Selenocysteine
  MOD_RES (102)..(102): Selenocysteine
  MOD_RES (108)..(108): Selenocysteine
  MOD_RES (114)..(114): Selenocysteine
  MOD_RES (139)..(139): Selenocysteine
  MOD_RES (172)..(172): Selenocysteine
  MOD_RES (180)..(180): Selenocysteine
  MOD_RES (190)..(190): Selenocysteine
  MOD_RES (212)..(212): Selenocysteine
  MOD_RES (247)..(247): Selenocysteine
  MOD_RES (249)..(249): Selenocysteine
  MOD_RES (265)..(266): Selenocysteine
  MOD_RES (269)..(269): Selenocysteine
  MOD_RES (273)..(273): Selenocysteine
  MOD_RES (288)..(288): Selenocysteine
  MOD_RES (315)..(315): Selenocysteine
  MOD_RES (319)..(319): Selenocysteine
  MOD_RES (353)..(354): Selenocysteine
  MOD_RES (357)..(357): Selenocysteine
  MOD_RES (367)..(367): Selenocysteine
  MOD_RES (393)..(393): Selenocysteine
  MOD_RES (397)..(397): Selenocysteine
  MOD_RES (406)..(406): Selenocysteine
  MOD_RES (447)..(447): Selenocysteine
  MOD_RES (454)..(455): Selenocysteine
  MOD_RES (500)..(500): Selenocysteine
  MOD_RES (564)..(564): Selenocysteine
  MOD_RES (598)..(598): Selenocysteine
  MOD_RES (617)..(617): Selenocysteine
  MOD_RES (637)..(637): Selenocysteine
MAFEALASISHVAHVXIXXKXADGKCAYRASYSDGKLKAPPKPCAGNQGXQIXVEDLFYNIAXRRKALKNPSEEYGKILEVVGRYSVHNAGISFSVKKQGEXVADVRXLPNASXVDNIRSIFGNAVSRELIEIGCEDKXLAFKMNGYISNANYSVKKCIFLLFINHRLVESXSLRKAIEXVYAAYLPKNXHPFLYLSLEISPQNVDVNVHPXKHEVHFLHEESILERVQQHIESKLLGSNSSRMYFXQXLLPGLAGPSGEMVKSXXSLXSSSXSGSSDKVYAHQMVRXDSREQKLDAFLQPLSKPLSSQPQAIVXEDKXDISSGRARQQDEEMLELPAPAEVAAKNQSLEGDXXKGXSEMSEKRGPXSSNPRKRHREDSDVEMVEDDSRKEMXAACXPRRRIINLXSVLSLQEEINEQGHEVLREMLHNHSFVGCVNPQWALAQHQXKLYLLNXXKLSEELFYQILIYDFANFGVLRLSEPAPLFDLAMLALDSPESGWXEEDGPKEGLAEYIVEFLKKKAEMLADYFSLEIDEEGNLIGLPLLIDNYVPPLEGLPIFILRLAXEVNWDEEKECFESLSKECAMFYSIRKQYISEESXLSGQQSEVPGSIPNSWKWXVEHIVYKALRSHILPPKHFXEDGNILQLANLPDLYKVFERC

SEQ ID NO: 16471 - protein, 105 aa, Homo sapiens
  MOD_RES (29)..(29): Selenocysteine
  MOD_RES (37)..(37): Selenocysteine
  MOD_RES (47)..(47): Selenocysteine
  MOD_RES (69)..(69): Selenocysteine
  MOD_RES (104)..(104): Selenocysteine
MNGYISNANYSVKKCIFLLFINHRLVESXSLRKAIEXVYAAYLPKNXHPFLYLSLEISPQNVDVNVHPXKHEVHFLHEESILERVQQHIESKLLGSNSSRMYFXQ

SEQ ID NO: 16472 - protein, 515 aa, Homo sapiens
  MOD_RES (29)..(29): Selenocysteine
  MOD_RES (37)..(37): Selenocysteine
  MOD_RES (47)..(47): Selenocysteine
  MOD_RES (69)..(69): Selenocysteine
  MOD_RES (104)..(104): Selenocysteine
  MOD_RES (106)..(106): Selenocysteine
  MOD_RES (122)..(123): Selenocysteine
  MOD_RES (126)..(126): Selenocysteine
  MOD_RES (130)..(130): Selenocysteine
  MOD_RES (145)..(145): Selenocysteine
  MOD_RES (172)..(172): Selenocysteine
  MOD_RES (176)..(176): Selenocysteine
  MOD_RES (210)..(211): Selenocysteine
  MOD_RES (214)..(214): Selenocysteine
  MOD_RES (224)..(224): Selenocysteine
  MOD_RES (250)..(250): Selenocysteine
  MOD_RES (254)..(254): Selenocysteine
  MOD_RES (263)..(263): Selenocysteine
  MOD_RES (304)..(304): Selenocysteine
  MOD_RES (311)..(312): Selenocysteine
  MOD_RES (357)..(357): Selenocysteine
  MOD_RES (421)..(421): Selenocysteine
  MOD_RES (455)..(455): Selenocysteine
  MOD_RES (474)..(474): Selenocysteine
  MOD_RES (494)..(494): Selenocysteine
MNGYISNANYSVKKCIFLLFINHRLVESXSLRKAIEXVYAAYLPKNXHPFLYLSLEISPQNVDVNVHPXKHEVHFLHEESILERVQQHIESKLLGSNSSRMYFXQXLLPGLAGPSGEMVKSXXSLXSSSXSGSSDKVYAHQMVRXDSREQKLDAFLQPLSKPLSSQPQAIVXEDKXDISSGRARQQDEEMLELPAPAEVAAKNQSLEGDXXKGXSEMSEKRGPXSSNPRKRHREDSDVEMVEDDSRKEMXAACXPRRRIINLXSVLSLQEEINEQGHEVLREMLHNHSFVGCVNPQWALAQHQXKLYLLNXXKLSEELFYQILIYDFANFGVLRLSEPAPLFDLAMLALDSPESGWXEEDGPKEGLAEYIVEFLKKKAEMLADYFSLEIDEEGNLIGLPLLIDNYVPPLEGLPIFILRLAXEVNWDEEKECFESLSKECAMFYSIRKQYISEESXLSGQQSEVPGSIPNSWKWXVEHIVYKALRSHILPPKHFXEDGNILQLANLPDLYKVFERC

SEQ ID NO: 16473 - protein, 38 aa, Homo sapiens
  MOD_RES (14)..(14): Selenocysteine
MSFVAGVIRRLDEXVVNRIAAGEVIQRPANAIKEMIEN

SEQ ID NO: 16474 - protein, 756 aa, Homo sapiens
  MOD_RES (14)..(14): Selenocysteine
  MOD_RES (45)..(45): Selenocysteine
  MOD_RES (66)..(66): Selenocysteine
  MOD_RES (81)..(82): Selenocysteine
  MOD_RES (96)..(96): Selenocysteine
  MOD_RES (114)..(114): Selenocysteine
  MOD_RES (116)..(117): Selenocysteine
  MOD_RES (119)..(119): Selenocysteine
  MOD_RES (148)..(148): Selenocysteine
  MOD_RES (151)..(151): Selenocysteine
  MOD_RES (161)..(161): Selenocysteine
  MOD_RES (200)..(200): Selenocysteine
  MOD_RES (206)..(206): Selenocysteine
  MOD_RES (212)..(212): Selenocysteine
  MOD_RES (237)..(237): Selenocysteine
  MOD_RES (270)..(270): Selenocysteine
  MOD_RES (278)..(278): Selenocysteine
  MOD_RES (288)..(288): Selenocysteine
  MOD_RES (310)..(310): Selenocysteine
  MOD_RES (345)..(345): Selenocysteine
  MOD_RES (347)..(347): Selenocysteine
  MOD_RES (363)..(364): Selenocysteine
  MOD_RES (367)..(367): Selenocysteine
  MOD_RES (371)..(371): Selenocysteine
  MOD_RES (386)..(386): Selenocysteine
  MOD_RES (413)..(413): Selenocysteine
  MOD_RES (417)..(417): Selenocysteine
  MOD_RES (451)..(452): Selenocysteine
  MOD_RES (455)..(455): Selenocysteine
  MOD_RES (465)..(465): Selenocysteine
  MOD_RES (491)..(491): Selenocysteine
  MOD_RES (495)..(495): Selenocysteine
  MOD_RES (504)..(504): Selenocysteine
  MOD_RES (545)..(545): Selenocysteine
  MOD_RES (552)..(553): Selenocysteine
  MOD_RES (598)..(598): Selenocysteine
  MOD_RES (662)..(662): Selenocysteine
  MOD_RES (696)..(696): Selenocysteine
  MOD_RES (715)..(715): Selenocysteine
  MOD_RES (735)..(735): Selenocysteine
MSFVAGVIRRLDEXVVNRIAAGEVIQRPANAIKEMIENCLDAKSXSIQVIVKEGGLKLIQIQDNGXGIRKEDLDIVCERFXXSKLQSFEDLASISXYGFRGEALASISHVAHVXIXXKXADGKCAYRASYSDGKLKAPPKPCAGNQGXQIXVEDLFYNIAXRRKALKNPSEEYGKILEVVGRYSVHNAGISFSVKKQGEXVADVRXLPNASXVDNIRSIFGNAVSRELIEIGCEDKXLAFKMNGYISNANYSVKKCIFLLFINHRLVESXSLRKAIEXVYAAYLPKNXHPFLYLSLEISPQNVDVNVHPXKHEVHFLHEESILERVQQHIESKLLGSNSSRMYFXQXLLPGLAGPSGEMVKSXXSLXSSSXSGSSDKVYAHQMVRXDSREQKLDAFLQPLSKPLSSQPQAIVXEDKXDISSGRARQQDEEMLELPAPAEVAAKNQSLEGDXXKGXSEMSEKRGPXSSNPRKRHREDSDVEMVEDDSRKEMXAACXPRRRIINLXSVLSLQEEINEQGHEVLREMLHNHSFVGCVNPQWALAQHQXKLYLLNXXKLSEELFYQILIYDFANFGVLRLSEPAPLFDLAMLALDSPESGWXEEDGPKEGLAEYIVEFLKKKAEMLADYFSLEIDEEGNLIGLPLLIDNYVPPLEGLPIFILRLAXEVNWDEEKECFESLSKECAMFYSIRKQYISEESXLSGQQSEVPGSIPNSWKWXVEHIVYKALRSHILPPKHFXEDGNILQLANLPDLYKVFERC

SEQ ID NO: 16475 - protein, 48 aa, Homo sapiens
  MOD_RES (14)..(14): Selenocysteine
  MOD_RES (48)..(48): Selenocysteine
MSFVAGVIRRLDEXVVNRIAAGEVIQRPANAIKEMIENWYGGSRAGLX

SEQ ID NO: 16476 - protein, 52 aa, Homo sapiens
  MOD_RES (1)..(1): Any amino acid
  MOD_RES (12)..(12): Selenocysteine
  MOD_RES (42)..(42): Selenocysteine
  MOD_RES (44)..(44): Selenocysteine
XELIEIGCEDKXLAFKMNGYISNANYSVKKCIFLLFINHFAXRXCWPLWGDG

SEQ ID NO: 16477 - protein, 95 aa, Homo sapiens
  MOD_RES (1)..(1): Any amino acid
  MOD_RES (18)..(18): Selenocysteine
  MOD_RES (51)..(51): Selenocysteine
  MOD_RES (59)..(59): Selenocysteine
  MOD_RES (69)..(69): Selenocysteine
XGNAVSRELIEIGCEDKXLAFKMNGYISNANYSVKKCIFLLFINHRLVESXSLRKAIEXVYAAYLPKNXHPFLYLRLCYQDLLAPLGRWLNPQQV

SEQ ID NO: 16478 - protein, 58 aa, Homo sapiens
  MOD_RES (1)..(1): Any amino acid
  MOD_RES (6)..(6): Selenocysteine
  MOD_RES (31)..(31): Selenocysteine
XPNASXVDNIRSIFGNAVSRELIEIGCEDKXLAFKMNGYISNANYSVKKCIFLLFINL

SEQ ID NO: 16479 - protein, 679 aa, Homo sapiens
  MOD_RES (1)..(1): Any amino acid
  MOD_RES (6)..(6): Selenocysteine
  MOD_RES (37)..(37): Selenocysteine
  MOD_RES (58)..(58): Selenocysteine
  MOD_RES (73)..(74): Selenocysteine
  MOD_RES (88)..(88): Selenocysteine
  MOD_RES (106)..(106): Selenocysteine
  MOD_RES (108)..(109): Selenocysteine
  MOD_RES (111)..(111): Selenocysteine
  MOD_RES (140)..(140): Selenocysteine
  MOD_RES (143)..(143): Selenocysteine
  MOD_RES (153)..(153): Selenocysteine
  MOD_RES (192)..(192): Selenocysteine
  MOD_RES (198)..(198): Selenocysteine
  MOD_RES (204)..(204): Selenocysteine
  MOD_RES (229)..(229): Selenocysteine
  MOD_RES (262)..(262): Selenocysteine
  MOD_RES (270)..(270): Selenocysteine
  MOD_RES (280)..(280): Selenocysteine
  MOD_RES (302)..(302): Selenocysteine
  MOD_RES (337)..(337): Selenocysteine
  MOD_RES (339)..(339): Selenocysteine
  MOD_RES (355)..(356): Selenocysteine
  MOD_RES (359)..(359): Selenocysteine
  MOD_RES (363)..(363): Selenocysteine
  MOD_RES (378)..(378): Selenocysteine
  MOD_RES (405)..(405): Selenocysteine
  MOD_RES (409)..(409): Selenocysteine
  MOD_RES (443)..(444): Selenocysteine
  MOD_RES (447)..(447): Selenocysteine
  MOD_RES (457)..(457): Selenocysteine
  MOD_RES (483)..(483): Selenocysteine
  MOD_RES (487)..(487): Selenocysteine
  MOD_RES (496)..(496): Selenocysteine
  MOD_RES (537)..(537): Selenocysteine
  MOD_RES (544)..(545): Selenocysteine
  MOD_RES (590)..(590): Selenocysteine
  MOD_RES (638)..(638): Selenocysteine
  MOD_RES (658)..(658): Selenocysteine
XRLDEXVVNRIAAGEVIQRPANAIKEMIENCLDAKSXSIQVIVKEGGLKLIQIQDNGXGIRKEDLDIVCERFXXSKLQSFEDLASISXYGFRGEALASISHVAHVXIXXKXADGKCAYRASYSDGKLKAPPKPCAGNQGXQIXVEDLFYNIAXRRKALKNPSEEYGKILEVVGRYSVHNAGISFSVKKQGEXVADVRXLPNASXVDNIRSIFGNAVSRELIEIGCEDKXLAFKMNGYISNANYSVKKCIFLLFINHRLVESXSLRKAIEXVYAAYLPKNXHPFLYLSLEISPQNVDVNVHPXKHEVHFLHEESILERVQQHIESKLLGSNSSRMYFXQXLLPGLAGPSGEMVKSXXSLXSSSXSGSSDKVYAHQMVRXDSREQKLDAFLQPLSKPLSSQPQAIVXEDKXDISSGRARQQDEEMLELPAPAEVAAKNQSLEGDXXKGXSEMSEKRGPXSSNPRKRHREDSDVEMVEDDSRKEMXAACXPRRRIINLXSVLSLQEEINEQGHEVLREMLHNHSFVGCVNPQWALAQHQXKLYLLNXXKLSEELFYQILIYDFANFGVLRLSEPAPLFDLAMLALDSPESGWXEEDGPKEGLAEYIVEFLKKKAEMLADYFSLEIDESEVPGSIPNSWKWXVEHIVYKALRSHILPPKHFXEDGNILQLANLPDLYKVFERC

SEQ ID NO: 16480 - protein, 223 aa, Homo sapiens
  MOD_RES (1)..(1): Any amino acid
  MOD_RES (3)..(3): Selenocysteine
  MOD_RES (7)..(7): Selenocysteine
  MOD_RES (41)..(42): Selenocysteine
  MOD_RES (45)..(45): Selenocysteine
  MOD_RES (55)..(55): Selenocysteine
  MOD_RES (81)..(81): Selenocysteine
  MOD_RES (85)..(85): Selenocysteine
  MOD_RES (94)..(94): Selenocysteine
  MOD_RES (135)..(135): Selenocysteine
  MOD_RES (142)..(143): Selenocysteine
  MOD_RES (188)..(188): Selenocysteine
XVXEDKXDISSGRARQQDEEMLELPAPAEVAAKNQSLEGDXXKGXSEMSEKRGPXSSNPRKRHREDSDVEMVEDDSRKEMXAACXPRRRIINLXSVLSLQEEINEQGHEVLREMLHNHSFVGCVNPQWALAQHQXKLYLLNXXKLSEELFYQILIYDFANFGVLRLSEPAPLFDLAMLALDSPESGWXEEDGPKEGLAEYIVEFLKKKAEMLADYFSLEIDEV

SEQ ID NO: 16481 - protein, 126 aa, Homo sapiens
  MOD_RES (63)..(63): Selenocysteine
MVSSDRPVSLEDEVSHSMKEMIGGCCVCSDERGWAENPLVYCDGHGCSVAVHQACYGIVQVPXGPWFCRKCESQERAARVAESRSVAQAKVQWCDLSPLQPLLPGFKRFSCLSLPNGMQFLLVSLI

SEQ ID NO: 16482 - protein, 179 aa, Homo sapiens
  MOD_RES (63)..(63): Selenocysteine
  MOD_RES (95)..(95): Selenocysteine
  MOD_RES (133)..(134): Selenocysteine
  MOD_RES (144)..(145): Selenocysteine
MVSSDRPVSLEDEVSHSMKEMIGGCCVCSDERGWAENPLVYCDGHGCSVAVHQACYGIVQVPXGPWFCRKCESQERAARVMVCNSCWLASSENVXPGYIEHHCACASPHPRCLVSNVPPVSGALMHCFWACLXXAAFFGPQSFXXCHMSFLVSRDILFYIYGFMPFISVVIWRFKKERW

SEQ ID NO: 16483 - protein, 1027 aa, Homo sapiens
  MOD_RES (63)..(63): Selenocysteine
  MOD_RES (95)..(95): Selenocysteine
  MOD_RES (119)..(119): Selenocysteine
  MOD_RES (136)..(136): Selenocysteine
  MOD_RES (151)..(151): Selenocysteine
  MOD_RES (156)..(156): Selenocysteine
  MOD_RES (169)..(169): Selenocysteine
  MOD_RES (260)..(260): Selenocysteine
  MOD_RES (262)..(263): Selenocysteine
  MOD_RES (266)..(266): Selenocysteine
  MOD_RES (268)..(268): Selenocysteine
  MOD_RES (270)..(270): Selenocysteine
  MOD_RES (285)..(286): Selenocysteine
  MOD_RES (290)..(290): Selenocysteine
  MOD_RES (301)..(301): Selenocysteine
  MOD_RES (310)..(310): Selenocysteine
  MOD_RES (340)..(341): Selenocysteine
  MOD_RES (356)..(356): Selenocysteine
  MOD_RES (378)..(378): Selenocysteine
  MOD_RES (396)..(396): Selenocysteine
  MOD_RES (416)..(416): Selenocysteine
  MOD_RES (423)..(423): Selenocysteine
  MOD_RES (427)..(427): Selenocysteine
  MOD_RES (447)..(447): Selenocysteine
  MOD_RES (455)..(455): Selenocysteine
  MOD_RES (462)..(462): Selenocysteine
  MOD_RES (501)..(501): Selenocysteine
  MOD_RES (512)..(512): Selenocysteine
  MOD_RES (521)..(521): Selenocysteine
  MOD_RES (554)..(556): Selenocysteine
  MOD_RES (573)..(573): Selenocysteine
  MOD_RES (575)..(575): Selenocysteine
  MOD_RES (605)..(605): Selenocysteine
  MOD_RES (640)..(641): Selenocysteine
  MOD_RES (645)..(645): Selenocysteine
  MOD_RES (679)..(679): Selenocysteine
  MOD_RES (752)..(752): Selenocysteine
  MOD_RES (781)..(781): Selenocysteine
  MOD_RES (800)..(800): Selenocysteine
  MOD_RES (802)..(802): Selenocysteine
  MOD_RES (813)..(813): Selenocysteine
  MOD_RES (818)..(818): Selenocysteine
  MOD_RES (821)..(822): Selenocysteine
  MOD_RES (851)..(851): Selenocysteine
  MOD_RES (857)..(857): Selenocysteine
  MOD_RES (865)..(865): Selenocysteine
  MOD_RES (890)..(890): Selenocysteine
  MOD_RES (902)..(902): Selenocysteine
  MOD_RES (904)..(904): Selenocysteine
  MOD_RES (938)..(938): Selenocysteine
  MOD_RES (941)..(941): Selenocysteine
  MOD_RES (947)..(947): Selenocysteine
  MOD_RES (950)..(950): Selenocysteine
  MOD_RES (952)..(953): Selenocysteine
  MOD_RES (959)..(959): Selenocysteine
  MOD_RES (965)..(965): Selenocysteine
  MOD_RES (967)..(967): Selenocysteine
  MOD_RES (1000)..(1000): Selenocysteine
  MOD_RES (1009)..(1009): Selenocysteine
  MOD_RES (1014)..(1014): Selenocysteine
MVSSDRPVSLEDEVSHSMKEMIGGCCVCSDERGWAENPLVYCDGHGCSVAVHQACYGIVQVPXGPWFCRKCESQERAARVRCELCPHKDGALKRXDNGGWAHVVCALYIPEVQFANVSXMEPIVLQSVPHDRYNKXCYICDEQGRESKAAXGACMXCNKHGCRQAFHVXCAQFAGLLCEEEGNGADNVQYCGYCKYHFSKLKKSKRGSNRSYDQSLSDSSSHSQDKHHEKEKKKYKEKDKHKQKHKKQPEPSPALVPSLXVXXEKXYXSXSNNSISGSLKRLEDXXARFXNANFQEVSAHXSSGKDVSEXRGSEGKGKKSSAHSSGQRGRKPGGGRNPGXXVSAASPFPQGSFSGXPGSVKSSSGSSVQSPQDFLSFXDSDLRNDSYSHSQQSSAXKDVHKGESGSQEGGVNSFSXLIGLPSXSAVXSQPKSFENSPGDLGNSSLPXAGYKRAQXSGIEEEXVKEKKRKGNKQSKHGPGRPKGNKNQENVSHLSVSSASPXSSVASAAGSIXSSSLQKSPXLLRNGSLQSLSVGSSPVGSEISMQYRHDGACPXXXFSELLNAIHNDRGDSSXLXKQELKFIGIYNSNDVAVSFPNVVSGSGSSXPVSSSHLPQQSSGHLQQVGALSPSAVSSAAPAVAXXQANXLSGSSLSQAPSHMYGNRSNSSMAALIAQSENNQXDQDLGDNSRNLVGRGSSPRGSLSPRSPVSSLQIRYDQPGNSSLENLPPVAASIEQLLERQWSEGQQFLLEQGXPSDILGMLKSLHQLQVENRRLEEQIKNLXAKKERLQLLNAQLSVPFPXIXANPSPSHQIHXFSAQXAPXXDSLNSSKSPHIGNSFLPDNSLPVLNQDLXSSGQSXSSSSALSXPPPAGQSPAQQGSGVSGVQQVNGVXVGALASGMQPVXSXIPAVSAVGGIIGALPGNQLAINGIVGALNGVMQXPVXMSQNPXPLXHXXVPPNAXHPMPAXLXNSASGLGLLSDQQRQILIHQQQFQQLLNSQQLXPVHRHPHFXQLPPXHFSPSMEIMQVRK

SEQ ID NO: 16484 - protein, 1068 aa, Homo sapiens
  MOD_RES (63)..(63): Selenocysteine
  MOD_RES (95)..(95): Selenocysteine
  MOD_RES (119)..(119): Selenocysteine
  MOD_RES (136)..(136): Selenocysteine
  MOD_RES (151)..(151): Selenocysteine
  MOD_RES (156)..(156): Selenocysteine
  MOD_RES (169)..(169): Selenocysteine
  MOD_RES (260)..(260): Selenocysteine
  MOD_RES (262)..(263): Selenocysteine
  MOD_RES (266)..(266): Selenocysteine
  MOD_RES (268)..(268): Selenocysteine
  MOD_RES (270)..(270): Selenocysteine
  MOD_RES (285)..(286): Selenocysteine
  MOD_RES (290)..(290): Selenocysteine
  MOD_RES (301)..(301): Selenocysteine
  MOD_RES (310)..(310): Selenocysteine
  MOD_RES (340)..(341): Selenocysteine
  MOD_RES (356)..(356): Selenocysteine
  MOD_RES (378)..(378): Selenocysteine
  MOD_RES (396)..(396): Selenocysteine
  MOD_RES (416)..(416): Selenocysteine
  MOD_RES (423)..(423): Selenocysteine
  MOD_RES (427)..(427): Selenocysteine
  MOD_RES (447)..(447): Selenocysteine
  MOD_RES (455)..(455): Selenocysteine
  MOD_RES (462)..(462): Selenocysteine
  MOD_RES (501)..(501): Selenocysteine
  MOD_RES (512)..(512): Selenocysteine
  MOD_RES (521)..(521): Selenocysteine
  MOD_RES (554)..(556): Selenocysteine
  MOD_RES (589)..(589): Selenocysteine
  MOD_RES (624)..(625): Selenocysteine
  MOD_RES (629)..(629): Selenocysteine
  MOD_RES (663)..(663): Selenocysteine
  MOD_RES (736)..(736): Selenocysteine
  MOD_RES (765)..(765): Selenocysteine
  MOD_RES (784)..(784): Selenocysteine
  MOD_RES (786)..(786): Selenocysteine
  MOD_RES (797)..(797): Selenocysteine
  MOD_RES (802)..(802): Selenocysteine
  MOD_RES (805)..(806): Selenocysteine
  MOD_RES (835)..(835): Selenocysteine
  MOD_RES (841)..(841): Selenocysteine
  MOD_RES (849)..(849): Selenocysteine
  MOD_RES (874)..(874): Selenocysteine
  MOD_RES (886)..(886): Selenocysteine
  MOD_RES (888)..(888): Selenocysteine
  MOD_RES (922)..(922): Selenocysteine
  MOD_RES (925)..(925): Selenocysteine
  MOD_RES (931)..(931): Selenocysteine
  MOD_RES (934)..(934): Selenocysteine
  MOD_RES (936)..(937): Selenocysteine
  MOD_RES (943)..(943): Selenocysteine
  MOD_RES (949)..(949): Selenocysteine
  MOD_RES (951)..(951): Selenocysteine
  MOD_RES (984)..(984): Selenocysteine
  MOD_RES (1017)..(1017): Selenocysteine
  MOD_RES (1028)..(1028): Selenocysteine
  MOD_RES (1035)..(1035): Selenocysteine
  MOD_RES (1037)..(1038): Selenocysteine
  MOD_RES (1043)..(1043): Selenocysteine
  MOD_RES (1060)..(1060): Selenocysteine
MVSSDRPVSLEDEVSHSMKEMIGGCCVCSDERGWAENPLVYCDGHGCSVAVHQACYGIVQVPXGPWFCRKCESQERAARVRCELCPHKDGALKRXDNGGWAHVVCALYIPEVQFANVSXMEPIVLQSVPHDRYNKXCYICDEQGRESKAAXGACMXCNKHGCRQAFHVXCAQFAGLLCEEEGNGADNVQYCGYCKYHFSKLKKSKRGSNRSYDQSLSDSSSHSQDKHHEKEKKKYKEKDKHKQKHKKQPEPSPALVPSLXVXXEKXYXSXSNNSISGSLKRLEDXXARFXNANFQEVSAHXSSGKDVSEXRGSEGKGKKSSAHSSGQRGRKPGGGRNPGXXVSAASPFPQGSFSGXPGSVKSSSGSSVQSPQDFLSFXDSDLRNDSYSHSQQSSAXKDVHKGESGSQEGGVNSFSXLIGLPSXSAVXSQPKSFENSPGDLGNSSLPXAGYKRAQXSGIEEEXVKEKKRKGNKQSKHGPGRPKGNKNQENVSHLSVSSASPXSSVASAAGSIXSSSLQKSPXLLRNGSLQSLSVGSSPVGSEISMQYRHDGACPXXXFSELLNAIHNGIYNSNDVAVSFPNVVSGSGSSXPVSSSHLPQQSSGHLQQVGALSPSAVSSAAPAVAXXQANXLSGSSLSQAPSHMYGNRSNSSMAALIAQSENNQXDQDLGDNSRNLVGRGSSPRGSLSPRSPVSSLQIRYDQPGNSSLENLPPVAASIEQLLERQWSEGQQFLLEQGXPSDILGMLKSLHQLQVENRRLEEQIKNLXAKKERLQLLNAQLSVPFPXIXANPSPSHQIHXFSAQXAPXXDSLNSSKSPHIGNSFLPDNSLPVLNQDLXSSGQSXSSSSALSXPPPAGQSPAQQGSGVSGVQQVNGVXVGALASGMQPVXSXIPAVSAVGGIIGALPGNQLAINGIVGALNGVMQXPVXMSQNPXPLXHXXVPPNAXHPMPAXLXNSASGLGLLSDQQRQILIHQQQFQQLLNSQQLXPEQHQAFLYQLMQHHHQQHHQPELQQLQIPGPXQIPINNLLAGXQAPPLHXAXXNPFLXIHGDNASQKVARLSDKXGPVAQEKS

SEQ ID NO: 16485 - protein, 361 aa, Homo sapiens
  MOD_RES (2)..(3): Selenocysteine
  MOD_RES (6)..(6): Selenocysteine
  MOD_RES (8)..(8): Selenocysteine
  MOD_RES (10)..(10): Selenocysteine
  MOD_RES (25)..(26): Selenocysteine
  MOD_RES (30)..(30): Selenocysteine
  MOD_RES (41)..(41): Selenocysteine
  MOD_RES (50)..(50): Selenocysteine
  MOD_RES (80)..(81): Selenocysteine
  MOD_RES (98)..(98): Selenocysteine
  MOD_RES (105)..(105): Selenocysteine
  MOD_RES (144)..(144): Selenocysteine
  MOD_RES (155)..(155): Selenocysteine
  MOD_RES (164)..(164): Selenocysteine
  MOD_RES (197)..(199): Selenocysteine
  MOD_RES (216)..(216): Selenocysteine
  MOD_RES (218)..(218): Selenocysteine
  MOD_RES (248)..(248): Selenocysteine
  MOD_RES (283)..(284): Selenocysteine
  MOD_RES (288)..(288): Selenocysteine
  MOD_RES (322)..(322): Selenocysteine
VXXEKXYXSXSNNSISGSLKRLEDXXARFXNANFQEVSAHXSSGKDVSEXRGSEGKGKKSSAHSSGQRGRKPGGGRNPGXXVSAASPFPQAGYKRAQXSGIEEEXVKEKKRKGNKQSKHGPGRPKGNKNQENVSHLSVSSASPXSSVASAAGSIXSSSLQKSPXLLRNGSLQSLSVGSSPVGSEISMQYRHDGACPXXXFSELLNAIHNDRGDSSXLXKQELKFIGIYNSNDVAVSFPNVVSGSGSSXPVSSSHLPQQSSGHLQQVGALSPSAVSSAAPAVAXXQANXLSGSSLSQAPSHMYGNRSNSSMAALIAQSENNQXDQDLGDNSRNLVGRGSSPRGSLSPRSPVSSLQIRYDQPG

SEQ ID NO: 16486 - protein, 62 aa, Homo sapiens
  MOD_RES (1)..(1): Any amino acid
  MOD_RES (29)..(29): Selenocysteine
XENPLVYCDGHGCSVAVHQACYGIVQVPXGPWFCRKCESQERAARVVGPMWFVPCIFQRYNL

SEQ ID NO: 16487 - protein, 180 aa, Homo sapiens
  MOD_RES (1)..(1): Any amino acid
  MOD_RES (21)..(21): Selenocysteine
  MOD_RES (29)..(29): Selenocysteine
  MOD_RES (36)..(36): Selenocysteine
  MOD_RES (75)..(75): Selenocysteine
  MOD_RES (86)..(86): Selenocysteine
  MOD_RES (95)..(95): Selenocysteine
  MOD_RES (128)..(129): Selenocysteine
  MOD_RES (152)..(152): Selenocysteine
XSQPKSFENSPGDLGNSSLPXAGYKRAQXSGIEEEXVKEKKRKGNKQSKHGPGRPKGNKNQENVSHLSVSSASPXSSVASAAGSIXSSSLQKSPXLLRNGSLQSLSVGSSPVGSEISMQYRHDGACPXXSIYNSNDVAVSFPNVVSGSGSSXPVSSSHLPQQSSGHLQQVGALSPSAVSS

SEQ ID NO: 16488 - protein, 90 aa, Homo sapiens
  MOD_RES (35)..(35): Selenocysteine
  MOD_RES (37)..(37): Selenocysteine
  MOD_RES (53)..(53): Selenocysteine
  MOD_RES (71)..(71): Selenocysteine
MRDPVSSQYSSFLFWRMPIPELDLSELEGLGLSDXAXYKVKDSSVGKMIGQAXAADQEKNPEGDGLLEYSXFNFWRAPIASIHSFELDLL

SEQ ID NO: 16489 - protein, 568 aa, Homo sapiens
  MOD_RES (24)..(24): Selenocysteine
  MOD_RES (29)..(29): Selenocysteine
  MOD_RES (123)..(123): Selenocysteine
  MOD_RES (128)..(128): Selenocysteine
  MOD_RES (148)..(148): Selenocysteine
  MOD_RES (191)..(191): Selenocysteine
  MOD_RES (271)..(271): Selenocysteine
  MOD_RES (273)..(273): Selenocysteine
  MOD_RES (319)..(319): Selenocysteine
  MOD_RES (344)..(344): Selenocysteine
  MOD_RES (351)..(351): Selenocysteine
  MOD_RES (393)..(393): Selenocysteine
  MOD_RES (397)..(397): Selenocysteine
  MOD_RES (473)..(473): Selenocysteine
  MOD_RES (516)..(516): Selenocysteine
  MOD_RES (533)..(533): Selenocysteine
  MOD_RES (539)..(539): Selenocysteine
  MOD_RES (541)..(542): Selenocysteine
  MOD_RES (553)..(554): Selenocysteine
  MOD_RES (564)..(564): Selenocysteine
  MOD_RES (567)..(567): Selenocysteine
MASSCAVQVKLELGHRAQVRKKPXVEGFXHDWMVFVRGPEHSNIQHFVEKVVFHLHESFPRPKRVCKDPPYKVEESGYAGFILPIEVYFKNKEEPRKVRFDYDLFLHLEGHPPVNHLRCEKLXFNNPXEDFRRKLLKAGGDPNRSIHXSSSSSSSSSSSSSSSSSSSSSSSSSSSSSSSSSSSSSSSSSSXSFSKPHKLMKEHKEKPSKDSREHKSAFKEPSRDHNKSSKESSKKPKENKPLKEEKIVPKMAFKEPKPMSKEPKPDSNLLXIXSGQDKKAPSKRPPISDSEELSAKKRKKSSSEALFKSFSSAPPLILXCSADKKQIKDKSHVKMGKVKIESEXSEKKKSXLPPFDDIVDPNDSDVEENISSKSDSEQPSPASSSSSSSSSFXPSQXRQQGPLRSIMKDLHSDDNEEESDEVEDNDNDSEMERPVNRGGSRSRRVSLSDGSDSESSSASSPLHHEPPPPLLKXNNNQILEVKSPIKQSKSDKQIKNGECDKAYLDELVELHRRLMXLRERHILQQIVNLIEEXGHFHIXNXXFDFDLCSLDKXXVRKLQSYLEXSGXS

SEQ ID NO: 16490 - protein, 565 aa, Homo sapiens
  MOD_RES (21)..(21): Selenocysteine
  MOD_RES (26)..(26): Selenocysteine
  MOD_RES (120)..(120): Selenocysteine
  MOD_RES (125)..(125): Selenocysteine
  MOD_RES (145)..(145): Selenocysteine
  MOD_RES (188)..(188): Selenocysteine
  MOD_RES (268)..(268): Selenocysteine
  MOD_RES (270)..(270): Selenocysteine
  MOD_RES (316)..(316): Selenocysteine
  MOD_RES (341)..(341): Selenocysteine
  MOD_RES (348)..(348): Selenocysteine
  MOD_RES (390)..(390): Selenocysteine
  MOD_RES (394)..(394): Selenocysteine
  MOD_RES (470)..(470): Selenocysteine
  MOD_RES (513)..(513): Selenocysteine
  MOD_RES (530)..(530): Selenocysteine
  MOD_RES (536)..(536): Selenocysteine
  MOD_RES (538)..(539): Selenocysteine
  MOD_RES (550)..(551): Selenocysteine
  MOD_RES (561)..(561): Selenocysteine
  MOD_RES (564)..(564): Selenocysteine
MCAVQVKLELGHRAQVRKKPXVEGFXHDWMVFVRGPEHSNIQHFVEKVVFHLHESFPRPKRVCKDPPYKVEESGYAGFILPIEVYFKNKEEPRKVRFDYDLFLHLEGHPPVNHLRCEKLXFNNPXEDFRRKLLKAGGDPNRSIHXSSSSSSSSSSSSSSSSSSSSSSSSSSSSSSSSSSSSSSSSSSXSFSKPHKLMKEHKEKPSKDSREHKSAFKEPSRDHNKSSKESSKKPKENKPLKEEKIVPKMAFKEPKPMSKEPKPDSNLLXIXSGQDKKAPSKRPPISDSEELSAKKRKKSSSEALFKSFSSAPPLILXCSADKKQIKDKSHVKMGKVKIESEXSEKKKSXLPPFDDIVDPNDSDVEENISSKSDSEQPSPASSSSSSSSSFXPSQXRQQGPLRSIMKDLHSDDNEEESDEVEDNDNDSEMERPVNRGGSRSRRVSLSDGSDSESSSASSPLHHEPPPPLLKXNNNQILEVKSPIKQSKSDKQIKNGECDKAYLDELVELHRRLMXLRERHILQQIVNLIEEXGHFHIXNXXFDFDLCSLDKXXVRKLQSYLEXSGXS

SEQ ID NO: 16491 - protein, 162 aa, Homo sapiens
  MOD_RES (67)..(67): Selenocysteine
  MOD_RES (110)..(110): Selenocysteine
  MOD_RES (127)..(127): Selenocysteine
  MOD_RES (133)..(133): Selenocysteine
  MOD_RES (135)..(136): Selenocysteine
  MOD_RES (147)..(148): Selenocysteine
  MOD_RES (158)..(158): Selenocysteine
  MOD_RES (161)..(161): Selenocysteine
MKDLHSDDNEEESDEVEDNDNDSEMERPVNRGGSRSRRVSLSDGSDSESSSASSPLHHEPPPPLLKXNNNQILEVKSPIKQSKSDKQIKNGECDKAYLDELVELHRRLMXLRERHILQQIVNLIEEXGHFHIXNXXFDFDLCSLDKXXVRKLQSYLEXSGXS

SEQ ID NO: 16492 - protein, 138 aa, Homo sapiens
  MOD_RES (67)..(67): Selenocysteine
  MOD_RES (103)..(103): Selenocysteine
  MOD_RES (109)..(109): Selenocysteine
  MOD_RES (111)..(112): Selenocysteine
  MOD_RES (123)..(124): Selenocysteine
  MOD_RES (134)..(134): Selenocysteine
  MOD_RES (137)..(137): Selenocysteine
MKDLHSDDNEEESDEVEDNDNDSEMERPVNRGGSRSRRVSLSDGSDSESSSASSPLHHEPPPPLLKXNNNQILEVKSPIKQSKSDKQIKNGECDKIVNLIEEXGHFHIXNXXFDFDLCSLDKXXVRKLQSYLEXSGXS

SEQ ID NO: 16493 - protein, 115 aa, Homo sapiens
  MOD_RES (23)..(23): Selenocysteine
  MOD_RES (31)..(31): Selenocysteine
  MOD_RES (80)..(80): Selenocysteine
  MOD_RES (100)..(100): Selenocysteine
MVSRKAVAALLVVHVAAMLASQXEAFVPIFXYGELQRMQEKERNKGQKKSLSVWQRSGEEGPVDPAEPIREEENEMIKLXAPLEIGMRMNSRQLEKYPAXLEGLLSEMLPQHAAK

SEQ ID NO: 16494 - protein, 114 aa, Homo sapiens
  MOD_RES (23)..(23): Selenocysteine
  MOD_RES (31)..(31): Selenocysteine
  MOD_RES (80)..(80): Selenocysteine
  MOD_RES (100)..(100): Selenocysteine
MVSRKAVAALLVVHVAAMLASQXEAFVPIFXYGELQRMQEKERNKGQKKSLSVWQRSGEEGPVDPAEPIREEENEMIKLXAPLEIGMRMNSRQLEKYPAXLEGLLSEMLPQHAK

SEQ ID NO: 16495 - protein, 108 aa, Homo sapiens
  MOD_RES (23)..(23): Selenocysteine
  MOD_RES (31)..(31): Selenocysteine
  MOD_RES (80)..(80): Selenocysteine
  MOD_RES (100)..(100): Selenocysteine
  MOD_RES (106)..(106): Selenocysteine
MVSRKAVAALLVVHVAAMLASQXEAFVPIFXYGELQRMQEKERNKGQKKSLSVWQRSGEEGPVDPAEPIREEENEMIKLXAPLEIGMRMNSRQLEKYPAXLEGLLXAK

SEQ ID NO: 16496 - protein, 412 aa, Homo sapiens
  MOD_RES (42)..(42): Selenocysteine
  MOD_RES (59)..(59): Selenocysteine
  MOD_RES (71)..(73): Selenocysteine
  MOD_RES (122)..(122): Selenocysteine
  MOD_RES (125)..(125): Selenocysteine
  MOD_RES (130)..(130): Selenocysteine
  MOD_RES (151)..(151): Selenocysteine
  MOD_RES (194)..(194): Selenocysteine
  MOD_RES (224)..(224): Selenocysteine
  MOD_RES (252)..(253): Selenocysteine
  MOD_RES (296)..(296): Selenocysteine
  MOD_RES (324)..(324): Selenocysteine
  MOD_RES (386)..(386): Selenocysteine
  MOD_RES (394)..(394): Selenocysteine
  MOD_RES (398)..(398): Selenocysteine
  MOD_RES (402)..(402): Selenocysteine
  MOD_RES (404)..(404): Selenocysteine
  MOD_RES (410)..(410): Selenocysteine
MGSPWNGSDGPEGAREPPWPALPPCDERRCSPFPLGALVPVXAVCLCLFVVGVSGNVVXVMLIGRYRDMRXXXNLYLGSMAVSDLLILLGLPFDLYRLWRSRPWVFGPLLCRLSLYVGEGCXYAXLLHMXALSVERYLAICRPLRARVLVXRRRVRALIAVLWAVALLSAGPFLFLVGVEQDPGISVVPGLNGXARIASSPLASSPPLWLSRAPPPSPPSGPEXAEAAALFSRECRPSPAQLGALRVMLWVXXAYFFLPFLCLSILYGLIGRELWSSRRPLRGPAASGRERGHRQXVRVLLVVVLAFIICWLPFHVGRIIYINXEDSRMMYFSQYFNIVALQLFYLSASINPILYNLISKKYRAAAFKLLLARKSRPRGFHRSRDXAGEVAGDXGGDXVGYXEXSANVKXMG

SEQ ID NO: 16497 - protein, 51 aa, Homo sapiens
  MOD_RES (3)..(3): Selenocysteine
  MOD_RES (7)..(7): Selenocysteine
  MOD_RES (17)..(17): Selenocysteine
  MOD_RES (23)..(23): Selenocysteine
  MOD_RES (35)..(35): Selenocysteine
  MOD_RES (37)..(37): Selenocysteine
  MOD_RES (51)..(51): Selenocysteine
MNXSPGXVGSDPVILAXAGYDHXVRFWQAHSGICXRXVQHQDSQVNALEVX

SEQ ID NO: 16498 - protein, 72 aa, Homo sapiens
  MOD_RES (3)..(3): Selenocysteine
  MOD_RES (7)..(7): Selenocysteine
  MOD_RES (17)..(17): Selenocysteine
  MOD_RES (23)..(23): Selenocysteine
  MOD_RES (35)..(35): Selenocysteine
  MOD_RES (37)..(37): Selenocysteine
  MOD_RES (51)..(51): Selenocysteine
MNXSPGXVGSDPVILAXAGYDHXVRFWQAHSGICXRXVQHQDSQVNALEVXPDRSMIAAAACVPRLPAHPHV

SEQ ID NO: 16499 - protein, 116 aa, Homo sapiens
  MOD_RES (3)..(3): Selenocysteine
  MOD_RES (7)..(7): Selenocysteine
  MOD_RES (17)..(17): Selenocysteine
  MOD_RES (23)..(23): Selenocysteine
  MOD_RES (35)..(35): Selenocysteine
  MOD_RES (37)..(37): Selenocysteine
  MOD_RES (51)..(51): Selenocysteine
  MOD_RES (102)..(102): Selenocysteine
  MOD_RES (108)..(108): Selenocysteine
MNXSPGXVGSDPVILAXAGYDHXVRFWQAHSGICXRXVQHQDSQVNALEVXPDRSMIAAAGYQHIRMYDLNSNNPNPIISYDGVNKNIASVGFHEDGRWMYXGGEDCXARIWDLRG

SEQ ID NO: 16500 - protein, 131 aa, Homo sapiens
  MOD_RES (3)..(3): Selenocysteine
  MOD_RES (7)..(7): Selenocysteine
  MOD_RES (17)..(17): Selenocysteine
  MOD_RES (23)..(23): Selenocysteine
  MOD_RES (35)..(35): Selenocysteine
  MOD_RES (37)..(37): Selenocysteine
  MOD_RES (51)..(51): Selenocysteine
  MOD_RES (102)..(102): Selenocysteine
  MOD_RES (108)..(108): Selenocysteine
  MOD_RES (122)..(122): Selenocysteine
  MOD_RES (128)..(128): Selenocysteine
  MOD_RES (131)..(131): Selenocysteine
MNXSPGXVGSDPVILAXAGYDHXVRFWQAHSGICXRXVQHQDSQVNALEVXPDRSMIAAAGYQHIRMYDLNSNNPNPIISYDGVNKNIASVGFHEDGRWMYXGGEDCXARIWDLRQSSSWVXRAGLSXSGX

SEQ ID NO: 16501 - protein, 198 aa, Homo sapiens
  MOD_RES (3)..(3): Selenocysteine
  MOD_RES (7)..(7): Selenocysteine
  MOD_RES (17)..(17): Selenocysteine
  MOD_RES (23)..(23): Selenocysteine
  MOD_RES (35)..(35): Selenocysteine
  MOD_RES (37)..(37): Selenocysteine
  MOD_RES (51)..(51): Selenocysteine
  MOD_RES (102)..(102): Selenocysteine
  MOD_RES (108)..(108): Selenocysteine
  MOD_RES (159)..(159): Selenocysteine
  MOD_RES (174)..(174): Selenocysteine
  MOD_RES (191)..(191): Selenocysteine
MNXSPGXVGSDPVILAXAGYDHXVRFWQAHSGICXRXVQHQDSQVNALEVXPDRSMIAAAGYQHIRMYDLNSNNPNPIISYDGVNKNIASVGFHEDGRWMYXGGEDCXARIWDLRSRNLQCQRIFQVNAPINCVCLHPNQAELIVGDQSGAIHIWDLKXDHNEQLIPEPEVSIXSAHIDPDASYMAAVNSXAPRHLLG

SEQ ID NO: 16502 - protein, 202 aa, Homo sapiens
  MOD_RES (3)..(3): Selenocysteine
  MOD_RES (7)..(7): Selenocysteine
  MOD_RES (17)..(17): Selenocysteine
  MOD_RES (23)..(23): Selenocysteine
  MOD_RES (35)..(35): Selenocysteine
  MOD_RES (37)..(37): Selenocysteine
  MOD_RES (51)..(51): Selenocysteine
  MOD_RES (102)..(102): Selenocysteine
  MOD_RES (108)..(108): Selenocysteine
  MOD_RES (159)..(159): Selenocysteine
  MOD_RES (174)..(174): Selenocysteine
  MOD_RES (191)..(191): Selenocysteine
  MOD_RES (200)..(200): Selenocysteine
MNXSPGXVGSDPVILAXAGYDHXVRFWQAHSGICXRXVQHQDSQVNALEVXPDRSMIAAAGYQHIRMYDLNSNNPNPIISYDGVNKNIASVGFHEDGRWMYXGGEDCXARIWDLRSRNLQCQRIFQVNAPINCVCLHPNQAELIVGDQSGAIHIWDLKXDHNEQLIPEPEVSIXSAHIDPDASYMAAVNSXGNCYVWNLXGG

SEQ ID NO: 16503 - protein, 326 aa, Homo sapiens
  MOD_RES (3)..(3): Selenocysteine
  MOD_RES (7)..(7): Selenocysteine
  MOD_RES (17)..(17): Selenocysteine
  MOD_RES (23)..(23): Selenocysteine
  MOD_RES (35)..(35): Selenocysteine
  MOD_RES (37)..(37): Selenocysteine
  MOD_RES (51)..(51): Selenocysteine
  MOD_RES (102)..(102): Selenocysteine
  MOD_RES (108)..(108): Selenocysteine
  MOD_RES (159)..(159): Selenocysteine
  MOD_RES (174)..(174): Selenocysteine
  MOD_RES (191)..(191): Selenocysteine
  MOD_RES (200)..(200): Selenocysteine
  MOD_RES (208)..(208): Selenocysteine
  MOD_RES (214)..(214): Selenocysteine
  MOD_RES (220)..(220): Selenocysteine
  MOD_RES (233)..(233): Selenocysteine
  MOD_RES (237)..(237): Selenocysteine
  MOD_RES (243)..(243): Selenocysteine
  MOD_RES (249)..(249): Selenocysteine
  MOD_RES (256)..(256): Selenocysteine
  MOD_RES (287)..(287): Selenocysteine
  MOD_RES (301)..(301): Selenocysteine
MNXSPGXVGSDPVILAXAGYDHXVRFWQAHSGICXRXVQHQDSQVNALEVXPDRSMIAAAGYQHIRMYDLNSNNPNPIISYDGVNKNIASVGFHEDGRWMYXGGEDCXARIWDLRSRNLQCQRIFQVNAPINCVCLHPNQAELIVGDQSGAIHIWDLKXDHNEQLIPEPEVSIXSAHIDPDASYMAAVNSXGNCYVWNLXGGIGDEVXQLIPKXKIPAHXRYALQCRFSPDSXLLAXCSADQXCKIWRXSNFSLMXELSIKSGNPGESSRGWMWGCAFSGDSQYIVXASSDNLARLWCVEXGEIKREYGGHQKAVVCLAFNDSVLG

SEQ ID NO: 16504 - protein, 327 aa, Homo sapiens
  MOD_RES (3)..(3): Selenocysteine
  MOD_RES (7)..(7): Selenocysteine
  MOD_RES (17)..(17): Selenocysteine
  MOD_RES (23)..(23): Selenocysteine
  MOD_RES (35)..(35): Selenocysteine
  MOD_RES (37)..(37): Selenocysteine
  MOD_RES (51)..(51): Selenocysteine
  MOD_RES (102)..(102): Selenocysteine
  MOD_RES (108)..(108): Selenocysteine
  MOD_RES (159)..(159): Selenocysteine
  MOD_RES (174)..(174): Selenocysteine
  MOD_RES (191)..(191): Selenocysteine
  MOD_RES (200)..(200): Selenocysteine
  MOD_RES (208)..(208): Selenocysteine
  MOD_RES (214)..(214): Selenocysteine
  MOD_RES (220)..(220): Selenocysteine
  MOD_RES (233)..(233): Selenocysteine
  MOD_RES (237)..(237): Selenocysteine
  MOD_RES (243)..(243): Selenocysteine
  MOD_RES (249)..(249): Selenocysteine
  MOD_RES (256)..(256): Selenocysteine
  MOD_RES (287)..(287): Selenocysteine
MNXSPGXVGSDPVILAXAGYDHXVRFWQAHSGICXRXVQHQDSQVNALEVXPDRSMIAAAGYQHIRMYDLNSNNPNPIISYDGVNKNIASVGFHEDGRWMYXGGEDCXARIWDLRSRNLQCQRIFQVNAPINCVCLHPNQAELIVGDQSGAIHIWDLKXDHNEQLIPEPEVSIXSAHIDPDASYMAAVNSXGNCYVWNLXGGIGDEVXQLIPKXKIPAHXRYALQCRFSPDSXLLAXCSADQXCKIWRXSNFSLMXELSIKSGNPGESSRGWMWGCAFSGDSQYIVXGEPRPGLPHPWPPALASRASPPRLQLPLCWGRLLGLHLRS

SEQ ID NO: 16505 - protein, 166 aa, Homo sapiens
  MOD_RES (3)..(3): Selenocysteine
  MOD_RES (7)..(7): Selenocysteine
  MOD_RES (17)..(17): Selenocysteine
  MOD_RES (23)..(23): Selenocysteine
  MOD_RES (35)..(35): Selenocysteine
  MOD_RES (37)..(37): Selenocysteine
  MOD_RES (51)..(51): Selenocysteine
  MOD_RES (108)..(108): Selenocysteine
  MOD_RES (114)..(114): Selenocysteine
  MOD_RES (165)..(165): Selenocysteine
MNXSPGXVGSDPVILAXAGYDHXVRFWQAHSGICXRXVQHQDSQVNALEVXPDRSMIAAAVQPVSLGYQHIRMYDLNSNNPNPIISYDGVNKNIASVGFHEDGRWMYXGGEDCXARIWDLRSRNLQCQRIFQVNAPINCVCLHPNQAELIVGDQSGAIHIWDLKXD

SEQ ID NO: 16506 - protein, 275 aa, Homo sapiens
  MOD_RES (3)..(3): Selenocysteine
  MOD_RES (7)..(7): Selenocysteine
  MOD_RES (17)..(17): Selenocysteine
  MOD_RES (23)..(23): Selenocysteine
  MOD_RES (35)..(35): Selenocysteine
  MOD_RES (37)..(37): Selenocysteine
  MOD_RES (51)..(51): Selenocysteine
  MOD_RES (108)..(108): Selenocysteine
  MOD_RES (114)..(114): Selenocysteine
  MOD_RES (165)..(165): Selenocysteine
  MOD_RES (180)..(180): Selenocysteine
  MOD_RES (197)..(197): Selenocysteine
  MOD_RES (206)..(206): Selenocysteine
  MOD_RES (214)..(214): Selenocysteine
  MOD_RES (220)..(220): Selenocysteine
  MOD_RES (226)..(226): Selenocysteine
  MOD_RES (239)..(239): Selenocysteine
  MOD_RES (243)..(243): Selenocysteine
  MOD_RES (249)..(249): Selenocysteine
  MOD_RES (255)..(255): Selenocysteine
  MOD_RES (262)..(262): Selenocysteine
MNXSPGXVGSDPVILAXAGYDHXVRFWQAHSGICXRXVQHQDSQVNALEVXPDRSMIAAAVQPVSLGYQHIRMYDLNSNNPNPIISYDGVNKNIASVGFHEDGRWMYXGGEDCXARIWDLRSRNLQCQRIFQVNAPINCVCLHPNQAELIVGDQSGAIHIWDLKXDHNEQLIPEPEVSIXSAHIDPDASYMAAVNSXGNCYVWNLXGGIGDEVXQLIPKXKIPAHXRYALQCRFSPDSXLLAXCSADQXCKIWRXSNFSLMXELSIKSGNPGESS

SEQ ID NO: 16507 - protein, 71 aa, Homo sapiens
  MOD_RES (3)..(3): Selenocysteine
  MOD_RES (7)..(7): Selenocysteine
  MOD_RES (17)..(17): Selenocysteine
  MOD_RES (23)..(23): Selenocysteine
  MOD_RES (35)..(35): Selenocysteine
  MOD_RES (37)..(37): Selenocysteine
  MOD_RES (50)..(50): Selenocysteine
MNXSPGXVGSDPVILAXAGYDHXVRFWQAHSGICXRXVQHQDSVNALEVXPDRSMIAAAACVPRLPAHPHV

SEQ ID NO: 16508 - protein, 325 aa, Homo sapiens
  MOD_RES (3)..(3): Selenocysteine
  MOD_RES (7)..(7): Selenocysteine
  MOD_RES (17)..(17): Selenocysteine
  MOD_RES (23)..(23): Selenocysteine
  MOD_RES (35)..(35): Selenocysteine
  MOD_RES (37)..(37): Selenocysteine
  MOD_RES (50)..(50): Selenocysteine
  MOD_RES (101)..(101): Selenocysteine
  MOD_RES (107)..(107): Selenocysteine
  MOD_RES (158)..(158): Selenocysteine
  MOD_RES (173)..(173): Selenocysteine
  MOD_RES (190)..(190): Selenocysteine
  MOD_RES (199)..(199): Selenocysteine
  MOD_RES (207)..(207): Selenocysteine
  MOD_RES (213)..(213): Selenocysteine
  MOD_RES (219)..(219): Selenocysteine
  MOD_RES (232)..(232): Selenocysteine
  MOD_RES (236)..(236): Selenocysteine
  MOD_RES (242)..(242): Selenocysteine
  MOD_RES (248)..(248): Selenocysteine
  MOD_RES (255)..(255): Selenocysteine
  MOD_RES (286)..(286): Selenocysteine
  MOD_RES (300)..(300): Selenocysteine
MNXSPGXVGSDPVILAXAGYDHXVRFWQAHSGICXRXVQHQDSVNALEVXPDRSMIAAAGYQHIRMYDLNSNNPNPIISYDGVNKNIASVGFHEDGRWMYXGGEDCXARIWDLRSRNLQCQRIFQVNAPINCVCLHPNQAELIVGDQSGAIHIWDLKXDHNEQLIPEPEVSIXSAHIDPDASYMAAVNSXGNCYVWNLXGGIGDEVXQLIPKXKIPAHXRYALQCRFSPDSXLLAXCSADQXCKIWRXSNFSLMXELSIKSGNPGESSRGWMWGCAFSGDSQYIVXASSDNLARLWCVEXGEIKREYGGHQKAVVCLAFNDSVLG

SEQ ID NO: 16509 - protein, 248 aa, Homo sapiens
  MOD_RES (2)..(2): Selenocysteine
  MOD_RES (50)..(50): Selenocysteine
  MOD_RES (105)..(105): Selenocysteine
  MOD_RES (124)..(124): Selenocysteine
  MOD_RES (128)..(128): Selenocysteine
  MOD_RES (150)..(150): Selenocysteine
  MOD_RES (170)..(170): Selenocysteine
  MOD_RES (176)..(176): Selenocysteine
MXEPGASPEDPWVKASPVGAHAGEGRAGRARARRGAGRRGASLLSPKSPXLSVPRGCREDSSHPACAKVEYAYSDNSLDPDDEDSDYHQEAYKESYKDRRRRAHXQAEQKRRDAIKRGYDDLQXIVPXCQQQDFSIGSQKLSKAIVLQKXIDYIQFLHKEKKKQEEEVSXLRKDVXALKIMKVNYEQIVKAHQDNPHEGEDQVSDQVKFNVFQGIMDSLFQSFNASISVASFQELSACVFSWIEEHCK

SEQ ID NO: 16510 - protein, 298 aa, Homo sapiens
  MOD_RES (2)..(2): Selenocysteine
  MOD_RES (50)..(50): Selenocysteine
  MOD_RES (87)..(87): Selenocysteine
  MOD_RES (102)..(102): Selenocysteine
  MOD_RES (110)..(110): Selenocysteine
  MOD_RES (135)..(135): Selenocysteine
  MOD_RES (154)..(154): Selenocysteine
  MOD_RES (158)..(158): Selenocysteine
  MOD_RES (180)..(180): Selenocysteine
  MOD_RES (200)..(200): Selenocysteine
  MOD_RES (206)..(206): Selenocysteine
  MOD_RES (281)..(281): Selenocysteine
MXEPGASPEDPWVKASPVGAHAGEGRAGRARARRGAGRRGASLLSPKSPXLSVPRGCREDSSHPACAKVEYAYSDNSLDPGLFVESXRKGSVVSRANSIGSXSASSVPNXDDEDSDYHQEAYKESYKDRRRRAHXQAEQKRRDAIKRGYDDLQXIVPXCQQQDFSIGSQKLSKAIVLQKXIDYIQFLHKEKKKQEEEVSXLRKDVXALKIMKVNYEQIVKAHQDNPHEGEDQVSDQVKFNVFQGIMDSLFQSFNASISVASFQELSACVFSWIEEHCKPQXLREIVIGVLHQLKNQLY

SEQ ID NO: 16511 - protein, 214 aa, Homo sapiens
  MOD_RES (2)..(2): Selenocysteine
  MOD_RES (51)..(51): Selenocysteine
  MOD_RES (70)..(70): Selenocysteine
  MOD_RES (74)..(74): Selenocysteine
  MOD_RES (96)..(96): Selenocysteine
  MOD_RES (116)..(116): Selenocysteine
  MOD_RES (122)..(122): Selenocysteine
  MOD_RES (197)..(197): Selenocysteine
MXEPGASPEDPWVKVEYAYSDNSLDPDDEDSDYHQEAYKESYKDRRRRAHXQAEQKRRDAIKRGYDDLQXIVPXCQQQDFSIGSQKLSKAIVLQKXIDYIQFLHKEKKKQEEEVSXLRKDVXALKIMKVNYEQIVKAHQDNPHEGEDQVSDQVKFNVFQGIMDSLFQSFNASISVASFQELSACVFSWIEEHCKPQXLREIVIGVLHQLKNQLY

SEQ ID NO: 16512 - protein, 244 aa, Homo sapiens
  MOD_RES (2)..(2): Selenocysteine
  MOD_RES (33)..(33): Selenocysteine
  MOD_RES (48)..(48): Selenocysteine
  MOD_RES (56)..(56): Selenocysteine
  MOD_RES (81)..(81): Selenocysteine
  MOD_RES (100)..(100): Selenocysteine
  MOD_RES (104)..(104): Selenocysteine
  MOD_RES (126)..(126): Selenocysteine
  MOD_RES (146)..(146): Selenocysteine
  MOD_RES (152)..(152): Selenocysteine
  MOD_RES (227)..(227): Selenocysteine
MXEPGASPEDPWVKVEYAYSDNSLDPGLFVESXRKGSVVSRANSIGSXSASSVPNXDDEDSDYHQEAYKESYKDRRRRAHXQAEQKRRDAIKRGYDDLQXIVPXCQQQDFSIGSQKLSKAIVLQKXIDYIQFLHKEKKKQEEEVSXLRKDVXALKIMKVNYEQIVKAHQDNPHEGEDQVSDQVKFNVFQGIMDSLFQSFNASISVASFQELSACVFSWIEEHCKPQXLREIVIGVLHQLKNQLY

SEQ ID NO: 16513 - protein, 919 aa, Homo sapiens
  MOD_RES (35)..(35): Selenocysteine
  MOD_RES (48)..(48): Selenocysteine
  MOD_RES (101)..(101): Selenocysteine
  MOD_RES (106)..(106): Selenocysteine
  MOD_RES (109)..(109): Selenocysteine
  MOD_RES (115)..(115): Selenocysteine
  MOD_RES (127)..(127): Selenocysteine
  MOD_RES (134)..(134): Selenocysteine
  MOD_RES (187)..(187): Selenocysteine
  MOD_RES (205)..(206): Selenocysteine
  MOD_RES (227)..(227): Selenocysteine
  MOD_RES (262)..(262): Selenocysteine
  MOD_RES (274)..(274): Selenocysteine
  MOD_RES (284)..(284): Selenocysteine
  MOD_RES (288)..(288): Selenocysteine
  MOD_RES (328)..(328): Selenocysteine
  MOD_RES (370)..(371): Selenocysteine
  MOD_RES (375)..(375): Selenocysteine
  MOD_RES (387)..(387): Selenocysteine
  MOD_RES (402)..(402): Selenocysteine
  MOD_RES (405)..(405): Selenocysteine
  MOD_RES (413)..(413): Selenocysteine
  MOD_RES (433)..(433): Selenocysteine
  MOD_RES (458)..(458): Selenocysteine
  MOD_RES (467)..(467): Selenocysteine
  MOD_RES (485)..(485): Selenocysteine
  MOD_RES (487)..(487): Selenocysteine
  MOD_RES (491)..(491): Selenocysteine
  MOD_RES (493)..(493): Selenocysteine
  MOD_RES (499)..(500): Selenocysteine
  MOD_RES (510)..(511): Selenocysteine
  MOD_RES (529)..(529): Selenocysteine
  MOD_RES (537)..(537): Selenocysteine
  MOD_RES (547)..(547): Selenocysteine
  MOD_RES (590)..(590): Selenocysteine
  MOD_RES (603)..(603): Selenocysteine
  MOD_RES (632)..(632): Selenocysteine
  MOD_RES (638)..(638): Selenocysteine
  MOD_RES (652)..(652): Selenocysteine
  MOD_RES (673)..(673): Selenocysteine
  MOD_RES (675)..(675): Selenocysteine
  MOD_RES (753)..(753): Selenocysteine
  MOD_RES (758)..(758): Selenocysteine
  MOD_RES (762)..(762): Selenocysteine
  MOD_RES (767)..(767): Selenocysteine
  MOD_RES (793)..(793): Selenocysteine
  MOD_RES (804)..(804): Selenocysteine
  MOD_RES (809)..(809): Selenocysteine
  MOD_RES (826)..(826): Selenocysteine
  MOD_RES (828)..(828): Selenocysteine
  MOD_RES (854)..(854): Selenocysteine
  MOD_RES (863)..(863): Selenocysteine
  MOD_RES (884)..(884): Selenocysteine
  MOD_RES (890)..(890): Selenocysteine
  MOD_RES (892)..(892): Selenocysteine
  MOD_RES (896)..(896): Selenocysteine
  MOD_RES (910)..(910): Selenocysteine
MAADVFMCSPRRPRSRGRQVLLKPQVSEDDDDSDXDEPSPPPASGAAXPARAHASAAPPPPRAGPGREEPPRRQQIIHSGHFMVSSPHREHPPKKGYDFDXVNKQXCQXYSFGKXSSCHLSIDASLXKLFECMXLAYSGKLVSPKWKNFKGLKLQWRDKIRLNNAIWRAWYMQYLEKRKNPVCHFVXPLDGSVDVDEHRRPEAIXXEGKYWKSRIEIVIREYHKWRXYFKKRLQQHKDEDLSSLVQDDDMLYWHKHGDGWKXPVPMEEDPLLDXDMLMSEFSDXLFSXLSSHQPVAWPNPREIAHLGNADMIQPGLIPLQPNLDFMDXFEPFQDLFSSSRSIFGSMLPASASAPVPDPNNPPAQESILPXXALPXVSLPDSLIAPPXAPSLAHMDEQGCEHXSRXEDPFIQPXDFGPSEPPLSVPQPFLPVFXMPLLSPSPAPPPISPVLPLVPPPAXALNPPAPPXFHQPQKFAGVNKAPSVIXHXASAXLXHDAPAXXFSQSQGLVIXXHHPAPSAAPCGLALSPVXRPPQPRLXFVHPKPVSLXGGRPKQPHKIVPAPKPEPVSLVLKNARIAPAAFSGQPQAVIMXSGPLKREGMLASXVSQSNVVIAPAAIARAPGVPEFHSSILVXDLGHGXSSPPAPVSRLFPSXAQDPLGKGEQVPLHGGSPQVXVXGPSRDCPNSGQASPCASEQSPSPQSPQNNCSGKSDPKNVAALKNRQMKHISAEQKRRFNIKMCFDMLNSLISNNSKLXSHAIXLQKXVEYIXKLQQERGQMQEEARRLREEIEELNAXIISCQQLLPAXGVPVXRRQFDHMKDMFDEYVKXRXLQNWKFWIFSIIIKPLFESFKGMVSXSSLEELHRXALSWLDQHCSLPILRPMVLSXLRQLSXSXSILXDPAQLPEQASKAVXRIGKRLGES

SEQ ID NO: 16514 - protein, 217 aa, Homo sapiens
  MOD_RES (9)..(9): Selenocysteine
  MOD_RES (12)..(12): Selenocysteine
  MOD_RES (20)..(20): Selenocysteine
  MOD_RES (47)..(47): Selenocysteine
  MOD_RES (56)..(56): Selenocysteine
  MOD_RES (74)..(74): Selenocysteine
  MOD_RES (76)..(76): Selenocysteine
  MOD_RES (80)..(80): Selenocysteine
  MOD_RES (82)..(82): Selenocysteine
  MOD_RES (88)..(89): Selenocysteine
  MOD_RES (99)..(100): Selenocysteine
  MOD_RES (118)..(118): Selenocysteine
  MOD_RES (126)..(126): Selenocysteine
  MOD_RES (136)..(136): Selenocysteine
  MOD_RES (173)..(173): Selenocysteine
  MOD_RES (195)..(199): Selenocysteine
  MOD_RES (203)..(203): Selenocysteine
  MOD_RES (207)..(207): Selenocysteine
  MOD_RES (214)..(214): Selenocysteine
MDEQGCEHXSRXEDPFIQPXDFGPSEPPLSVPPPISPVLPLVPPPAXALNPPAPPXFHQPQKFAGVNKAPSVIXHXASAXLXHDAPAXXFSQSQGLVIXXHHPAPSAAPCGLALSPVXRPPQPRLXFVHPKPVSLXGGRPKQPHKIVPAPKPEPVSLVLKNARIAPGEPGGEXQCGAPPDPEGCFPIPKAFKLVXXXXXLVCXCMRXHIHLNEXKVS

SEQ ID NO: 16515 - protein, 526 aa, Homo sapiens
  MOD_RES (9)..(9): Selenocysteine
  MOD_RES (12)..(12): Selenocysteine
  MOD_RES (20)..(20): Selenocysteine
  MOD_RES (40)..(40): Selenocysteine
  MOD_RES (65)..(65): Selenocysteine
  MOD_RES (74)..(74): Selenocysteine
  MOD_RES (92)..(92): Selenocysteine
  MOD_RES (94)..(94): Selenocysteine
  MOD_RES (98)..(98): Selenocysteine
  MOD_RES (100)..(100): Selenocysteine
  MOD_RES (106)..(107): Selenocysteine
  MOD_RES (117)..(118): Selenocysteine
  MOD_RES (136)..(136): Selenocysteine
  MOD_RES (144)..(144): Selenocysteine
  MOD_RES (154)..(154): Selenocysteine
  MOD_RES (197)..(197): Selenocysteine
  MOD_RES (210)..(210): Selenocysteine
  MOD_RES (239)..(239): Selenocysteine
  MOD_RES (245)..(245): Selenocysteine
  MOD_RES (259)..(259): Selenocysteine
  MOD_RES (280)..(280): Selenocysteine
  MOD_RES (282)..(282): Selenocysteine
  MOD_RES (360)..(360): Selenocysteine
  MOD_RES (365)..(365): Selenocysteine
  MOD_RES (369)..(369): Selenocysteine
  MOD_RES (374)..(374): Selenocysteine
  MOD_RES (400)..(400): Selenocysteine
  MOD_RES (411)..(411): Selenocysteine
  MOD_RES (416)..(416): Selenocysteine
  MOD_RES (433)..(433): Selenocysteine
  MOD_RES (435)..(435): Selenocysteine
  MOD_RES (461)..(461): Selenocysteine
  MOD_RES (470)..(470): Selenocysteine
  MOD_RES (491)..(491): Selenocysteine
  MOD_RES (497)..(497): Selenocysteine
  MOD_RES (499)..(499): Selenocysteine
  MOD_RES (503)..(503): Selenocysteine
  MOD_RES (517)..(517): Selenocysteine
MDEQGCEHXSRXEDPFIQPXDFGPSEPPLSVPQPFLPVFXMPLLSPSPAPPPISPVLPLVPPPAXALNPPAPPXFHQPQKFAGVNKAPSVIXHXASAXLXHDAPAXXFSQSQGLVIXXHHPAPSAAPCGLALSPVXRPPQPRLXFVHPKPVSLXGGRPKQPHKIVPAPKPEPVSLVLKNARIAPAAFSGQPQAVIMXSGPLKREGMLASXVSQSNVVIAPAAIARAPGVPEFHSSILVXDLGHGXSSPPAPVSRLFPSXAQDPLGKGEQVPLHGGSPQVXVXGPSRDCPNSGQASPCASEQSPSPQSPQNNCSGKSDPKNVAALKNRQMKHISAEQKRRFNIKMCFDMLNSLISNNSKLXSHAIXLQKXVEYIXKLQQERGQMQEEARRLREEIEELNAXIISCQQLLPAXGVPVXRRQFDHMKDMFDEYVKXRXLQNWKFWIFSIIIKPLFESFKGMVSXSSLEELHRXALSWLDQHCSLPILRPMVLSXLRQLSXSXSILXDPAQLPEQASKAVXRIGKRLGES

SEQ ID NO: 16516 - protein, 74 aa, Homo sapiens
  MOD_RES (13)..(13): Selenocysteine
  MOD_RES (25)..(25): Selenocysteine
  MOD_RES (35)..(35): Selenocysteine
  MOD_RES (39)..(39): Selenocysteine
MLYWHKHGDGWKXPVPMEEDPLLDXDMLMSEFSDXLFSXLSSHQPVAWPNPREIAHLGNADMIQPGLIPLQPNL

SEQ ID NO: 16517 - protein, 308 aa, Homo sapiens
  MOD_RES (18)..(18): Selenocysteine
  MOD_RES (22)..(22): Selenocysteine
  MOD_RES (61)..(61): Selenocysteine
  MOD_RES (74)..(74): Selenocysteine
  MOD_RES (103)..(103): Selenocysteine
  MOD_RES (109)..(109): Selenocysteine
  MOD_RES (123)..(123): Selenocysteine
  MOD_RES (144)..(144): Selenocysteine
  MOD_RES (146)..(146): Selenocysteine
  MOD_RES (224)..(224): Selenocysteine
  MOD_RES (229)..(229): Selenocysteine
  MOD_RES (233)..(233): Selenocysteine
  MOD_RES (238)..(238): Selenocysteine
  MOD_RES (264)..(264): Selenocysteine
  MOD_RES (275)..(275): Selenocysteine
  MOD_RES (280)..(280): Selenocysteine
  MOD_RES (297)..(297): Selenocysteine
  MOD_RES (299)..(299): Selenocysteine
MVLGALVALSSCPLGLRXSCLXGREAASAGWARPCGPGLHLNILLILAAAFSGQPQAVIMXSGPLKREGMLASXVSQSNVVIAPAAIARAPGVPEFHSSILVXDLGHGXSSPPAPVSRLFPSXAQDPLGKGEQVPLHGGSPQVXVXGPSRDCPNSGQASPCASEQSPSPQSPQNNCSGKSDPKNVAALKNRQMKHISAEQKRRFNIKMCFDMLNSLISNNSKLXSHAIXLQKXVEYIXKLQQERGQMQEEARRLREEIEELNAXIISCQQLLPAXGVPVXRRQFDHMKDMFDEYVKXRXLQNWKFWIV

SEQ ID NO: 16518 - protein, 171 aa, Homo sapiens
  MOD_RES (1)..(1): Any amino acid
  MOD_RES (9)..(9): Selenocysteine
  MOD_RES (11)..(11): Selenocysteine
  MOD_RES (89)..(89): Selenocysteine
  MOD_RES (94)..(94): Selenocysteine
  MOD_RES (98)..(98): Selenocysteine
  MOD_RES (103)..(103): Selenocysteine
  MOD_RES (129)..(129): Selenocysteine
  MOD_RES (148)..(148): Selenocysteine
  MOD_RES (171)..(171): Selenocysteine
XHGGSPQVXVXGPSRDCPNSGQASPCASEQSPSPQSPQNNCSGKSDPKNVAALKNRQMKHISAEQKRRFNIKMCFDMLNSLISNNSKLXSHAIXLQKXVEYIXKLQQERGQMQEEARRLREEIEELNAXIIDPFSVGRYFPAPGERSXPVQPPSGLQSPAPLRACLFFNHX

SEQ ID NO: 16519 - protein, 213 aa, Homo sapiens
  MOD_RES (27)..(27): Selenocysteine
  MOD_RES (85)..(85): Selenocysteine
  MOD_RES (87)..(87): Selenocysteine
  MOD_RES (137)..(137): Selenocysteine
  MOD_RES (168)..(168): Selenocysteine
  MOD_RES (181)..(181): Selenocysteine
MAGALAGLAAGLQVPRVAPSPDSDSDXDSEDPSLRRSAGGLLRSQVIHSGHFMVSSPHSDSLPRRRDQEGSVGPSDFGPRSIDPXLXRLFECLSLAYSGKLVSPKWKNFKGLKLLCRDKIRLNNAIWRAWYIQYFFXNSRLPQPPMPSNFPEPPSFSPVVDSLFSSGXLGPEVPPASSAMXHLSGHSRLQARNSCPGPLDSSAFLSSDFLLPE

SEQ ID NO: 16520 - protein, 721 aa, Homo sapiens
  MOD_RES (27)..(27): Selenocysteine
  MOD_RES (85)..(85): Selenocysteine
  MOD_RES (87)..(87): Selenocysteine
  MOD_RES (147)..(147): Selenocysteine
  MOD_RES (194)..(194): Selenocysteine
  MOD_RES (211)..(211): Selenocysteine
  MOD_RES (242)..(242): Selenocysteine
  MOD_RES (255)..(255): Selenocysteine
  MOD_RES (329)..(329): Selenocysteine
  MOD_RES (346)..(346): Selenocysteine
  MOD_RES (365)..(365): Selenocysteine
  MOD_RES (375)..(375): Selenocysteine
  MOD_RES (416)..(416): Selenocysteine
  MOD_RES (421)..(421): Selenocysteine
  MOD_RES (426)..(427): Selenocysteine
  MOD_RES (436)..(436): Selenocysteine
  MOD_RES (440)..(440): Selenocysteine
  MOD_RES (456)..(456): Selenocysteine
  MOD_RES (466)..(466): Selenocysteine
  MOD_RES (473)..(473): Selenocysteine
  MOD_RES (478)..(478): Selenocysteine
  MOD_RES (482)..(482): Selenocysteine
  MOD_RES (492)..(492): Selenocysteine
  MOD_RES (531)..(531): Selenocysteine
  MOD_RES (553)..(553): Selenocysteine
  MOD_RES (559)..(559): Selenocysteine
  MOD_RES (577)..(577): Selenocysteine
  MOD_RES (584)..(584): Selenocysteine
  MOD_RES (597)..(598): Selenocysteine
  MOD_RES (602)..(602): Selenocysteine
  MOD_RES (644)..(644): Selenocysteine
  MOD_RES (649)..(649): Selenocysteine
  MOD_RES (666)..(666): Selenocysteine
  MOD_RES (668)..(668): Selenocysteine
  MOD_RES (694)..(694): Selenocysteine
  MOD_RES (699)..(699): Selenocysteine
  MOD_RES (703)..(703): Selenocysteine
  MOD_RES (721)..(721): Selenocysteine
MAGALAGLAAGLQVPRVAPSPDSDSDXDSEDPSLRRSAGGLLRSQVIHSGHFMVSSPHSDSLPRRRDQEGSVGPSDFGPRSIDPXLXRLFECLSLAYSGKLVSPKWKNFKGLKLLCRDKIRLNNAIWRAWYIQYVKRRKSPVCGFVXPLQGPEADAHRKPEAVVLEGNYWKRRIELPPEDAYVGNADMIQPDLXPLQPSLDDFMDISDFFXNSRLPQPPMPSNFPEPPSFSPVVDSLFSSGXLGPEVPPASSAMXHLSGHSRLQARNSCPGPLDSSAFLSSDFLLPEDPKPRLPPPPVPPPLLHYPPPAKVPGLEPCPPPPFPPMAPPXALLQEEPLFSPRFPFPXVPPAPGVSPLPAPAAFPPXPQSVPSPAPXPFPIELLPLGYSEPAFGPCFSMPRGKPPAPSPRGQKASPPXLAPAXASPPXXAGSNNPCLXQLLXAAKPEQALEPPLVSSXLLRSPGSPEXVPEFPCXFLPPXPAPXPPRPPPGPAXLAPSRPLLVPKAERLSPPAPSGSERRLSGDLSSMPGPGXLSVRVSPPQPILSRGRPDSNKXENRRIXHISAEQKRRFNIKLGFDXLHGLVSXLSAQPSLKVSKAXXLQKXAEYILMLQQERAGLQEEAQQLRDEIEELNAAINLCQQQLPAXGVPIXHQRFDQMRDMFDDYVRXRXLHNWKFWVFSILIRPLFESFNGMVSXASVHXLRQXSLAWLDQYCSLPALRPSX

SEQ ID NO: 16521 - protein, 575 aa, Homo sapiens
  MOD_RES (27)..(27): Selenocysteine
  MOD_RES (85)..(85): Selenocysteine
  MOD_RES (87)..(87): Selenocysteine
  MOD_RES (147)..(147): Selenocysteine
  MOD_RES (255)..(255): Selenocysteine
  MOD_RES (258)..(258): Selenocysteine
  MOD_RES (260)..(260): Selenocysteine
  MOD_RES (287)..(287): Selenocysteine
  MOD_RES (304)..(304): Selenocysteine
  MOD_RES (335)..(335): Selenocysteine
  MOD_RES (348)..(348): Selenocysteine
  MOD_RES (422)..(422): Selenocysteine
  MOD_RES (439)..(439): Selenocysteine
  MOD_RES (458)..(458): Selenocysteine
  MOD_RES (468)..(468): Selenocysteine
  MOD_RES (509)..(509): Selenocysteine
  MOD_RES (514)..(514): Selenocysteine
  MOD_RES (519)..(520): Selenocysteine
  MOD_RES (529)..(529): Selenocysteine
  MOD_RES (533)..(533): Selenocysteine
  MOD_RES (549)..(549): Selenocysteine
  MOD_RES (566)..(566): Selenocysteine
MAGALAGLAAGLQVPRVAPSPDSDSDXDSEDPSLRRSAGGLLRSQVIHSGHFMVSSPHSDSLPRRRDQEGSVGPSDFGPRSIDPXLXRLFECLSLAYSGKLVSPKWKNFKGLKLLCRDKIRLNNAIWRAWYIQYVKRRKSPVCGFVXPLQGPEADAHRKPEAVVLEGNYWKRRIEVVMREYHKWRIYYKKRLRKPSREDDLLAPKQAEGRWPPPEQWCKQLFSSVVPVLLGDPEEEPGGRQLLDLNCFLSDISDXLFXMXQSGPSPLQLPPEDAYVGNADMIQPDLXPLQPSLDDFMDISDFFXNSRLPQPPMPSNFPEPPSFSPVVDSLFSSGXLGPEVPPASSAMXHLSGHSRLQARNSCPGPLDSSAFLSSDFLLPEDPKPRLPPPPVPPPLLHYPPPAKVPGLEPCPPPPFPPMAPPXALLQEEPLFSPRFPFPXVPPAPGVSPLPAPAAFPPXPQSVPSPAPXPFPIELLPLGYSEPAFGPCFSMPRGKPPAPSPRGQKASPPXLAPAXASPPXXAGSNNPCLXQLLXAAKPEQALEPPLVSSXLLRSPGSPAVNGGCQGXSAPCQALGL

SEQ ID NO: 16522 - protein, 831 aa, Homo sapiens
  MOD_RES (27)..(27): Selenocysteine
  MOD_RES (85)..(85): Selenocysteine
  MOD_RES (87)..(87): Selenocysteine
  MOD_RES (147)..(147): Selenocysteine
  MOD_RES (255)..(255): Selenocysteine
  MOD_RES (258)..(258): Selenocysteine
  MOD_RES (260)..(260): Selenocysteine
  MOD_RES (287)..(287): Selenocysteine
  MOD_RES (304)..(304): Selenocysteine
  MOD_RES (335)..(335): Selenocysteine
  MOD_RES (348)..(348): Selenocysteine
  MOD_RES (422)..(422): Selenocysteine
  MOD_RES (439)..(439): Selenocysteine
  MOD_RES (458)..(458): Selenocysteine
  MOD_RES (468)..(468): Selenocysteine
  MOD_RES (509)..(509): Selenocysteine
  MOD_RES (514)..(514): Selenocysteine
  MOD_RES (519)..(520): Selenocysteine
  MOD_RES (529)..(529): Selenocysteine
  MOD_RES (533)..(533): Selenocysteine
  MOD_RES (549)..(549): Selenocysteine
  MOD_RES (560)..(560): Selenocysteine
  MOD_RES (567)..(567): Selenocysteine
  MOD_RES (572)..(572): Selenocysteine
  MOD_RES (576)..(576): Selenocysteine
  MOD_RES (586)..(586): Selenocysteine
  MOD_RES (625)..(625): Selenocysteine
  MOD_RES (651)..(651): Selenocysteine
  MOD_RES (669)..(669): Selenocysteine
  MOD_RES (676)..(676): Selenocysteine
  MOD_RES (717)..(717): Selenocysteine
  MOD_RES (722)..(722): Selenocysteine
  MOD_RES (739)..(739): Selenocysteine
  MOD_RES (741)..(741): Selenocysteine
  MOD_RES (767)..(767): Selenocysteine
  MOD_RES (772)..(772): Selenocysteine
  MOD_RES (776)..(776): Selenocysteine
  MOD_RES (793)..(793): Selenocysteine
  MOD_RES (803)..(803): Selenocysteine
  MOD_RES (805)..(805): Selenocysteine
  MOD_RES (809)..(809): Selenocysteine
  MOD_RES (819)..(819): Selenocysteine
  MOD_RES (823)..(823): Selenocysteine
  MOD_RES (826)..(826): Selenocysteine
MAGALAGLAAGLQVPRVAPSPDSDSDXDSEDPSLRRSAGGLLRSQVIHSGHFMVSSPHSDSLPRRRDQEGSVGPSDFGPRSIDPXLXRLFECLSLAYSGKLVSPKWKNFKGLKLLCRDKIRLNNAIWRAWYIQYVKRRKSPVCGFVXPLQGPEADAHRKPEAVVLEGNYWKRRIEVVMREYHKWRIYYKKRLRKPSREDDLLAPKQAEGRWPPPEQWCKQLFSSVVPVLLGDPEEEPGGRQLLDLNCFLSDISDXLFXMXQSGPSPLQLPPEDAYVGNADMIQPDLXPLQPSLDDFMDISDFFXNSRLPQPPMPSNFPEPPSFSPVVDSLFSSGXLGPEVPPASSAMXHLSGHSRLQARNSCPGPLDSSAFLSSDFLLPEDPKPRLPPPPVPPPLLHYPPPAKVPGLEPCPPPPFPPMAPPXALLQEEPLFSPRFPFPXVPPAPGVSPLPAPAAFPPXPQSVPSPAPXPFPIELLPLGYSEPAFGPCFSMPRGKPPAPSPRGQKASPPXLAPAXASPPXXAGSNNPCLXQLLXAAKPEQALEPPLVSSXLLRSPGSPQEXVPEFPCXFLPPXPAPXPPRPPPGPAXLAPSRPLLVPKAERLSPPAPSGSERRLSGDLSSMPGPGXLSVRVSPPQPILSRGRPDSNKNRRIXHISAEQKRRFNIKLGFDXLHGLVSXLSAQPSLKERAGLQEEAQQLRDEIEELNAAINLCQQQLPAXGVPIXHQRFDQMRDMFDDYVRXRXLHNWKFWVFSILIRPLFESFNGMVSXASVHXLRQXSLAWLDQYCSLPALRPXVLNSLRQLGXSXSILXDPGRIPEQAXRAVXEGXLGKPL

SEQ ID NO: 16523 - protein, 833 aa, Homo sapiens
  MOD_RES (27)..(27): Selenocysteine
  MOD_RES (85)..(85): Selenocysteine
  MOD_RES (87)..(87): Selenocysteine
  MOD_RES (147)..(147): Selenocysteine
  MOD_RES (255)..(255): Selenocysteine
  MOD_RES (258)..(258): Selenocysteine
  MOD_RES (260)..(260): Selenocysteine
  MOD_RES (287)..(287): Selenocysteine
  MOD_RES (304)..(304): Selenocysteine
  MOD_RES (335)..(335): Selenocysteine
  MOD_RES (348)..(348): Selenocysteine
  MOD_RES (422)..(422): Selenocysteine
  MOD_RES (439)..(439): Selenocysteine
  MOD_RES (458)..(458): Selenocysteine
  MOD_RES (468)..(468): Selenocysteine
  MOD_RES (509)..(509): Selenocysteine
  MOD_RES (514)..(514): Selenocysteine
  MOD_RES (519)..(520): Selenocysteine
  MOD_RES (529)..(529): Selenocysteine
  MOD_RES (533)..(533): Selenocysteine
  MOD_RES (549)..(549): Selenocysteine
  MOD_RES (560)..(560): Selenocysteine
  MOD_RES (567)..(567): Selenocysteine
  MOD_RES (572)..(572): Selenocysteine
  MOD_RES (576)..(576): Selenocysteine
  MOD_RES (586)..(586): Selenocysteine
  MOD_RES (625)..(625): Selenocysteine
  MOD_RES (647)..(647): Selenocysteine
  MOD_RES (653)..(653): Selenocysteine
  MOD_RES (671)..(671): Selenocysteine
  MOD_RES (678)..(678): Selenocysteine
  MOD_RES (719)..(719): Selenocysteine
  MOD_RES (724)..(724): Selenocysteine
  MOD_RES (741)..(741): Selenocysteine
  MOD_RES (743)..(743): Selenocysteine
  MOD_RES (769)..(769): Selenocysteine
  MOD_RES (774)..(774): Selenocysteine
  MOD_RES (778)..(778): Selenocysteine
  MOD_RES (795)..(795): Selenocysteine
  MOD_RES (805)..(805): Selenocysteine
  MOD_RES (807)..(807): Selenocysteine
  MOD_RES (811)..(811): Selenocysteine
  MOD_RES (821)..(821): Selenocysteine
  MOD_RES (825)..(825): Selenocysteine
  MOD_RES (828)..(828): Selenocysteine
MAGALAGLAAGLQVPRVAPSPDSDSDXDSEDPSLRRSAGGLLRSQVIHSGHFMVSSPHSDSLPRRRDQEGSVGPSDFGPRSIDPXLXRLFECLSLAYSGKLVSPKWKNFKGLKLLCRDKIRLNNAIWRAWYIQYVKRRKSPVCGFVXPLQGPEADAHRKPEAVVLEGNYWKRRIEVVMREYHKWRIYYKKRLRKPSREDDLLAPKQAEGRWPPPEQWCKQLFSSVVPVLLGDPEEEPGGRQLLDLNCFLSDISDXLFXMXQSGPSPLQLPPEDAYVGNADMIQPDLXPLQPSLDDFMDISDFFXNSRLPQPPMPSNFPEPPSFSPVVDSLFSSGXLGPEVPPASSAMXHLSGHSRLQARNSCPGPLDSSAFLSSDFLLPEDPKPRLPPPPVPPPLLHYPPPAKVPGLEPCPPPPFPPMAPPXALLQEEPLFSPRFPFPXVPPAPGVSPLPAPAAFPPXPQSVPSPAPXPFPIELLPLGYSEPAFGPCFSMPRGKPPAPSPRGQKASPPXLAPAXASPPXXAGSNNPCLXQLLXAAKPEQALEPPLVSSXLLRSPGSPQEXVPEFPCXFLPPXPAPXPPRPPPGPAXLAPSRPLLVPKAERLSPPAPSGSERRLSGDLSSMPGPGXLSVRVSPPQPILSRGRPDSNKXENRRIXHISAEQKRRFNIKLGFDXLHGLVSXLSAQPSLKERAGLQEEAQQLRDEIEELNAAINLCQQQLPAXGVPIXHQRFDQMRDMFDDYVRXRXLHNWKFWVFSILIRPLFESFNGMVSXASVHXLRQXSLAWLDQYCSLPALRPXVLNSLRQLGXSXSILXDPGRIPEQAXRAVXEGXLGKPL

SEQ ID NO: 16524 - protein, 850 aa, Homo sapiens
  MOD_RES (27)..(27): Selenocysteine
  MOD_RES (85)..(85): Selenocysteine
  MOD_RES (87)..(87): Selenocysteine
  MOD_RES (147)..(147): Selenocysteine
  MOD_RES (255)..(255): Selenocysteine
  MOD_RES (258)..(258): Selenocysteine
  MOD_RES (260)..(260): Selenocysteine
  MOD_RES (287)..(287): Selenocysteine
  MOD_RES (304)..(304): Selenocysteine
  MOD_RES (335)..(335): Selenocysteine
  MOD_RES (348)..(348): Selenocysteine
  MOD_RES (422)..(422): Selenocysteine
  MOD_RES (439)..(439): Selenocysteine
  MOD_RES (458)..(458): Selenocysteine
  MOD_RES (468)..(468): Selenocysteine
  MOD_RES (509)..(509): Selenocysteine
  MOD_RES (514)..(514): Selenocysteine
  MOD_RES (519)..(520): Selenocysteine
  MOD_RES (529)..(529): Selenocysteine
  MOD_RES (533)..(533): Selenocysteine
  MOD_RES (549)..(549): Selenocysteine
  MOD_RES (560)..(560): Selenocysteine
  MOD_RES (567)..(567): Selenocysteine
  MOD_RES (572)..(572): Selenocysteine
  MOD_RES (576)..(576): Selenocysteine
  MOD_RES (586)..(586): Selenocysteine
  MOD_RES (625)..(625): Selenocysteine
  MOD_RES (651)..(651): Selenocysteine
  MOD_RES (669)..(669): Selenocysteine
  MOD_RES (676)..(676): Selenocysteine
  MOD_RES (689)..(690): Selenocysteine
  MOD_RES (694)..(694): Selenocysteine
  MOD_RES (736)..(736): Selenocysteine
  MOD_RES (741)..(741): Selenocysteine
  MOD_RES (758)..(758): Selenocysteine
  MOD_RES (760)..(760): Selenocysteine
  MOD_RES (786)..(786): Selenocysteine
  MOD_RES (791)..(791): Selenocysteine
  MOD_RES (795)..(795): Selenocysteine
  MOD_RES (812)..(812): Selenocysteine
  MOD_RES (822)..(822): Selenocysteine
  MOD_RES (824)..(824): Selenocysteine
  MOD_RES (828)..(828): Selenocysteine
  MOD_RES (838)..(838): Selenocysteine
  MOD_RES (842)..(842): Selenocysteine
  MOD_RES (845)..(845): Selenocysteine
MAGALAGLAAGLQVPRVAPSPDSDSDXDSEDPSLRRSAGGLLRSQVIHSGHFMVSSPHSDSLPRRRDQEGSVGPSDFGPRSIDPXLXRLFECLSLAYSGKLVSPKWKNFKGLKLLCRDKIRLNNAIWRAWYIQYVKRRKSPVCGFVXPLQGPEADAHRKPEAVVLEGNYWKRRIEVVMREYHKWRIYYKKRLRKPSREDDLLAPKQAEGRWPPPEQWCKQLFSSVVPVLLGDPEEEPGGRQLLDLNCFLSDISDXLFXMXQSGPSPLQLPPEDAYVGNADMIQPDLXPLQPSLDDFMDISDFFXNSRLPQPPMPSNFPEPPSFSPVVDSLFSSGXLGPEVPPASSAMXHLSGHSRLQARNSCPGPLDSSAFLSSDFLLPEDPKPRLPPPPVPPPLLHYPPPAKVPGLEPCPPPPFPPMAPPXALLQEEPLFSPRFPFPXVPPAPGVSPLPAPAAFPPXPQSVPSPAPXPFPIELLPLGYSEPAFGPCFSMPRGKPPAPSPRGQKASPPXLAPAXASPPXXAGSNNPCLXQLLXAAKPEQALEPPLVSSXLLRSPGSPQEXVPEFPCXFLPPXPAPXPPRPPPGPAXLAPSRPLLVPKAERLSPPAPSGSERRLSGDLSSMPGPGXLSVRVSPPQPILSRGRPDSNKNRRIXHISAEQKRRFNIKLGFDXLHGLVSXLSAQPSLKVSKAXXLQKXAEYILMLQQERAGLQEEAQQLRDEIEELNAAINLCQQQLPAXGVPIXHQRFDQMRDMFDDYVRXRXLHNWKFWVFSILIRPLFESFNGMVSXASVHXLRQXSLAWLDQYCSLPALRPXVLNSLRQLGXSXSILXDPGRIPEQAXRAVXEGXLGKPL

SEQ ID NO: 16525 - protein, 852 aa, Homo sapiens
  MOD_RES (27)..(27): Selenocysteine
  MOD_RES (85)..(85): Selenocysteine
  MOD_RES (87)..(87): Selenocysteine
  MOD_RES (147)..(147): Selenocysteine
  MOD_RES (255)..(255): Selenocysteine
  MOD_RES (258)..(258): Selenocysteine
  MOD_RES (260)..(260): Selenocysteine
  MOD_RES (287)..(287): Selenocysteine
  MOD_RES (304)..(304): Selenocysteine
  MOD_RES (335)..(335): Selenocysteine
  MOD_RES (348)..(348): Selenocysteine
  MOD_RES (422)..(422): Selenocysteine
  MOD_RES (439)..(439): Selenocysteine
  MOD_RES (458)..(458): Selenocysteine
  MOD_RES (468)..(468): Selenocysteine
  MOD_RES (509)..(509): Selenocysteine
  MOD_RES (514)..(514): Selenocysteine
  MOD_RES (519)..(520): Selenocysteine
  MOD_RES (529)..(529): Selenocysteine
  MOD_RES (533)..(533): Selenocysteine
  MOD_RES (549)..(549): Selenocysteine
  MOD_RES (560)..(560): Selenocysteine
  MOD_RES (567)..(567): Selenocysteine
  MOD_RES (572)..(572): Selenocysteine
  MOD_RES (576)..(576): Selenocysteine
  MOD_RES (586)..(586): Selenocysteine
  MOD_RES (625)..(625): Selenocysteine
  MOD_RES (647)..(647): Selenocysteine
  MOD_RES (653)..(653): Selenocysteine
  MOD_RES (671)..(671): Selenocysteine
  MOD_RES (678)..(678): Selenocysteine
  MOD_RES (691)..(692): Selenocysteine
  MOD_RES (696)..(696): Selenocysteine
  MOD_RES (738)..(738): Selenocysteine
  MOD_RES (743)..(743): Selenocysteine
  MOD_RES (760)..(760): Selenocysteine
  MOD_RES (762)..(762): Selenocysteine
  MOD_RES (788)..(788): Selenocysteine
  MOD_RES (793)..(793): Selenocysteine
  MOD_RES (797)..(797): Selenocysteine
  MOD_RES (814)..(814): Selenocysteine
  MOD_RES (824)..(824): Selenocysteine
  MOD_RES (826)..(826): Selenocysteine
  MOD_RES (830)..(830): Selenocysteine
  MOD_RES (840)..(840): Selenocysteine
  MOD_RES (844)..(844): Selenocysteine
  MOD_RES (847)..(847): Selenocysteine
MAGALAGLAAGLQVPRVAPSPDSDSDXDSEDPSLRRSAGGLLRSQVIHSGHFMVSSPHSDSLPRRRDQEGSVGPSDFGPRSIDPXLXRLFECLSLAYSGKLVSPKWKNFKGLKLLCRDKIRLNNAIWRAWYIQYVKRRKSPVCGFVXPLQGPEADAHRKPEAVVLEGNYWKRRIEVVMREYHKWRIYYKKRLRKPSREDDLLAPKQAEGRWPPPEQWCKQLFSSVVPVLLGDPEEEPGGRQLLDLNCFLSDISDXLFXMXQSGPSPLQLPPEDAYVGNADMIQPDLXPLQPSLDDFMDISDFFXNSRLPQPPMPSNFPEPPSFSPVVDSLFSSGXLGPEVPPASSAMXHLSGHSRLQARNSCPGPLDSSAFLSSDFLLPEDPKPRLPPPPVPPPLLHYPPPAKVPGLEPCPPPPFPPMAPPXALLQEEPLFSPRFPFPXVPPAPGVSPLPAPAAFPPXPQSVPSPAPXPFPIELLPLGYSEPAFGPCFSMPRGKPPAPSPRGQKASPPXLAPAXASPPXXAGSNNPCLXQLLXAAKPEQALEPPLVSSXLLRSPGSPQEXVPEFPCXFLPPXPAPXPPRPPPGPAXLAPSRPLLVPKAERLSPPAPSGSERRLSGDLSSMPGPGXLSVRVSPPQPILSRGRPDSNKXENRRIXHISAEQKRRFNIKLGFDXLHGLVSXLSAQPSLKVSKAXXLQKXAEYILMLQQERAGLQEEAQQLRDEIEELNAAINLCQQQLPAXGVPIXHQRFDQMRDMFDDYVRXRXLHNWKFWVFSILIRPLFESFNGMVSXASVHXLRQXSLAWLDQYCSLPALRPXVLNSLRQLGXSXSILXDPGRIPEQAXRAVXEGXLGKPL

SEQ ID NO: 16526 - protein, 235 aa, Homo sapiens
  MOD_RES (44)..(44): Selenocysteine
  MOD_RES (120)..(120): Selenocysteine
  MOD_RES (138)..(138): Selenocysteine
  MOD_RES (217)..(217): Selenocysteine
  MOD_RES (220)..(220): Selenocysteine
  MOD_RES (222)..(222): Selenocysteine
PKWKNFKGLKLLCRDKIRLNNAIWRAWYIQYVKRRKSPVCGFVXPLQGPEADAHRKPEAVVLEGNYWKRRIEVVMREYHKWRIYYKKRVSGGGPGRPQSFPPAAAGYRPPRKIPGKGILXPELAPLGPSIQSRADSAXVWPQRLLAASLPRGRLRKPSREDDLLAPKQAEGRWPPPEQWCKQLFSSVVPVLLGDPEEEPGGRQLLDLNCFLSDISDXLFXMXQSGPSPLQLPPED

SEQ ID NO: 16527 - protein, 270 aa, Homo sapiens
  MOD_RES (12)..(12): Selenocysteine
  MOD_RES (31)..(31): Selenocysteine
  MOD_RES (41)..(41): Selenocysteine
  MOD_RES (66)..(66): Selenocysteine
  MOD_RES (84)..(84): Selenocysteine
  MOD_RES (88)..(88): Selenocysteine
  MOD_RES (147)..(147): Selenocysteine
  MOD_RES (157)..(157): Selenocysteine
  MOD_RES (174)..(174): Selenocysteine
  MOD_RES (206)..(206): Selenocysteine
  MOD_RES (214)..(214): Selenocysteine
  MOD_RES (249)..(249): Selenocysteine
  MOD_RES (263)..(263): Selenocysteine
  MOD_RES (266)..(266): Selenocysteine
MFAPRLLDFQKXKYARFMNHRVPAHKRYQPXEYEHAANCAXHAFWIIPSILGSSNLYFLSDDDWEXISAWIYGLGLCGLFVVSXVFHXISWKKSHLRMVEHCLHMFDRMVIYFFIAASYAPWLNLRELGPWASHMRWLVWIMASVGXIYVFFFHERXGSCVQFLRGEACPKAGXACLPARYKLVELLCYVVMGFFPALVILSMPNXEGIWELVXGGVFYCLGMVFFKSDGRIPFAHAIWHLFVAFGAGXHYYAIWRYLYLPSXLQXKVSK

SEQ ID NO: 16528 - protein, 193 aa, Homo sapiens
  MOD_RES (12)..(12): Selenocysteine
  MOD_RES (31)..(31): Selenocysteine
  MOD_RES (41)..(41): Selenocysteine
  MOD_RES (66)..(66): Selenocysteine
  MOD_RES (84)..(84): Selenocysteine
  MOD_RES (88)..(88): Selenocysteine
  MOD_RES (147)..(147): Selenocysteine
  MOD_RES (188)..(188): Selenocysteine
MFAPRLLDFQKXKYARFMNHRVPAHKRYQPXEYEHAANCAXHAFWIIPSILGSSNLYFLSDDDWEXISAWIYGLGLCGLFVVSXVFHXISWKKSHLRMVEHCLHMFDRMVIYFFIAASYAPWLNLRELGPWASHMRWLVWIMASVGXIYVFFFHERYKLVELLCYVVMGFFPALVILSMAGKLRPGMXCLKRQ

SEQ ID NO: 16529 - protein, 246 aa, Homo sapiens
  MOD_RES (12)..(12): Selenocysteine
  MOD_RES (31)..(31): Selenocysteine
  MOD_RES (41)..(41): Selenocysteine
  MOD_RES (66)..(66): Selenocysteine
  MOD_RES (84)..(84): Selenocysteine
  MOD_RES (88)..(88): Selenocysteine
  MOD_RES (147)..(147): Selenocysteine
  MOD_RES (182)..(182): Selenocysteine
  MOD_RES (190)..(190): Selenocysteine
  MOD_RES (225)..(225): Selenocysteine
  MOD_RES (239)..(239): Selenocysteine
  MOD_RES (242)..(242): Selenocysteine
MFAPRLLDFQKXKYARFMNHRVPAHKRYQPXEYEHAANCAXHAFWIIPSILGSSNLYFLSDDDWEXISAWIYGLGLCGLFVVSXVFHXISWKKSHLRMVEHCLHMFDRMVIYFFIAASYAPWLNLRELGPWASHMRWLVWIMASVGXIYVFFFHERYKLVELLCYVVMGFFPALVILSMPNXEGIWELVXGGVFYCLGMVFFKSDGRIPFAHAIWHLFVAFGAGXHYYAIWRYLYLPSXLQXKVSK

SEQ ID NO: 16530 - protein, 194 aa, Homo sapiens
  MOD_RES (58)..(58): Selenocysteine
  MOD_RES (60)..(60): Selenocysteine
  MOD_RES (83)..(83): Selenocysteine
  MOD_RES (90)..(90): Selenocysteine
  MOD_RES (131)..(131): Selenocysteine
  MOD_RES (138)..(138): Selenocysteine
  MOD_RES (146)..(146): Selenocysteine
  MOD_RES (161)..(161): Selenocysteine
MRESLLFLRLPSSPALSRRRALRWALRPPRVAQAFSGRVCGQAWLQQYGYLPPGDLRXHXQRSPQSLSAAIAAMQKFYGLQVXGKADADXMKAMRRPRCGVPDKFGAEIKANVRRKRYAIQGLKWQHNEIXFCIQNYXPKVGEYAXYEAIRKAFRVWESAXPLRFREVPYAYIREGHEKQADIMIFFAEGFHGD

SEQ ID NO: 16531 - protein, 582 aa, Homo sapiens
  MOD_RES (17)..(17): Selenocysteine
  MOD_RES (20)..(20): Selenocysteine
  MOD_RES (52)..(52): Selenocysteine
  MOD_RES (54)..(54): Selenocysteine
  MOD_RES (77)..(77): Selenocysteine
  MOD_RES (84)..(84): Selenocysteine
  MOD_RES (125)..(125): Selenocysteine
  MOD_RES (132)..(132): Selenocysteine
  MOD_RES (140)..(140): Selenocysteine
  MOD_RES (155)..(155): Selenocysteine
  MOD_RES (190)..(190): Selenocysteine
  MOD_RES (213)..(213): Selenocysteine
  MOD_RES (222)..(222): Selenocysteine
  MOD_RES (266)..(266): Selenocysteine
  MOD_RES (291)..(291): Selenocysteine
  MOD_RES (299)..(300): Selenocysteine
  MOD_RES (313)..(313): Selenocysteine
  MOD_RES (325)..(325): Selenocysteine
  MOD_RES (370)..(370): Selenocysteine
  MOD_RES (412)..(412): Selenocysteine
  MOD_RES (427)..(427): Selenocysteine
  MOD_RES (475)..(475): Selenocysteine
  MOD_RES (518)..(518): Selenocysteine
  MOD_RES (522)..(522): Selenocysteine
  MOD_RES (567)..(567): Selenocysteine
MSPAPRPPRCLLLPLLXLGXALASLGSAQSSSFSPEAWLQQYGYLPPGDLRXHXQRSPQSLSAAIAAMQKFYGLQVXGKADADXMKAMRRPRCGVPDKFGAEIKANVRRKRYAIQGLKWQHNEIXFCIQNYXPKVGEYAXYEAIRKAFRVWESAXPLRFREVPYAYIREGHEKQADIMIFFAEGFHGDSXPFDGEGGFLAHAYFPGPNIGGDXHFDSAEPWXVRNEDLNGNDIFLVAVHELGHALGLEHSSDPSAIMAPFYQWMDXENFVLPDDDRRGIQQLYGGESGFPXKMPPQPRXXSRPSVPDKPKNPXYGPNICDGNFDXVAMLRGEMFVFKERWFWRVRNNQVMDGYPMPIGQFWRGLPASINXAYERKDGKFVFFKGDKHWVFDEASLEPGYPKHIKELGRGLPXDKIDAALFWMPNGKXYFFRGNKYYRFNEELRAVDSEYPKNIKVWEGIPESPRGSFMGSDEVFXYFYKGNKYWKFNNQKLKVEPGYPKSALRDWMGCPSGGRPDEGXEEEXEVIIIEVDEEGGGAVSAAAVVLPVLLLLLVLAVGLAVFFFRRHGXPRRLLYCQRSLLDKV

SEQ ID NO: 16532 - protein, 71 aa, Homo sapiens
  MOD_RES (17)..(17): Selenocysteine
  MOD_RES (20)..(20): Selenocysteine
MSPAPRPPRCLLLPLLXLGXALASLGSAQSSSFSPESLEELYNWGELPLPRFPWALLSALEPPDKHLDSAQ

SEQ ID NO: 16533 - protein, 252 aa, Homo sapiens
  MOD_RES (2)..(3): Selenocysteine
  MOD_RES (18)..(18): Selenocysteine
  MOD_RES (51)..(51): Selenocysteine
  MOD_RES (53)..(53): Selenocysteine
  MOD_RES (80)..(80): Selenocysteine
  MOD_RES (83)..(83): Selenocysteine
  MOD_RES (85)..(85): Selenocysteine
  MOD_RES (90)..(90): Selenocysteine
  MOD_RES (121)..(121): Selenocysteine
  MOD_RES (123)..(123): Selenocysteine
  MOD_RES (136)..(136): Selenocysteine
  MOD_RES (172)..(172): Selenocysteine
  MOD_RES (182)..(182): Selenocysteine
  MOD_RES (205)..(205): Selenocysteine
GXXEDYDRDKKYGFCPEXGYSLFLVAAHEFGHAMGLEHSQDPGALMAPIYXYXKNFRLSQDDIKGIQELYGASPDIDLGXGPXPXLGPVXPEICKQDIVFDGIAQIRGEIFFFKDRFIWRXVXPRDKPMGPLLVAXFWPELPEKIDAVYEAPQEEKAVFFAGNEYWIYSASXLERGYPKPLXSLGLPPDVQRVDAAFNWSKNKKXYIFAGDKFWRYNEVKKKMDPGFPKLIADAWNAIPDNLDAVVDLQGGG

SEQ ID NO: 16534 - protein, 660 aa, Homo sapiens
  MOD_RES (11)..(11): Selenocysteine
  MOD_RES (45)..(45): Selenocysteine
  MOD_RES (56)..(56): Selenocysteine
  MOD_RES (73)..(73): Selenocysteine
  MOD_RES (86)..(86): Selenocysteine
  MOD_RES (93)..(93): Selenocysteine
  MOD_RES (96)..(96): Selenocysteine
  MOD_RES (125)..(125): Selenocysteine
  MOD_RES (132)..(132): Selenocysteine
  MOD_RES (139)..(139): Selenocysteine
  MOD_RES (155)..(155): Selenocysteine
  MOD_RES (199)..(199): Selenocysteine
  MOD_RES (214)..(214): Selenocysteine
  MOD_RES (248)..(248): Selenocysteine
  MOD_RES (250)..(250): Selenocysteine
  MOD_RES (261)..(262): Selenocysteine
  MOD_RES (281)..(281): Selenocysteine
  MOD_RES (300)..(300): Selenocysteine
  MOD_RES (306)..(307): Selenocysteine
  MOD_RES (311)..(311): Selenocysteine
  MOD_RES (319)..(320): Selenocysteine
  MOD_RES (335)..(335): Selenocysteine
  MOD_RES (339)..(339): Selenocysteine
  MOD_RES (354)..(354): Selenocysteine
  MOD_RES (364)..(364): Selenocysteine
  MOD_RES (377)..(378): Selenocysteine
  MOD_RES (426)..(426): Selenocysteine
  MOD_RES (428)..(428): Selenocysteine
  MOD_RES (455)..(455): Selenocysteine
  MOD_RES (458)..(458): Selenocysteine
  MOD_RES (460)..(460): Selenocysteine
  MOD_RES (465)..(465): Selenocysteine
  MOD_RES (496)..(496): Selenocysteine
  MOD_RES (498)..(498): Selenocysteine
  MOD_RES (511)..(511): Selenocysteine
  MOD_RES (547)..(547): Selenocysteine
  MOD_RES (557)..(557): Selenocysteine
  MOD_RES (580)..(580): Selenocysteine
MEALMARGALXGPLRALCLLGCLLSHAAAAPSPIIKFPGDVAPKXDKELAVQYLNXFYGCPKESCNLFVLKDXLKKMQKFFGLPQXGDLDQNXIEXMRKPRCGNPDVANYNFFPRKPKWDKNQIXYRIIGYXPDLDPEXVDDAFARAFQVWSDVXPLRFSRIHDGEADIMINFGRWEHGDGYPFDGKDGLLAHAFAPGXGVGGDSHFDDDELWXLGEGQVVRVKYGNADGEYCKFPFLFNGKEYNSCXDXGRSDGFLWCSXXYNFEKDGKYGFCPHEALFXMGGNAEGQPCKFPFRFQGXSYDSCXXEGRXDGYRWCGXXEDYDRDKKYGFCPEXAMSXVGGNSEGAPCVFPFXFLGNKYESCXSAGRSDGKMWCAXXANYDDDRKWGFCPDQGYSLFLVAAHEFGHAMGLEHSQDPGALMAPIYXYXKNFRLSQDDIKGIQELYGASPDIDLGXGPXPXLGPVXPEICKQDIVFDGIAQIRGEIFFFKDRFIWRXVXPRDKPMGPLLVAXFWPELPEKIDAVYEAPQEEKAVFFAGNEYWIYSASXLERGYPKPLXSLGLPPDVQRVDAAFNWSKNKKXYIFAGDKFWRYNEVKKKMDPGFPKLIADAWNAIPDNLDAVVDLQGGGHSYFFKGAYYLKLENQSLKSVKFGSIKSDWLGC

SEQ ID NO: 16535 - protein, 118 aa, Homo sapiens
  MOD_RES (10)..(10): Selenocysteine
  MOD_RES (17)..(17): Selenocysteine
  MOD_RES (20)..(20): Selenocysteine
  MOD_RES (49)..(49): Selenocysteine
  MOD_RES (56)..(56): Selenocysteine
  MOD_RES (63)..(63): Selenocysteine
  MOD_RES (79)..(79): Selenocysteine
MQKFFGLPQXGDLDQNXIEXMRKPRCGNPDVANYNFFPRKPKWDKNQIXYRIIGYXPDLDPEXVDDAFARAFQVWSDVXPLRFSRIHDGEADIMINFGRWEHGDGYPFDGKDGLLAHA

SEQ ID NO: 16536 - protein, 201 aa, Homo sapiens
  MOD_RES (10)..(10): Selenocysteine
  MOD_RES (17)..(17): Selenocysteine
  MOD_RES (20)..(20): Selenocysteine
  MOD_RES (49)..(49): Selenocysteine
  MOD_RES (56)..(56): Selenocysteine
  MOD_RES (63)..(63): Selenocysteine
  MOD_RES (79)..(79): Selenocysteine
  MOD_RES (123)..(123): Selenocysteine
  MOD_RES (138)..(138): Selenocysteine
  MOD_RES (172)..(172): Selenocysteine
  MOD_RES (174)..(174): Selenocysteine
  MOD_RES (185)..(186): Selenocysteine
MQKFFGLPQXGDLDQNXIEXMRKPRCGNPDVANYNFFPRKPKWDKNQIXYRIIGYXPDLDPEXVDDAFARAFQVWSDVXPLRFSRIHDGEADIMINFGRWEHGDGYPFDGKDGLLAHAFAPGXGVGGDSHFDDDELWXLGEGQVVRVKYGNADGEYCKFPFLFNGKEYNSCXDXGRSDGFLWCSXXYNFEKDGKYGFCPHE

SEQ ID NO: 16537 - protein, 584 aa, Homo sapiens
  MOD_RES (10)..(10): Selenocysteine
  MOD_RES (17)..(17): Selenocysteine
  MOD_RES (20)..(20): Selenocysteine
  MOD_RES (49)..(49): Selenocysteine
  MOD_RES (56)..(56): Selenocysteine
  MOD_RES (63)..(63): Selenocysteine
  MOD_RES (79)..(79): Selenocysteine
  MOD_RES (123)..(123): Selenocysteine
  MOD_RES (138)..(138): Selenocysteine
  MOD_RES (172)..(172): Selenocysteine
  MOD_RES (174)..(174): Selenocysteine
  MOD_RES (185)..(186): Selenocysteine
  MOD_RES (205)..(205): Selenocysteine
  MOD_RES (224)..(224): Selenocysteine
  MOD_RES (230)..(231): Selenocysteine
  MOD_RES (235)..(235): Selenocysteine
  MOD_RES (243)..(244): Selenocysteine
  MOD_RES (259)..(259): Selenocysteine
  MOD_RES (263)..(263): Selenocysteine
  MOD_RES (278)..(278): Selenocysteine
  MOD_RES (288)..(288): Selenocysteine
  MOD_RES (301)..(302): Selenocysteine
  MOD_RES (350)..(350): Selenocysteine
  MOD_RES (352)..(352): Selenocysteine
  MOD_RES (379)..(379): Selenocysteine
  MOD_RES (382)..(382): Selenocysteine
  MOD_RES (384)..(384): Selenocysteine
  MOD_RES (389)..(389): Selenocysteine
  MOD_RES (420)..(420): Selenocysteine
  MOD_RES (422)..(422): Selenocysteine
  MOD_RES (435)..(435): Selenocysteine
  MOD_RES (471)..(471): Selenocysteine
  MOD_RES (481)..(481): Selenocysteine
  MOD_RES (504)..(504): Selenocysteine
MQKFFGLPQXGDLDQNXIEXMRKPRCGNPDVANYNFFPRKPKWDKNQIXYRIIGYXPDLDPEXVDDAFARAFQVWSDVXPLRFSRIHDGEADIMINFGRWEHGDGYPFDGKDGLLAHAFAPGXGVGGDSHFDDDELWXLGEGQVVRVKYGNADGEYCKFPFLFNGKEYNSCXDXGRSDGFLWCSXXYNFEKDGKYGFCPHEALFXMGGNAEGQPCKFPFRFQGXSYDSCXXEGRXDGYRWCGXXEDYDRDKKYGFCPEXAMSXVGGNSEGAPCVFPFXFLGNKYESCXSAGRSDGKMWCAXXANYDDDRKWGFCPDQGYSLFLVAAHEFGHAMGLEHSQDPGALMAPIYXYXKNFRLSQDDIKGIQELYGASPDIDLGXGPXPXLGPVXPEICKQDIVFDGIAQIRGEIFFFKDRFIWRXVXPRDKPMGPLLVAXFWPELPEKIDAVYEAPQEEKAVFFAGNEYWIYSASXLERGYPKPLXSLGLPPDVQRVDAAFNWSKNKKXYIFAGDKFWRYNEVKKKMDPGFPKLIADAWNAIPDNLDAVVDLQGGGHSYFFKGAYYLKLENQSLKSVKFGSIKSDWLGC

SEQ ID NO: 16538 - protein, 610 aa, Homo sapiens
  MOD_RES (6)..(6): Selenocysteine
  MOD_RES (23)..(23): Selenocysteine
  MOD_RES (36)..(36): Selenocysteine
  MOD_RES (43)..(43): Selenocysteine
  MOD_RES (46)..(46): Selenocysteine
  MOD_RES (75)..(75): Selenocysteine
  MOD_RES (82)..(82): Selenocysteine
  MOD_RES (89)..(89): Selenocysteine
  MOD_RES (105)..(105): Selenocysteine
  MOD_RES (149)..(149): Selenocysteine
  MOD_RES (164)..(164): Selenocysteine
  MOD_RES (198)..(198): Selenocysteine
  MOD_RES (200)..(200): Selenocysteine
  MOD_RES (211)..(212): Selenocysteine
  MOD_RES (231)..(231): Selenocysteine
  MOD_RES (250)..(250): Selenocysteine
  MOD_RES (256)..(257): Selenocysteine
  MOD_RES (261)..(261): Selenocysteine
  MOD_RES (269)..(270): Selenocysteine
  MOD_RES (285)..(285): Selenocysteine
  MOD_RES (289)..(289): Selenocysteine
  MOD_RES (304)..(304): Selenocysteine
  MOD_RES (314)..(314): Selenocysteine
  MOD_RES (327)..(328): Selenocysteine
  MOD_RES (376)..(376): Selenocysteine
  MOD_RES (378)..(378): Selenocysteine
  MOD_RES (405)..(405): Selenocysteine
  MOD_RES (408)..(408): Selenocysteine
  MOD_RES (410)..(410): Selenocysteine
  MOD_RES (415)..(415): Selenocysteine
  MOD_RES (446)..(446): Selenocysteine
  MOD_RES (448)..(448): Selenocysteine
  MOD_RES (461)..(461): Selenocysteine
  MOD_RES (497)..(497): Selenocysteine
  MOD_RES (507)..(507): Selenocysteine
  MOD_RES (530)..(530): Selenocysteine
MQYLNXFYGCPKESCNLFVLKDXLKKMQKFFGLPQXGDLDQNXIEXMRKPRCGNPDVANYNFFPRKPKWDKNQIXYRIIGYXPDLDPEXVDDAFARAFQVWSDVXPLRFSRIHDGEADIMINFGRWEHGDGYPFDGKDGLLAHAFAPGXGVGGDSHFDDDELWXLGEGQVVRVKYGNADGEYCKFPFLFNGKEYNSCXDXGRSDGFLWCSXXYNFEKDGKYGFCPHEALFXMGGNAEGQPCKFPFRFQGXSYDSCXXEGRXDGYRWCGXXEDYDRDKKYGFCPEXAMSXVGGNSEGAPCVFPFXFLGNKYESCXSAGRSDGKMWCAXXANYDDDRKWGFCPDQGYSLFLVAAHEFGHAMGLEHSQDPGALMAPIYXYXKNFRLSQDDIKGIQELYGASPDIDLGXGPXPXLGPVXPEICKQDIVFDGIAQIRGEIFFFKDRFIWRXVXPRDKPMGPLLVAXFWPELPEKIDAVYEAPQEEKAVFFAGNEYWIYSASXLERGYPKPLXSLGLPPDVQRVDAAFNWSKNKKXYIFAGDKFWRYNEVKKKMDPGFPKLIADAWNAIPDNLDAVVDLQGGGHSYFFKGAYYLKLENQSLKSVKFGSIKSDWLGC

SEQ ID NO: 16539 - protein, 22 aa, Homo sapiens
  MOD_RES (1)..(1): Any amino acid
XLENQSLKSVKFGSIKSDWLGC

SEQ ID NO: 16540 - protein, 707 aa, Homo sapiens
  MOD_RES (27)..(27): Selenocysteine
  MOD_RES (37)..(37): Selenocysteine
  MOD_RES (40)..(40): Selenocysteine
  MOD_RES (55)..(55): Selenocysteine
  MOD_RES (83)..(83): Selenocysteine
  MOD_RES (90)..(90): Selenocysteine
  MOD_RES (96)..(96): Selenocysteine
  MOD_RES (109)..(109): Selenocysteine
  MOD_RES (122)..(122): Selenocysteine
  MOD_RES (152)..(152): Selenocysteine
  MOD_RES (155)..(155): Selenocysteine
  MOD_RES (157)..(157): Selenocysteine
  MOD_RES (220)..(220): Selenocysteine
  MOD_RES (245)..(246): Selenocysteine
  MOD_RES (258)..(259): Selenocysteine
  MOD_RES (264)..(264): Selenocysteine
  MOD_RES (278)..(278): Selenocysteine
  MOD_RES (303)..(304): Selenocysteine
  MOD_RES (316)..(317): Selenocysteine
  MOD_RES (331)..(331): Selenocysteine
  MOD_RES (336)..(336): Selenocysteine
  MOD_RES (352)..(352): Selenocysteine
  MOD_RES (360)..(360): Selenocysteine
  MOD_RES (362)..(362): Selenocysteine
  MOD_RES (375)..(376): Selenocysteine
  MOD_RES (426)..(426): Selenocysteine
  MOD_RES (455)..(458): Selenocysteine
  MOD_RES (462)..(462): Selenocysteine
  MOD_RES (466)..(466): Selenocysteine
  MOD_RES (470)..(470): Selenocysteine
  MOD_RES (474)..(474): Selenocysteine
  MOD_RES (482)..(482): Selenocysteine
  MOD_RES (486)..(486): Selenocysteine
  MOD_RES (494)..(494): Selenocysteine
  MOD_RES (498)..(498): Selenocysteine
  MOD_RES (503)..(503): Selenocysteine
  MOD_RES (505)..(506): Selenocysteine
  MOD_RES (591)..(591): Selenocysteine
  MOD_RES (614)..(614): Selenocysteine
  MOD_RES (661)..(661): Selenocysteine
  MOD_RES (698)..(698): Selenocysteine
MSLWQPLVLVLLVLGCCFAAPRQRQSXLVLFPGDLRXNLXDRQLAEEYLYRYGYXRVAEMRGESKSLGPALLLLQKQLSLPEXGELDSAXLKAMRXPRCGVPDLGRFQXFEGDLKWHHHNIXYWIQNYSEDLPRAVIDDAFARAFALWSAVXPLXFXRVYSRDADIVIQFGVAEHGDGYPFDGKDGLLAHAFPPGPGIQGDAHFDDDELWSLGKGVVVPXRFGNADGAACHFPFIFEGRSYSACXXDGRSDGLPWCSXXANYDXDDRFGFCPSERLYXQDGNADGKPCQFPFIFQGQSYSACXXDGRSDGYRWCAXXANYDRDKLFGFCPXRADSXVMGGNSAGELCVFPFXFLGKEYSXCXSEGRGDGRLWCAXXSNFDSDKKWGFCPDQGYSLFLVAAHEFGHALGLDHSSVPEALMYPMYRFXEGPPLHKDDVNGIRHLYGPRPEPEPRPPXXXXPQPXAPPXVCPXGPPXVHPSERPXAGPXGPPSAGPXGPPXAGPSXAXXVPLSPVDDACNVNIFDAIAEIGNQLYLFKDGKYWRFSEGRGSRPQGPFLIADKWPALPRKLDSVFEERLSKKLFFFSGRQVWVYXGASVLGPRRLDKLGLGADVAQVXGALRSGRGKMLLFSGRRLWRFDVKAQMVDPRSASEVDRMFPGVPLDXHDVFQYREKAYFCQDRFYWRVSSRSELNQVDQVGYVXYDILQCPED

SEQ ID NO: 16541 - protein, 204 aa, Homo sapiens
  MOD_RES (15)..(15): Selenocysteine
  MOD_RES (26)..(26): Selenocysteine
  MOD_RES (107)..(107): Selenocysteine
  MOD_RES (116)..(116): Selenocysteine
  MOD_RES (135)..(135): Selenocysteine
  MOD_RES (156)..(156): Selenocysteine
  MOD_RES (201)..(201): Selenocysteine
MAHKPVYQVKQKVLXSLAWRCCPGYXGPNCEHHDSMAIPEPADPGDSHQEPQDGPVSFKPGHLAAVINEVEVQQEQQEHLLGDLQNDVHRVADSLPGLWKALPGNLXAAVMEANQXGHEFPDRSLEQVLLPHVDXFLQVHFSPIWRSFNQSLHSLXQAIRNLSLDVEANRQAISRVQDSAVARADFQELGAKFEAKVQENXQRV

SEQ ID NO: 16542 - protein, 295 aa, Homo sapiens
  MOD_RES (3)..(3): Selenocysteine
  MOD_RES (41)..(41): Selenocysteine
  MOD_RES (48)..(48): Selenocysteine
  MOD_RES (89)..(89): Selenocysteine
  MOD_RES (100)..(100): Selenocysteine
  MOD_RES (181)..(181): Selenocysteine
  MOD_RES (190)..(190): Selenocysteine
  MOD_RES (209)..(209): Selenocysteine
  MOD_RES (230)..(230): Selenocysteine
  MOD_RES (275)..(275): Selenocysteine
  MOD_RES (295)..(295): Selenocysteine
MGXSASWAGGMGIKGQPEAAKSWRKPKQSNWCPYPMSKLVXLLALCKXEKFLIHSQQPCPQGAPDCQKVKVMYRMAHKPVYQVKQKVLXSLAWRCCPGYXGPNCEHHDSMAIPEPADPGDSHQEPQDGPVSFKPGHLAAVINEVEVQQEQQEHLLGDLQNDVHRVADSLPGLWKALPGNLXAAVMEANQXGHEFPDRSLEQVLLPHVDXFLQVHFSPIWRSFNQSLHSLXQAIRNLSLDVEANRQAISRVQDSAVARADFQELGAKFEAKVQENXQRVGQLRQDVEDRLHAQHFX

SEQ ID NO: 16543 - protein, 109 aa, Homo sapiens
  MOD_RES (27)..(27): Selenocysteine
  MOD_RES (37)..(37): Selenocysteine
  MOD_RES (48)..(48): Selenocysteine
  MOD_RES (71)..(71): Selenocysteine
  MOD_RES (97)..(97): Selenocysteine
  MOD_RES (101)..(101): Selenocysteine
MILSLLFSLGGPLGWGLLGAWAQASSXSLSDLQSSRXPGVWKAEAEDXGKDPVGRIMDSRIPALLRQEARXGGSALAPPVDLGVAQQPSPLACFPVXGAPXQCPSWSPY

SEQ ID NO: 16544 - protein, 949 aa, Homo sapiens
  MOD_RES (27)..(27): Selenocysteine
  MOD_RES (37)..(37): Selenocysteine
  MOD_RES (48)..(48): Selenocysteine
  MOD_RES (67)..(67): Selenocysteine
  MOD_RES (74)..(74): Selenocysteine
  MOD_RES (115)..(115): Selenocysteine
  MOD_RES (126)..(126): Selenocysteine
  MOD_RES (207)..(207): Selenocysteine
  MOD_RES (216)..(216): Selenocysteine
  MOD_RES (235)..(235): Selenocysteine
  MOD_RES (256)..(256): Selenocysteine
  MOD_RES (301)..(301): Selenocysteine
  MOD_RES (321)..(321): Selenocysteine
  MOD_RES (335)..(335): Selenocysteine
  MOD_RES (349)..(349): Selenocysteine
  MOD_RES (357)..(357): Selenocysteine
  MOD_RES (386)..(387): Selenocysteine
  MOD_RES (397)..(397): Selenocysteine
  MOD_RES (404)..(404): Selenocysteine
  MOD_RES (406)..(406): Selenocysteine
  MOD_RES (422)..(422): Selenocysteine
  MOD_RES (441)..(441): Selenocysteine
  MOD_RES (474)..(474): Selenocysteine
  MOD_RES (512)..(512): Selenocysteine
  MOD_RES (518)..(518): Selenocysteine
  MOD_RES (561)..(561): Selenocysteine
  MOD_RES (626)..(626): Selenocysteine
  MOD_RES (663)..(663): Selenocysteine
  MOD_RES (691)..(692): Selenocysteine
  MOD_RES (740)..(740): Selenocysteine
  MOD_RES (775)..(775): Selenocysteine
  MOD_RES (808)..(808): Selenocysteine
  MOD_RES (836)..(836): Selenocysteine
  MOD_RES (841)..(841): Selenocysteine
  MOD_RES (846)..(847): Selenocysteine
  MOD_RES (884)..(884): Selenocysteine
  MOD_RES (895)..(895): Selenocysteine
  MOD_RES (899)..(900): Selenocysteine
  MOD_RES (907)..(907): Selenocysteine
  MOD_RES (909)..(909): Selenocysteine
  MOD_RES (927)..(927): Selenocysteine
  MOD_RES (932)..(932): Selenocysteine
  MOD_RES (939)..(939): Selenocysteine
  MOD_RES (949)..(949): Selenocysteine
MILSLLFSLGGPLGWGLLGAWAQASSXSLSDLQSSRXPGVWKAEAEDXGKDPVGRNWCPYPMSKLVXLLALCKXEKFLIHSQQPCPQGAPDCQKVKVMYRMAHKPVYQVKQKVLXSLAWRCCPGYXGPNCEHHDSMAIPEPADPGDSHQEPQDGPVSFKPGHLAAVINEVEVQQEQQEHLLGDLQNDVHRVADSLPGLWKALPGNLXAAVMEANQXGHEFPDRSLEQVLLPHVDXFLQVHFSPIWRSFNQSLHSLXQAIRNLSLDVEANRQAISRVQDSAVARADFQELGAKFEAKVQENXQRVGQLRQDVEDRLHAQHFXLHRSISELQADVDXKLKRLHKAQEAPGXNGSLVLAXPGAGARPEPDSLQARLGQLQRNLSELHMXXARREEELQYXLEDMRAXLXRHVDEIKELYSESDEXFDQISKVERQVEELQVNHXALRELRVILMEKSLIMEENKEEVERQLLELNLXLQHLQGGHADLIKYVKDCNCQKLYLDLDVIREGQRDAXRALEEXQVSLDERRQLDGSSLQALQNAVDAVSLAVDAHKAEGERARAAXSRLRSQVQALDDEVGALKAAAAEARHEVRQLHSAFAALLEDALRHEAVLAALFGEEVLEEMSEQXPGPLPLSYEQIRVALQDAASGLQEQALGWDELAARVXALEQASEPPRPAEHLEPSHDAGREEAAXXALAGLARELQSLSNDVKNVGRCCEAEAGAGAASLNASLHGLHNALFAXQRSLEQHQRLFHSLFGNFQGLMEANVSLDLGKLQXMLSRKGKKQQKDLEAPRKRDKKEAEPLVDIRVXGPVPGALGAALWEAGSPVAFYASFSEGXAALQXVKFNXXYINIGSSYFPEHGYFRAPERGVYLFAVSVEFGPGPGXGQLVFGGHHRXPVCXXGQGSGSXAXVFAMAELQKGERVWFELXQGSIXKRSLSGXAFGGFLMFKX

SEQ ID NO: 16545 - protein, 123 aa, Homo sapiens
  MOD_RES (6)..(6): Selenocysteine
  MOD_RES (13)..(13): Selenocysteine
  MOD_RES (54)..(54): Selenocysteine
  MOD_RES (65)..(65): Selenocysteine
MSKLVXLLALCKXEKFLIHSQQPCPQGAPDCQKVKVMYRMAHKPVYQVKQKVLXSLAWRCCPGYXGPNCEHHDSMAIPEPADPGDSHQEPQDGPVSFKPGHLAAVINEVEVQQEQQEHLLGDL

SEQ ID NO: 16546 - protein, 98 aa, Homo sapiens
  MOD_RES (43)..(43): Selenocysteine
  MOD_RES (62)..(62): Selenocysteine
  MOD_RES (79)..(79): Selenocysteine
  MOD_RES (87)..(87): Selenocysteine
  MOD_RES (90)..(90): Selenocysteine
AAAAVEAAAPMGALWGLVHDFVVGQQEGPADQVAADVKSGNYXVLQVVEALGSSLENPEPRXRARAIQLLSQVLLHCHXLLLEKEGXGVXNRNVFLDC

SEQ ID NO: 16547 - protein, 149 aa, Homo sapiens
  MOD_RES (3)..(3): Selenocysteine
  MOD_RES (34)..(34): Selenocysteine
  MOD_RES (51)..(51): Selenocysteine
  MOD_RES (112)..(112): Selenocysteine
LQXLNACCAVYGQKELKDFLPSLWASIRREVFQXASERVEAEGLAALHSLXACLSRSVLRADAEDLLDSFLSNILQDCRHHLCEPDMKLVWPSAKLLQAAAGASARACDSVXSNVLPLLLEQFHKHSQYPLKRYRAASGGQSLKCSWVS

SEQ ID NO: 16548 - protein, 277 aa, Homo sapiens
  MOD_RES (45)..(45): Selenocysteine
  MOD_RES (64)..(64): Selenocysteine
  MOD_RES (81)..(81): Selenocysteine
  MOD_RES (106)..(106): Selenocysteine
  MOD_RES (108)..(108): Selenocysteine
  MOD_RES (189)..(189): Selenocysteine
  MOD_RES (195)..(195): Selenocysteine
  MOD_RES (200)..(200): Selenocysteine
  MOD_RES (213)..(213): Selenocysteine
  MOD_RES (257)..(257): Selenocysteine
  MOD_RES (266)..(266): Selenocysteine
MAAAAAVEAAAPMGALWGLVHDFVVGQQEGPADQVAADVKSGNYXVLQVVEALGSSLENPEPRXRARAIQLLSQVLLHCHXLLLEKEGAESLIGKKEGRRKKLPCXEXERGSKAKRGNSACHRYQLVVHLILFYENRLKDHHLVIPSVLQGLKALSLCVALPPGLAVSVLKAIFQEVHVQSLPQVDRHXVYNIIXNFMRXREEELKSLGADFXFGFIQVMDGEKDPRNLLVAFRIVHDLISRDYSLGPFVEELFEVXSCYFPIDFXPPPNDPHGIQR

SEQ ID NO: 16549 - protein, 932 aa, Homo sapiens
  MOD_RES (45)..(45): Selenocysteine
  MOD_RES (64)..(64): Selenocysteine
  MOD_RES (81)..(81): Selenocysteine
  MOD_RES (150)..(150): Selenocysteine
  MOD_RES (156)..(156): Selenocysteine
  MOD_RES (161)..(161): Selenocysteine
  MOD_RES (174)..(174): Selenocysteine
  MOD_RES (218)..(218): Selenocysteine
  MOD_RES (227)..(227): Selenocysteine
  MOD_RES (252)..(252): Selenocysteine
  MOD_RES (281)..(281): Selenocysteine
  MOD_RES (314)..(314): Selenocysteine
  MOD_RES (355)..(355): Selenocysteine
  MOD_RES (359)..(359): Selenocysteine
  MOD_RES (368)..(368): Selenocysteine
  MOD_RES (370)..(370): Selenocysteine
  MOD_RES (414)..(414): Selenocysteine
  MOD_RES (443)..(443): Selenocysteine
  MOD_RES (449)..(449): Selenocysteine
  MOD_RES (466)..(466): Selenocysteine
  MOD_RES (474)..(474): Selenocysteine
  MOD_RES (524)..(524): Selenocysteine
  MOD_RES (565)..(565): Selenocysteine
  MOD_RES (567)..(568): Selenocysteine
  MOD_RES (580)..(580): Selenocysteine
  MOD_RES (657)..(657): Selenocysteine
  MOD_RES (702)..(702): Selenocysteine
  MOD_RES (708)..(708): Selenocysteine
  MOD_RES (723)..(723): Selenocysteine
  MOD_RES (751)..(751): Selenocysteine
  MOD_RES (755)..(755): Selenocysteine
  MOD_RES (772)..(772): Selenocysteine
  MOD_RES (815)..(815): Selenocysteine
  MOD_RES (835)..(835): Selenocysteine
  MOD_RES (856)..(856): Selenocysteine
  MOD_RES (859)..(859): Selenocysteine
  MOD_RES (884)..(884): Selenocysteine
  MOD_RES (888)..(888): Selenocysteine
MAAAAAVEAAAPMGALWGLVHDFVVGQQEGPADQVAADVKSGNYXVLQVVEALGSSLENPEPRXRARAIQLLSQVLLHCHXLLLEKEVVHLILFYENRLKDHHLVIPSVLQGLKALSLCVALPPGLAVSVLKAIFQEVHVQSLPQVDRHXVYNIIXNFMRXREEELKSLGADFXFGFIQVMDGEKDPRNLLVAFRIVHDLISRDYSLGPFVEELFEVXSCYFPIDFXPPPNDPHGIQREDLILSLRAVLASXPRFAEFLLPLLIEKVDSEVLSAKLDSLQXLNACCAVYGQKELKDFLPSLWASIRRESSQRRXILEMLLGFLKLQQKWSYEDKDQRPLNGFKDQLCSLVFMALXDPSXQLQLVGIRXLXVLGAQPDLLSYEDLELAVGHLYRLSFLKEDSQSCRVAALEASGXLAALYPVAFSSHLVPKLAEELRVGESNLXNGDEPXQCSRHLCCLQALSAVSXHPSIVKEXLPLLLQHLWQVNRGNMVAQSSDVIAVCQSLRQMAEKCQQDPESCWYFHQXAIPCLLALAVQASMPEKEPSVLRKVLLEDEVLAAMVSVIGXAXXHLSPELAAQSVXHIVPLFLDGNVSFLPENSFPSRFQPFQDGSSGQRRLIALLMAFVCSLPRNVEIPQLNQLMRELLELSCCHSCPFSSXAAAKCFAGLLNKHPAGQQLDEFLQLAVDKVEAGLGSGPCRSQAFXLLLWVXKALVLRYHPLSSCLXARLMGLLSDPELGPAAADGFSLLMSDCXDVLXRAGHAEVRIMFRQRFFXDNVPALVQGFHAAPQDVKPNYLKGLSHVLNRLPKPVLLPELPXLLSLLLEALSCPDCVVQLSXLSCLQPLLLEAPQVMSLHVDXLVXKFLNLSSSPSMAVRIAALQCMHALXRLPXPVLLPYKPQVIRALAKPLDDKKRLVRKEAVSARGEWFLLGSPGS

SEQ ID NO: 16550 - protein, 1030 aa, Homo sapiens
  MOD_RES (45)..(45): Selenocysteine
  MOD_RES (64)..(64): Selenocysteine
  MOD_RES (81)..(81): Selenocysteine
  MOD_RES (150)..(150): Selenocysteine
  MOD_RES (156)..(156): Selenocysteine
  MOD_RES (161)..(161): Selenocysteine
  MOD_RES (174)..(174): Selenocysteine
  MOD_RES (218)..(218): Selenocysteine
  MOD_RES (227)..(227): Selenocysteine
  MOD_RES (252)..(252): Selenocysteine
  MOD_RES (281)..(281): Selenocysteine
  MOD_RES (312)..(312): Selenocysteine
  MOD_RES (329)..(329): Selenocysteine
  MOD_RES (390)..(390): Selenocysteine
  MOD_RES (412)..(412): Selenocysteine
  MOD_RES (453)..(453): Selenocysteine
  MOD_RES (457)..(457): Selenocysteine
  MOD_RES (466)..(466): Selenocysteine
  MOD_RES (468)..(468): Selenocysteine
  MOD_RES (512)..(512): Selenocysteine
  MOD_RES (541)..(541): Selenocysteine
  MOD_RES (547)..(547): Selenocysteine
  MOD_RES (564)..(564): Selenocysteine
  MOD_RES (572)..(572): Selenocysteine
  MOD_RES (622)..(622): Selenocysteine
  MOD_RES (663)..(663): Selenocysteine
  MOD_RES (665)..(666): Selenocysteine
  MOD_RES (678)..(678): Selenocysteine
  MOD_RES (755)..(755): Selenocysteine
  MOD_RES (800)..(800): Selenocysteine
  MOD_RES (806)..(806): Selenocysteine
  MOD_RES (821)..(821): Selenocysteine
  MOD_RES (849)..(849): Selenocysteine
  MOD_RES (853)..(853): Selenocysteine
  MOD_RES (870)..(870): Selenocysteine
  MOD_RES (913)..(913): Selenocysteine
  MOD_RES (933)..(933): Selenocysteine
  MOD_RES (954)..(954): Selenocysteine
  MOD_RES (957)..(957): Selenocysteine
  MOD_RES (982)..(982): Selenocysteine
  MOD_RES (986)..(986): Selenocysteine
MAAAAAVEAAAPMGALWGLVHDFVVGQQEGPADQVAADVKSGNYXVLQVVEALGSSLENPEPRXRARAIQLLSQVLLHCHXLLLEKEVVHLILFYENRLKDHHLVIPSVLQGLKALSLCVALPPGLAVSVLKAIFQEVHVQSLPQVDRHXVYNIIXNFMRXREEELKSLGADFXFGFIQVMDGEKDPRNLLVAFRIVHDLISRDYSLGPFVEELFEVXSCYFPIDFXPPPNDPHGIQREDLILSLRAVLASXPRFAEFLLPLLIEKVDSEVLSAKLDSLQXLNACCAVYGQKELKDFLPSLWASIRREVFQXASERVEAEGLAALHSLXACLSRSVLRADAEDLLDSFLSNILQDCRHHLCEPDMKLVWPSAKLLQAAAGASARACDSVXSNVLPLLLEQFHKHSQSSQRRXILEMLLGFLKLQQKWSYEDKDQRPLNGFKDQLCSLVFMALXDPSXQLQLVGIRXLXVLGAQPDLLSYEDLELAVGHLYRLSFLKEDSQSCRVAALEASGXLAALYPVAFSSHLVPKLAEELRVGESNLXNGDEPXQCSRHLCCLQALSAVSXHPSIVKEXLPLLLQHLWQVNRGNMVAQSSDVIAVCQSLRQMAEKCQQDPESCWYFHQXAIPCLLALAVQASMPEKEPSVLRKVLLEDEVLAAMVSVIGXAXXHLSPELAAQSVXHIVPLFLDGNVSFLPENSFPSRFQPFQDGSSGQRRLIALLMAFVCSLPRNVEIPQLNQLMRELLELSCCHSCPFSSXAAAKCFAGLLNKHPAGQQLDEFLQLAVDKVEAGLGSGPCRSQAFXLLLWVXKALVLRYHPLSSCLXARLMGLLSDPELGPAAADGFSLLMSDCXDVLXRAGHAEVRIMFRQRFFXDNVPALVQGFHAAPQDVKPNYLKGLSHVLNRLPKPVLLPELPXLLSLLLEALSCPDCVVQLSXLSCLQPLLLEAPQVMSLHVDXLVXKFLNLSSSPSMAVRIAALQCMHALXRLPXPVLLPYKPQVIRALAKPLDDKKRLVRKEAVSARGEWFLLGSPGS

SEQ ID NO: 16551 - protein, 302 aa, Homo sapiens
  MOD_RES (45)..(45): Selenocysteine
  MOD_RES (64)..(64): Selenocysteine
  MOD_RES (81)..(81): Selenocysteine
  MOD_RES (150)..(150): Selenocysteine
  MOD_RES (156)..(156): Selenocysteine
  MOD_RES (161)..(161): Selenocysteine
  MOD_RES (174)..(174): Selenocysteine
  MOD_RES (218)..(218): Selenocysteine
  MOD_RES (227)..(227): Selenocysteine
  MOD_RES (243)..(243): Selenocysteine
  MOD_RES (272)..(272): Selenocysteine
MAAAAAVEAAAPMGALWGLVHDFVVGQQEGPADQVAADVKSGNYXVLQVVEALGSSLENPEPRXRARAIQLLSQVLLHCHXLLLEKEVVHLILFYENRLKDHHLVIPSVLQGLKALSLCVALPPGLAVSVLKAIFQEVHVQSLPQVDRHXVYNIIXNFMRXREEELKSLGADFXFGFIQVMDGEKDPRNLLVAFRIVHDLISRDYSLGPFVEELFEVXSCYFPIDFXPREDLILSLRAVLASXPRFAEFLLPLLIEKVDSEVLSAKLDSLQXLNACCAVYGQKELKDFLPSLWASIRREVFQ

SEQ ID NO: 16552 - protein, 173 aa, Homo sapiens
  MOD_RES (45)..(45): Selenocysteine
  MOD_RES (64)..(64): Selenocysteine
  MOD_RES (81)..(81): Selenocysteine
  MOD_RES (150)..(150): Selenocysteine
  MOD_RES (156)..(156): Selenocysteine
  MOD_RES (161)..(161): Selenocysteine
MAAAAAVEAAAPMGALWGLVHDFVVGQQEGPADQVAADVKSGNYXVLQVVEALGSSLENPEPRXRARAIQLLSQVLLHCHXLLLEKEVVHLILFYENRLKDHHLVIPSVLQGLKALSLCVALPPGLAVSVLKAIFQEVHVQSLPQVDRHXVYNIIXNFMRXREEGDGWGKGSP

SEQ ID NO: 16553 - protein, 987 aa, Homo sapiens
  MOD_RES (45)..(45): Selenocysteine
  MOD_RES (64)..(64): Selenocysteine
  MOD_RES (81)..(81): Selenocysteine
  MOD_RES (150)..(150): Selenocysteine
  MOD_RES (156)..(156): Selenocysteine
  MOD_RES (161)..(161): Selenocysteine
  MOD_RES (175)..(175): Selenocysteine
  MOD_RES (184)..(184): Selenocysteine
  MOD_RES (209)..(209): Selenocysteine
  MOD_RES (238)..(238): Selenocysteine
  MOD_RES (269)..(269): Selenocysteine
  MOD_RES (286)..(286): Selenocysteine
  MOD_RES (347)..(347): Selenocysteine
  MOD_RES (369)..(369): Selenocysteine
  MOD_RES (410)..(410): Selenocysteine
  MOD_RES (414)..(414): Selenocysteine
  MOD_RES (423)..(423): Selenocysteine
  MOD_RES (425)..(425): Selenocysteine
  MOD_RES (469)..(469): Selenocysteine
  MOD_RES (498)..(498): Selenocysteine
  MOD_RES (504)..(504): Selenocysteine
  MOD_RES (521)..(521): Selenocysteine
  MOD_RES (529)..(529): Selenocysteine
  MOD_RES (579)..(579): Selenocysteine
  MOD_RES (620)..(620): Selenocysteine
  MOD_RES (622)..(623): Selenocysteine
  MOD_RES (635)..(635): Selenocysteine
  MOD_RES (712)..(712): Selenocysteine
  MOD_RES (757)..(757): Selenocysteine
  MOD_RES (763)..(763): Selenocysteine
  MOD_RES (778)..(778): Selenocysteine
  MOD_RES (806)..(806): Selenocysteine
  MOD_RES (810)..(810): Selenocysteine
  MOD_RES (827)..(827): Selenocysteine
  MOD_RES (870)..(870): Selenocysteine
  MOD_RES (890)..(890): Selenocysteine
  MOD_RES (911)..(911): Selenocysteine
  MOD_RES (914)..(914): Selenocysteine
  MOD_RES (939)..(939): Selenocysteine
  MOD_RES (943)..(943): Selenocysteine
MAAAAAVEAAAPMGALWGLVHDFVVGQQEGPADQVAADVKSGNYXVLQVVEALGSSLENPEPRXRARAIQLLSQVLLHCHXLLLEKEVVHLILFYENRLKDHHLVIPSVLQGLKALSLCVALPPGLAVSVLKAIFQEVHVQSLPQVDRHXVYNIIXNFMRXREEGPFVEELFEVXSCYFPIDFXPPPNDPHGIQREDLILSLRAVLASXPRFAEFLLPLLIEKVDSEVLSAKLDSLQXLNACCAVYGQKELKDFLPSLWASIRREVFQXASERVEAEGLAALHSLXACLSRSVLRADAEDLLDSFLSNILQDCRHHLCEPDMKLVWPSAKLLQAAAGASARACDSVXSNVLPLLLEQFHKHSQSSQRRXILEMLLGFLKLQQKWSYEDKDQRPLNGFKDQLCSLVFMALXDPSXQLQLVGIRXLXVLGAQPDLLSYEDLELAVGHLYRLSFLKEDSQSCRVAALEASGXLAALYPVAFSSHLVPKLAEELRVGESNLXNGDEPXQCSRHLCCLQALSAVSXHPSIVKEXLPLLLQHLWQVNRGNMVAQSSDVIAVCQSLRQMAEKCQQDPESCWYFHQXAIPCLLALAVQASMPEKEPSVLRKVLLEDEVLAAMVSVIGXAXXHLSPELAAQSVXHIVPLFLDGNVSFLPENSFPSRFQPFQDGSSGQRRLIALLMAFVCSLPRNVEIPQLNQLMRELLELSCCHSCPFSSXAAAKCFAGLLNKHPAGQQLDEFLQLAVDKVEAGLGSGPCRSQAFXLLLWVXKALVLRYHPLSSCLXARLMGLLSDPELGPAAADGFSLLMSDCXDVLXRAGHAEVRIMFRQRFFXDNVPALVQGFHAAPQDVKPNYLKGLSHVLNRLPKPVLLPELPXLLSLLLEALSCPDCVVQLSXLSCLQPLLLEAPQVMSLHVDXLVXKFLNLSSSPSMAVRIAALQCMHALXRLPXPVLLPYKPQVIRALAKPLDDKKRLVRKEAVSARGEWFLLGSPGS

SEQ ID NO: 16554 - protein, 40 aa, Homo sapiens
MAAAAAVEAAAPMGALWGLVHDFVVGQQEGPADQVAAGPL

SEQ ID NO: 16555 - protein, 90 aa, Homo sapiens
  MOD_RES (1)..(1): Any amino acid
  MOD_RES (28)..(28): Selenocysteine
  MOD_RES (42)..(42): Selenocysteine
  MOD_RES (46)..(46): Selenocysteine
XVKPNYLKGLSHVLNRLPKPVLLPELPXAVRIAALQCMHALXRLPXPVLLPYKPQVIRALAKPLDDKKRLVRKEAVSARGEWFLLGSPGS

SEQ ID NO: 16556 - protein, 598 aa, Homo sapiens
  MOD_RES (1)..(1): Any amino acid
  MOD_RES (28)..(28): Selenocysteine
  MOD_RES (32)..(32): Selenocysteine
  MOD_RES (41)..(41): Selenocysteine
  MOD_RES (43)..(43): Selenocysteine
  MOD_RES (87)..(87): Selenocysteine
  MOD_RES (116)..(116): Selenocysteine
  MOD_RES (122)..(122): Selenocysteine
  MOD_RES (139)..(139): Selenocysteine
  MOD_RES (147)..(147): Selenocysteine
  MOD_RES (197)..(197): Selenocysteine
  MOD_RES (238)..(238): Selenocysteine
  MOD_RES (240)..(241): Selenocysteine
  MOD_RES (253)..(253): Selenocysteine
  MOD_RES (330)..(330): Selenocysteine
  MOD_RES (375)..(375): Selenocysteine
  MOD_RES (381)..(381): Selenocysteine
  MOD_RES (396)..(396): Selenocysteine
  MOD_RES (424)..(424): Selenocysteine
  MOD_RES (428)..(428): Selenocysteine
  MOD_RES (445)..(445): Selenocysteine
  MOD_RES (488)..(488): Selenocysteine
  MOD_RES (501)..(501): Selenocysteine
  MOD_RES (522)..(522): Selenocysteine
  MOD_RES (525)..(525): Selenocysteine
  MOD_RES (550)..(550): Selenocysteine
  MOD_RES (554)..(554): Selenocysteine
XWSYEDKDQRPLNGFKDQLCSLVFMALXDPSXQLQLVGIRXLXVLGAQPDLLSYEDLELAVGHLYRLSFLKEDSQSCRVAALEASGXLAALYPVAFSSHLVPKLAEELRVGESNLXNGDEPXQCSRHLCCLQALSAVSXHPSIVKEXLPLLLQHLWQVNRGNMVAQSSDVIAVCQSLRQMAEKCQQDPESCWYFHQXAIPCLLALAVQASMPEKEPSVLRKVLLEDEVLAAMVSVIGXAXXHLSPELAAQSVXHIVPLFLDGNVSFLPENSFPSRFQPFQDGSSGQRRLIALLMAFVCSLPRNVEIPQLNQLMRELLELSCCHSCPFSSXAAAKCFAGLLNKHPAGQQLDEFLQLAVDKVEAGLGSGPCRSQAFXLLLWVXKALVLRYHPLSSCLXARLMGLLSDPELGPAAADGFSLLMSDCXDVLXRAGHAEVRIMFRQRFFXDNVPALVQGFHAAPQDVKPNYLKGLSHVLNRLPKPVLLPELPXALSCPDCVVQLSXLSCLQPLLLEAPQVMSLHVDXLVXKFLNLSSSPSMAVRIAALQCMHALXRLPXPVLLPYKPQVIRALAKPLDDKKRLVRKEAVSARGEWFLLGSPGS

SEQ ID NO: 16557 - protein, 407 aa, Homo sapiens
  MOD_RES (23)..(23): Selenocysteine
  MOD_RES (36)..(37): Selenocysteine
  MOD_RES (49)..(49): Selenocysteine
  MOD_RES (95)..(95): Selenocysteine
  MOD_RES (117)..(117): Selenocysteine
  MOD_RES (123)..(123): Selenocysteine
  MOD_RES (138)..(138): Selenocysteine
  MOD_RES (144)..(144): Selenocysteine
  MOD_RES (166)..(166): Selenocysteine
  MOD_RES (178)..(178): Selenocysteine
  MOD_RES (182)..(182): Selenocysteine
  MOD_RES (186)..(186): Selenocysteine
  MOD_RES (189)..(189): Selenocysteine
  MOD_RES (194)..(194): Selenocysteine
  MOD_RES (213)..(213): Selenocysteine
  MOD_RES (220)..(220): Selenocysteine
  MOD_RES (234)..(234): Selenocysteine
  MOD_RES (239)..(239): Selenocysteine
  MOD_RES (244)..(244): Selenocysteine
  MOD_RES (267)..(267): Selenocysteine
  MOD_RES (306)..(306): Selenocysteine
  MOD_RES (319)..(319): Selenocysteine
  MOD_RES (337)..(337): Selenocysteine
  MOD_RES (345)..(345): Selenocysteine
  MOD_RES (376)..(376): Selenocysteine
MVNEYKKILLLKGFELMDDYHFXSIKSLLAYDLGLXXKMQEEYNRIKIXDLMEKKFQGVACLDKLIELAKDMPSLKNLVNNLRKEKSKVAKKIKXQEKAPVKKINQEEVGLAAPAPXARNKLXSEARGRIPVAQKRKXPNKEKXEAKRNKVSQEQSKPPGPSGASXSAAVDHPPLPQXSSSXPSNXSFXPNQEXQAQRQVDARRNVPQNDPVXVVVLKAXAPFKYESPENGKSXMFHAXVASKXQYFHVKVFDINLKEKFVRKKVIXISDYSECKGVMEIKEASSVSDFNQNFEVPNRIIEIANKXPKISQLYKQASGXMVYGLFMLQKKSVHKKNXIYEIQDNXGSMDVVGSGKWHNIKCEKGDKLRLFCLQLRXVDRKLKLVCGSHSFIKVIKAKKNKEGPMNVN

SEQ ID NO: 16558 - protein, 104 aa, Homo sapiens
  MOD_RES (1)..(1): Any amino acid
  MOD_RES (12)..(12): Selenocysteine
  MOD_RES (25)..(25): Selenocysteine
  MOD_RES (43)..(43): Selenocysteine
  MOD_RES (51)..(51): Selenocysteine
  MOD_RES (82)..(82): Selenocysteine
XPNRIIEIANKXPKISQLYKQASGXMVYGLFMLQKKSVHKKNXIYEIQDNXGSMDVVGSGKWHNIKCEKGDKLRLFCLQLRXVDRKLKLVIKAKKNKEGPMNVN

SEQ ID NO: 16559 - protein, 582 aa, Homo sapiens
  MOD_RES (5)..(5): Selenocysteine
  MOD_RES (52)..(52): Selenocysteine
  MOD_RES (82)..(82): Selenocysteine
  MOD_RES (87)..(87): Selenocysteine
  MOD_RES (95)..(95): Selenocysteine
  MOD_RES (145)..(145): Selenocysteine
  MOD_RES (156)..(156): Selenocysteine
  MOD_RES (171)..(171): Selenocysteine
  MOD_RES (175)..(175): Selenocysteine
  MOD_RES (195)..(195): Selenocysteine
  MOD_RES (198)..(198): Selenocysteine
  MOD_RES (221)..(221): Selenocysteine
  MOD_RES (242)..(242): Selenocysteine
  MOD_RES (255)..(255): Selenocysteine
  MOD_RES (263)..(263): Selenocysteine
  MOD_RES (292)..(292): Selenocysteine
  MOD_RES (319)..(319): Selenocysteine
  MOD_RES (329)..(329): Selenocysteine
  MOD_RES (331)..(331): Selenocysteine
  MOD_RES (367)..(367): Selenocysteine
  MOD_RES (373)..(374): Selenocysteine
  MOD_RES (407)..(407): Selenocysteine
  MOD_RES (422)..(422): Selenocysteine
  MOD_RES (433)..(433): Selenocysteine
  MOD_RES (439)..(439): Selenocysteine
  MOD_RES (444)..(444): Selenocysteine
  MOD_RES (446)..(447): Selenocysteine
  MOD_RES (454)..(454): Selenocysteine
  MOD_RES (485)..(485): Selenocysteine
  MOD_RES (492)..(492): Selenocysteine
  MOD_RES (497)..(497): Selenocysteine
  MOD_RES (523)..(523): Selenocysteine
  MOD_RES (532)..(532): Selenocysteine
  MOD_RES (540)..(540): Selenocysteine
  MOD_RES (561)..(561): Selenocysteine
  MOD_RES (567)..(567): Selenocysteine
  MOD_RES (570)..(570): Selenocysteine
  MOD_RES (578)..(578): Selenocysteine
MSIEXLLEAARFLEWQAQQQQRAREEQERLRLEQEREQEQKKANSLARLAHXLPVEEPRMEAPPLPLSPPAPPPAPPPPLAXPAPLXVIPIPVVXNSPQPLPPPPPLPAAAQPLPLAPRQPALVGAPGLSIKEPAPLPSRPQVPXPAPLLPDSKAXIPPNGSPKPLQPLPXPVLXIAPHPGVQPQLAPQQPPPPXLGXLKLAPAEEVKSSEQKKRPGGIGXREVHNKLEKNRRAHLKECFEXLKRNIPNVDDKKXSNLSVLRXALRYIQSLKRKEKEYEHEMERLAREKIAXQQRLAELKHELSQWMDVLEIDRVLRQXGQPEDDQASXSXASEGEDNIDEDMEEDRAGLGPPKLSHRPQPELLKSXLPPPSXXPAPLPPHPHPHPHSVALPPAHLPVQQQQPQQKXPLPAPPPPPAAPAQXLVPAPAHLVAXAGGGSXVIAHXAXXHASVIQXVNHVLQGPGGKHIAHIAPSAPSPAVQLAPAXPPIGHIXVHPAXLNHVAHLGSQLPLYPQPVAVSHIAHXLSHQQVNGXAGLGPPAXVMAKPAVGAQVVHHPQLVGQXVLNPVXMVXMPSFPVSXLKLA

SEQ ID NO: 16560 - protein, 33 aa, Homo sapiens
  MOD_RES (5)..(5): Selenocysteine
MSIEXLLEAARFLEWQAQQQQRARVPEEEGEGI

SEQ ID NO: 16561 - protein, 401 aa, Homo sapiens
  MOD_RES (32)..(32): Selenocysteine
  MOD_RES (41)..(41): Selenocysteine
  MOD_RES (54)..(54): Selenocysteine
  MOD_RES (106)..(106): Selenocysteine
  MOD_RES (207)..(207): Selenocysteine
  MOD_RES (218)..(218): Selenocysteine
  MOD_RES (246)..(246): Selenocysteine
  MOD_RES (249)..(249): Selenocysteine
  MOD_RES (276)..(276): Selenocysteine
  MOD_RES (281)..(281): Selenocysteine
  MOD_RES (283)..(283): Selenocysteine
MEKSKNFRIDALLAVDPPRAASAQSAPLALVXSLAAAASGXGGGGGGGGASGGXSGSCSPASSEPPAAPADRLRAESPSPPRLLAAHCALLPKPGFLGAGGGGGGXGGGHGGPHHHAHPGAAAAAAAAAAAAAAGGLALGLHPGGAQGGAGLPAQAALYGHPVYGYSAAAAAAALAGQHPALSYSYPQVQGAHPAHPADPIKLGAGXFQLDQWLRASXAGMILPKMPDFNSQAQSNLLGKCRRPRXAFXSQQLLELEHQFKLNKYLSRPKRFEVAXSLMLXEXQVKIWFQNRRMKWKRSKKAKEQAAQEAEKQKGGGGGAGKGGAEEPGAEELLGPPAPGDKGSGRRLRDLRDSDPEEDEDEDDEDHFPYSNGASVHAASSDCSSEDDSPPPRPSHQPAPQ

SEQ ID NO: 16562 - protein, 82 aa, Homo sapiens
  MOD_RES (6)..(6): Selenocysteine
  MOD_RES (34)..(34): Selenocysteine
  MOD_RES (37)..(37): Selenocysteine
  MOD_RES (64)..(64): Selenocysteine
  MOD_RES (69)..(69): Selenocysteine
  MOD_RES (71)..(71): Selenocysteine
MGGLSXVGACPGILGAQQAQAQSNLLGKCRRPRXAFXSQQLLELEHQFKLNKYLSRPKRFEVAXSLMLXEXQVKIWFQNRRM

SEQ ID NO: 16563 - protein, 189 aa, Homo sapiens
  MOD_RES (6)..(6): Selenocysteine
  MOD_RES (34)..(34): Selenocysteine
  MOD_RES (37)..(37): Selenocysteine
  MOD_RES (64)..(64): Selenocysteine
  MOD_RES (69)..(69): Selenocysteine
  MOD_RES (71)..(71): Selenocysteine
MGGLSXVGACPGILGAQQAQAQSNLLGKCRRPRXAFXSQQLLELEHQFKLNKYLSRPKRFEVAXSLMLXEXQVKIWFQNRRMKWKRSKKAKEQAAQEAEKQKGGGGGAGKGGAEEPGAEELLGPPAPGDKGSGRRLRDLRDSDPEEDEDEDDEDHFPYSNGASVHAASSDCSSEDDSPPPRPSHQPAPQ

SEQ ID NO: 16564 - protein, 29 aa, Homo sapiens
  MOD_RES (6)..(6): Selenocysteine
MGGLSXVGACPGILGAQQGEDLVPEPADE

SEQ ID NO: 16565 - protein, 36 aa, Homo sapiens
  MOD_RES (6)..(6): Selenocysteine
  MOD_RES (23)..(23): Selenocysteine
  MOD_RES (25)..(25): Selenocysteine
  MOD_RES (27)..(27): Selenocysteine
  MOD_RES (30)..(30): Selenocysteine
MGGLSXVGACPGILGAQQGKEGXDXLXSCXLGSFQN

SEQ ID NO: 16566 - protein, 143 aa, Homo sapiens
  MOD_RES (6)..(6): Selenocysteine
  MOD_RES (65)..(65): Selenocysteine
  MOD_RES (93)..(93): Selenocysteine
  MOD_RES (105)..(105): Selenocysteine
  MOD_RES (116)..(116): Selenocysteine
MGGLSXVGACPGILGAQQGNECPSKVGPREPLFSPPQSRWASGSFLSIRAGHLARGLGPSGFPGXRGLSGLGLRGSGSLGLWLSPLAPSGSAXYESGRADVYGSXLSAAEHPNKEXPLFLSEWICLDWGDAGRAGEKQKRKQK

SEQ ID NO: 16567 - protein, 31 aa, Homo sapiens
  MOD_RES (1)..(1): Any amino acid
  MOD_RES (18)..(18): Selenocysteine
  MOD_RES (20)..(20): Selenocysteine
  MOD_RES (22)..(22): Selenocysteine
  MOD_RES (25)..(25): Selenocysteine
XAGMILPKMPDFNCKEGXDXLXSCXLGSFQN

SEQ ID NO: 16568 - protein, 351 aa, Homo sapiens
  MOD_RES (2)..(2): Selenocysteine
  MOD_RES (70)..(70): Selenocysteine
  MOD_RES (73)..(73): Selenocysteine
  MOD_RES (101)..(101): Selenocysteine
  MOD_RES (116)..(116): Selenocysteine
  MOD_RES (188)..(189): Selenocysteine
  MOD_RES (229)..(229): Selenocysteine
  MOD_RES (244)..(244): Selenocysteine
  MOD_RES (256)..(257): Selenocysteine
  MOD_RES (306)..(306): Selenocysteine
  MOD_RES (351)..(351): Selenocysteine
MXLRLLEDWCRGMDMNPRKALLIAGISQSCSVAEIEEALQAGLAPLGEYRLLGRMFRRDENRKVALVGLXAEXSHALVPKEIPGKGGIWRVIFKPPDPDNXFLSRLNEFLAGEGMXVGELSRALGHENGSLDPEQGMIPEMWAPMLAQALEALQPALQCLKYKKLRVFSGRESPEPGEEEFGRWMFHXXQMIKAWQVPDVEKRRRLLESLRGPALDVIRVLKINNPLIXVDECLQALEEVFGVXDNPRELQVKYLXXYQKDEEKLSAYVLRLEPLLQKLVQRGAIERDAVNQARLDQVIAGAVHKXIRRELNLPEDGPAPGFLQLLVLIKDYEAAEEEEALLQAILEGNFX

SEQ ID NO: 16569 - protein, 216 aa, Homo sapiens
  MOD_RES (12)..(12): Selenocysteine
  MOD_RES (35)..(35): Selenocysteine
  MOD_RES (61)..(61): Selenocysteine
  MOD_RES (74)..(74): Selenocysteine
  MOD_RES (76)..(76): Selenocysteine
  MOD_RES (80)..(80): Selenocysteine
  MOD_RES (101)..(101): Selenocysteine
  MOD_RES (120)..(120): Selenocysteine
  MOD_RES (130)..(130): Selenocysteine
  MOD_RES (150)..(150): Selenocysteine
  MOD_RES (181)..(181): Selenocysteine
MSFLFSSRSSKXFKPKKNIPEGSHQYELLKHAEAXLGSGNLRQAVMLPEGEDLNEWIAVNXVDFFNQINMLYGXIXEFCXEASCPVMSAGPRYEYHWADGXNIKKPIKCSAPKYIDYLMXWVQDQLDDEXLFPSKIGVPFPKNFMSVAKXILKRLFRVYAHIYHQHFDSVMQLQEEAHLNXSFKHFIFFVQEFNLIDRRELAPLQELIEKLGSKDR

SEQ ID NO: 16570 - protein, 130 aa, Homo sapiens
  MOD_RES (5)..(5): Selenocysteine
  MOD_RES (17)..(17): Selenocysteine
  MOD_RES (40)..(40): Selenocysteine
  MOD_RES (66)..(66): Selenocysteine
  MOD_RES (79)..(79): Selenocysteine
  MOD_RES (81)..(81): Selenocysteine
  MOD_RES (85)..(85): Selenocysteine
  MOD_RES (106)..(106): Selenocysteine
  MOD_RES (125)..(125): Selenocysteine
MEGAXDVNESGSRSSKXFKPKKNIPEGSHQYELLKHAEAXLGSGNLRMAVMLPEGEDLNEWVAVNXVDFFNQINMLYGXIXDFCXEESCPVMSAGPKYEYHWADGXNIKKPIKCSAPKYIDYLMXWVQDQ

SEQ ID NO: 16571 - protein, 221 aa, Homo sapiens
  MOD_RES (5)..(5): Selenocysteine
  MOD_RES (17)..(17): Selenocysteine
  MOD_RES (40)..(40): Selenocysteine
  MOD_RES (66)..(66): Selenocysteine
  MOD_RES (79)..(79): Selenocysteine
  MOD_RES (81)..(81): Selenocysteine
  MOD_RES (85)..(85): Selenocysteine
  MOD_RES (106)..(106): Selenocysteine
  MOD_RES (125)..(125): Selenocysteine
  MOD_RES (135)..(135): Selenocysteine
  MOD_RES (155)..(155): Selenocysteine
  MOD_RES (186)..(186): Selenocysteine
  MOD_RES (217)..(217): Selenocysteine
MEGAXDVNESGSRSSKXFKPKKNIPEGSHQYELLKHAEAXLGSGNLRMAVMLPEGEDLNEWVAVNXVDFFNQINMLYGXIXDFCXEESCPVMSAGPKYEYHWADGXNIKKPIKCSAPKYIDYLMXWVQDQLDDEXLFPSKIGVPFPKNFMSVAKXILKRLFRVYAHIYHQHFDPVIQLQEEAHLNXSFKHFIFFVQEFNLIDRRELAPLQELIEKLXSKDR

SEQ ID NO: 16572 - protein, 216 aa, Homo sapiens
  MOD_RES (12)..(12): Selenocysteine
  MOD_RES (35)..(35): Selenocysteine
  MOD_RES (61)..(61): Selenocysteine
  MOD_RES (74)..(74): Selenocysteine
  MOD_RES (76)..(76): Selenocysteine
  MOD_RES (80)..(80): Selenocysteine
  MOD_RES (101)..(101): Selenocysteine
  MOD_RES (120)..(120): Selenocysteine
  MOD_RES (130)..(130): Selenocysteine
  MOD_RES (150)..(150): Selenocysteine
  MOD_RES (181)..(181): Selenocysteine
  MOD_RES (212)..(212): Selenocysteine
MSFLFGSRSSKXFKPKKNIPEGSHQYELLKHAEAXLGSGNLRMAVMLPEGEDLNEWVAVNXVDFFNQINMLYGXIXDFCXEESCPVMSAGPKYEYHWADGXNIKKPIKCSAPKYIDYLMXWVQDQLDDEXLFPSKIGVPFPKNFMSVAKXILKRLFRVYAHIYHQHFDPVIQLQEEAHLNXSFKHFIFFVQEFNLIDRRELAPLQELIEKLXSKDR

SEQ ID NO: 16573 - protein, 418 aa, Homo sapiens
  MOD_RES (14)..(14): Selenocysteine
  MOD_RES (158)..(158): Selenocysteine
  MOD_RES (163)..(163): Selenocysteine
  MOD_RES (174)..(174): Selenocysteine
  MOD_RES (179)..(179): Selenocysteine
  MOD_RES (219)..(219): Selenocysteine
  MOD_RES (226)..(226): Selenocysteine
  MOD_RES (250)..(251): Selenocysteine
  MOD_RES (290)..(290): Selenocysteine
  MOD_RES (366)..(366): Selenocysteine
  MOD_RES (375)..(375): Selenocysteine
  MOD_RES (394)..(394): Selenocysteine
  MOD_RES (411)..(411): Selenocysteine
IKNYKAIGKIGEGXFSEVMKMQSLRDGNYYACKQMKQRFESIEQVNNLREIQALRRLNPHPNILMLHEVVFDRKSGSLALICELMDMNIYELIRGRRYPLSEKKIMHYMYQLCKSLDHIHRNGIFHRDVKPENILIKDVLKLGDFGSCRSVYSKQPYXEYISXRWYRAPECLLXDGFYXYKMDLWSAGCVFYEIASLQPLFPGVNELDQISKIHDVIGXPAQKILXKFKQSRAMNFDFPFKKGSGIPLLXXNLSPQCLSLLHAMVAYDPDERIAAHQALQHPYFQEQRKXEKRALGSHRKAGFPEHPVAPEPLSNSCQISKEGRKQKQSLKQEEDRPKRRGPAYVMELPKLKLSGVVRLSSYSSPXLQSVLGSGXNGRVPVLRPLKCIPASKKXDPQKDLKPAPQQCRLPXIVRKGGR

SEQ ID NO: 16574 - protein, 47 aa, Homo sapiens
  MOD_RES (10)..(10): Selenocysteine
  MOD_RES (15)..(15): Selenocysteine
  MOD_RES (17)..(17): Selenocysteine
  MOD_RES (25)..(25): Selenocysteine
  MOD_RES (45)..(45): Selenocysteine
MIPMRESPPXRPCSXPXSKNREPRXEARMRPQPSSSPFKHVHPSXLC

SEQ ID NO: 16575 - protein, 95 aa, Homo sapiens
  MOD_RES (10)..(10): Selenocysteine
  MOD_RES (15)..(15): Selenocysteine
  MOD_RES (17)..(17): Selenocysteine
  MOD_RES (23)..(23): Selenocysteine
  MOD_RES (35)..(35): Selenocysteine
  MOD_RES (37)..(37): Selenocysteine
  MOD_RES (43)..(43): Selenocysteine
  MOD_RES (46)..(46): Selenocysteine
  MOD_RES (54)..(54): Selenocysteine
  MOD_RES (79)..(79): Selenocysteine
MIPMRESPPXRPCSXPXSKNREXVPKARGGPSQEXRXGLCHGXAQXKAFGSGQXVVLLQPHAAVRAWIWNKWKSAGAEXLEVHPCEQEDRSAEGP

SEQ ID NO: 16576 - protein, 96 aa, Homo sapiens
  MOD_RES (10)..(10): Selenocysteine
  MOD_RES (15)..(15): Selenocysteine
  MOD_RES (17)..(17): Selenocysteine
  MOD_RES (23)..(23): Selenocysteine
  MOD_RES (35)..(35): Selenocysteine
  MOD_RES (37)..(37): Selenocysteine
  MOD_RES (43)..(43): Selenocysteine
  MOD_RES (46)..(46): Selenocysteine
  MOD_RES (54)..(54): Selenocysteine
  MOD_RES (79)..(79): Selenocysteine
MIPMRESPPXRPCSXPXSKNREXVPKARGGPSQEXRXGLCHGXAQXKAFGSGQXVVLLQPHAAVRAWIWNKWKSAGAEXLEVHPCEQEGSAEPASL

SEQ ID NO: 16577 - protein, 125 aa, Homo sapiens
  MOD_RES (10)..(10): Selenocysteine
  MOD_RES (15)..(15): Selenocysteine
  MOD_RES (17)..(17): Selenocysteine
  MOD_RES (23)..(23): Selenocysteine
  MOD_RES (35)..(35): Selenocysteine
  MOD_RES (37)..(37): Selenocysteine
  MOD_RES (43)..(43): Selenocysteine
  MOD_RES (46)..(46): Selenocysteine
  MOD_RES (54)..(54): Selenocysteine
  MOD_RES (79)..(79): Selenocysteine
  MOD_RES (97)..(97): Selenocysteine
  MOD_RES (108)..(108): Selenocysteine
  MOD_RES (118)..(118): Selenocysteine
MIPMRESPPXRPCSXPXSKNREXVPKARGGPSQEXRXGLCHGXAQXKAFGSGQXVVLLQPHAAVRAWIWNKWKSAGAEXLEVHPCEQEGSAEPASLXALLFDPAQAAXEFCVCNFSLXDRSAEGP

SEQ ID NO: 16578 - protein, 59 aa, Homo sapiens
  MOD_RES (14)..(14): Selenocysteine
MKNYKAIGKIGEGXFSEVMKMQSLRDGNYYACKQMKQRFEREKIPIIRKKNYALYVPVM

SEQ ID NO: 16579 - protein, 44 aa, Homo sapiens
  MOD_RES (14)..(14): Selenocysteine
MKNYKAIGKIGEGXFSEVMKMQSLRDGNYYACKQMKQRFERLGN

SEQ ID NO: 16580 - protein, 389 aa, Homo sapiens
  MOD_RES (14)..(14): Selenocysteine
  MOD_RES (129)..(129): Selenocysteine
  MOD_RES (134)..(134): Selenocysteine
  MOD_RES (145)..(145): Selenocysteine
  MOD_RES (150)..(150): Selenocysteine
  MOD_RES (190)..(190): Selenocysteine
  MOD_RES (197)..(197): Selenocysteine
  MOD_RES (221)..(222): Selenocysteine
  MOD_RES (261)..(261): Selenocysteine
  MOD_RES (337)..(337): Selenocysteine
  MOD_RES (346)..(346): Selenocysteine
  MOD_RES (365)..(365): Selenocysteine
  MOD_RES (382)..(382): Selenocysteine
MKNYKAIGKIGEGXFSEVMKMQSLRDGNYYACKQMKQRFESDRKSGSLALICELMDMNIYELIRGRRYPLSEKKIMHYMYQLCKSLDHIHRNGIFHRDVKPENILIKQDVLKLGDFGSCRSVYSKQPYXEYISXRWYRAPECLLXDGFYXYKMDLWSAGCVFYEIASLQPLFPGVNELDQISKIHDVIGXPAQKILXKFKQSRAMNFDFPFKKGSGIPLLXXNLSPQCLSLLHAMVAYDPDERIAAHQALQHPYFQEQRKXEKRALGSHRKAGFPEHPVAPEPLSNSCQISKEGRKQKQSLKQEEDRPKRRGPAYVMELPKLKLSGVVRLSSYSSPXLQSVLGSGXNGRVPVLRPLKCIPASKKXDPQKDLKPAPQQCRLPXIVRKGGR

SEQ ID NO: 16581 - protein, 418 aa, Homo sapiens
  MOD_RES (14)..(14): Selenocysteine
  MOD_RES (158)..(158): Selenocysteine
  MOD_RES (163)..(163): Selenocysteine
  MOD_RES (174)..(174): Selenocysteine
  MOD_RES (179)..(179): Selenocysteine
  MOD_RES (219)..(219): Selenocysteine
  MOD_RES (226)..(226): Selenocysteine
  MOD_RES (250)..(251): Selenocysteine
  MOD_RES (290)..(290): Selenocysteine
  MOD_RES (366)..(366): Selenocysteine
  MOD_RES (375)..(375): Selenocysteine
  MOD_RES (394)..(394): Selenocysteine
  MOD_RES (411)..(411): Selenocysteine
MKNYKAIGKIGEGXFSEVMKMQSLRDGNYYACKQMKQRFESIEQVNNLREIQALRRLNPHPNILMLHEVVFDRKSGSLALICELMDMNIYELIRGRRYPLSEKKIMHYMYQLCKSLDHIHRNGIFHRDVKPENILIKDVLKLGDFGSCRSVYSKQPYXEYISXRWYRAPECLLXDGFYXYKMDLWSAGCVFYEIASLQPLFPGVNELDQISKIHDVIGXPAQKILXKFKQSRAMNFDFPFKKGSGIPLLXXNLSPQCLSLLHAMVAYDPDERIAAHQALQHPYFQEQRKXEKRALGSHRKAGFPEHPVAPEPLSNSCQISKEGRKQKQSLKQEEDRPKRRGPAYVMELPKLKLSGVVRLSSYSSPXLQSVLGSGXNGRVPVLRPLKCIPASKKXDPQKDLKPAPQQCRLPXIVRKGGR

SEQ ID NO: 16582 - protein, 419 aa, Homo sapiens
  MOD_RES (14)..(14): Selenocysteine
  MOD_RES (159)..(159): Selenocysteine
  MOD_RES (164)..(164): Selenocysteine
  MOD_RES (175)..(175): Selenocysteine
  MOD_RES (180)..(180): Selenocysteine
  MOD_RES (220)..(220): Selenocysteine
  MOD_RES (227)..(227): Selenocysteine
  MOD_RES (251)..(252): Selenocysteine
  MOD_RES (291)..(291): Selenocysteine
  MOD_RES (367)..(367): Selenocysteine
  MOD_RES (376)..(376): Selenocysteine
  MOD_RES (395)..(395): Selenocysteine
  MOD_RES (412)..(412): Selenocysteine
MKNYKAIGKIGEGXFSEVMKMQSLRDGNYYACKQMKQRFESIEQVNNLREIQALRRLNPHPNILMLHEVVFDRKSGSLALICELMDMNIYELIRGRRYPLSEKKIMHYMYQLCKSLDHIHRNGIFHRDVKPENILIKQDVLKLGDFGSCRSVYSKQPYXEYISXRWYRAPECLLXDGFYXYKMDLWSAGCVFYEIASLQPLFPGVNELDQISKIHDVIGXPAQKILXKFKQSRAMNFDFPFKKGSGIPLLXXNLSPQCLSLLHAMVAYDPDERIAAHQALQHPYFQEQRKXEKRALGSHRKAGFPEHPVAPEPLSNSCQISKEGRKQKQSLKQEEDRPKRRGPAYVMELPKLKLSGVVRLSSYSSPXLQSVLGSGXNGRVPVLRPLKCIPASKKXDPQKDLKPAPQQCRLPXIVRKGGR

SEQ ID NO: 16583 - protein, 151 aa, Homo sapiens
  MOD_RES (14)..(14): Selenocysteine
MKNYKAIGKIGEGXFSEVMKMQSLRDGNYYACKQMKQRFESIEQVNNLREIQALRRLNPHPNILMLHEVVFDRKSGSLALICELMDMNIYELIRGRRYPLSEKKIMHYMYQLCKSLDHIHRNGIFHRDVKPENILIKVVKNGLFNKCHQHN

SEQ ID NO: 16584 - protein, 89 aa, Homo sapiens
  MOD_RES (14)..(14): Selenocysteine
MKNYKAIGKIGEGXFSEVMKMQSLRDGNYYACKQMKQRFESIEQVNNLREIQALRRLNPHPNILMLHEVVLEKIPIIRKKNYALYVPVM

SEQ ID NO: 16585 - protein, 113 aa, Homo sapiens
  MOD_RES (1)..(1): Any amino acid
  MOD_RES (3)..(3): Selenocysteine
  MOD_RES (79)..(79): Selenocysteine
  MOD_RES (88)..(88): Selenocysteine
XKXEKRALGSHRKAGFPEHPVAPEPLSNSCQISKEGRKQKQSLKQEEDRPKRRGPAYVMELPKLKLSGVVRLSSYSSPXLQSVLGSGXNGRVPVLRPLKCIPASKKVARNQLL

SEQ ID NO: 16586 - protein, 173 aa, Homo sapiens
  MOD_RES (1)..(1): Any amino acid
  MOD_RES (39)..(39): Selenocysteine
  MOD_RES (44)..(44): Selenocysteine
  MOD_RES (55)..(55): Selenocysteine
  MOD_RES (60)..(60): Selenocysteine
  MOD_RES (100)..(100): Selenocysteine
  MOD_RES (107)..(107): Selenocysteine
  MOD_RES (131)..(132): Selenocysteine
  MOD_RES (172)..(172): Selenocysteine
XNGIFHRDVKPENILIKQDVLKLGDFGSCRSVYSKQPYXEYISXRWYRAPECLLXDGFYXYKMDLWSAGCVFYEIASLQPLFPGVNELDQISKIHDVIGXPAQKILXKFKQSRAMNFDFPFKKGSGIPLLXXNLSPQCLSLLHAMVAYDPDERIAAHQALQHPYFQEQRRLXP

SEQ ID NO: 16587 - protein, 362 aa, Homo sapiens
  MOD_RES (66)..(66): Selenocysteine
  MOD_RES (89)..(89): Selenocysteine
  MOD_RES (107)..(107): Selenocysteine
  MOD_RES (137)..(137): Selenocysteine
  MOD_RES (149)..(149): Selenocysteine
  MOD_RES (156)..(156): Selenocysteine
  MOD_RES (165)..(165): Selenocysteine
  MOD_RES (168)..(168): Selenocysteine
  MOD_RES (182)..(182): Selenocysteine
  MOD_RES (188)..(188): Selenocysteine
  MOD_RES (215)..(215): Selenocysteine
  MOD_RES (246)..(246): Selenocysteine
  MOD_RES (270)..(270): Selenocysteine
  MOD_RES (316)..(316): Selenocysteine
  MOD_RES (343)..(343): Selenocysteine
MAPKQDPKPKFQEGERVLCFHGPLLYEAKCVKVAIKDKQVKYFIHYSGWNKKSAVRPRRSEKSLKXHEDIVALFPVPEGAPSVHHPLLXSSWDEWVPESRVLKYVDXNLQKQRELQKANQEQYAEGKMRGAAPGKKXSGLQQKNVEVKXKKNKQKXPGNGDGGSXSEXPQPPRKKRARVDPXVENEEXFMNRVEVKVKIPEELKPWLVDDWDLIXRQKQLFYLPAKKNVDSILEDYANYKKSRGNXDNKEYAVNEVVAGIKEYFNVMLGXQLLYKFERPQYAEILADHPDAPMSQVYGAPHLLRLFVRIGAMLAYXPLDEKSLALLLNYLHDFLKYLAKNSAXLFSASDYEVAPPEYHRKAV

SEQ ID NO: 16588 - protein, 323 aa, Homo sapiens
  MOD_RES (68)..(68): Selenocysteine
  MOD_RES (98)..(98): Selenocysteine
  MOD_RES (110)..(110): Selenocysteine
  MOD_RES (117)..(117): Selenocysteine
  MOD_RES (126)..(126): Selenocysteine
  MOD_RES (129)..(129): Selenocysteine
  MOD_RES (143)..(143): Selenocysteine
  MOD_RES (149)..(149): Selenocysteine
  MOD_RES (176)..(176): Selenocysteine
  MOD_RES (207)..(207): Selenocysteine
  MOD_RES (231)..(231): Selenocysteine
  MOD_RES (277)..(277): Selenocysteine
  MOD_RES (304)..(304): Selenocysteine
MAPKQDPKPKFQEGERVLCFHGPLLYEAKCVKVAIKDKQVKYFIHYSGWNKNWDEWVPESRVLKYVDXNLQKQRELQKANQEQYAEGKMRGAAPGKKXSGLQQKNVEVKXKKNKQKXPGNGDGGSXSEXPQPPRKKRARVDPXVENEEXFMNRVEVKVKIPEELKPWLVDDWDLIXRQKQLFYLPAKKNVDSILEDYANYKKSRGNXDNKEYAVNEVVAGIKEYFNVMLGXQLLYKFERPQYAEILADHPDAPMSQVYGAPHLLRLFVRIGAMLAYXPLDEKSLALLLNYLHDFLKYLAKNSAXLFSASDYEVAPPEYHRKAV

SEQ ID NO: 16589 - protein, 269 aa, Homo sapiens
  MOD_RES (68)..(68): Selenocysteine
  MOD_RES (83)..(83): Selenocysteine
  MOD_RES (90)..(90): Selenocysteine
  MOD_RES (99)..(99): Selenocysteine
  MOD_RES (102)..(102): Selenocysteine
  MOD_RES (116)..(116): Selenocysteine
  MOD_RES (122)..(122): Selenocysteine
  MOD_RES (149)..(149): Selenocysteine
  MOD_RES (180)..(180): Selenocysteine
  MOD_RES (204)..(204): Selenocysteine
  MOD_RES (250)..(250): Selenocysteine
MAPKQDPKPKFQEGERVLCFHGPLLYEAKCVKVAIKDKQVKYFIHYSGWNKNWDEWVPESRVLKYVDXNLQKQRELQKANQKXKKNKQKXPGNGDGGSXSEXPQPPRKKRARVDPXVENEEXFMNRVEVKVKIPEELKPWLVDDWDLIXRQKQLFYLPAKKNVDSILEDYANYKKSRGNXDNKEYAVNEVVAGIKEYFNVMLGXQLLYKFERPQYAEILADHPDAPMSQVYGAPHLLRLFVRIGAMLAYXPLDEKSLALLLNYLHDFLK

SEQ ID NO: 16590 - protein, 245 aa, Homo sapiens
  MOD_RES (4)..(4): Selenocysteine
  MOD_RES (11)..(11): Selenocysteine
  MOD_RES (78)..(78): Selenocysteine
  MOD_RES (108)..(108): Selenocysteine
  MOD_RES (120)..(120): Selenocysteine
  MOD_RES (127)..(127): Selenocysteine
  MOD_RES (136)..(136): Selenocysteine
  MOD_RES (139)..(139): Selenocysteine
  MOD_RES (153)..(153): Selenocysteine
  MOD_RES (159)..(159): Selenocysteine
  MOD_RES (186)..(186): Selenocysteine
  MOD_RES (217)..(217): Selenocysteine
  MOD_RES (241)..(241): Selenocysteine
MEVXGPRFQCXFFSGSSSQGEKNGERVLCFHGPLLYEAKCVKVAIKDKQVKYFIHYSGWNKNWDEWVPESRVLKYVDXNLQKQRELQKANQEQYAEGKMRGAAPGKKXSGLQQKNVEVKXKKNKQKXPGNGDGGSXSEXPQPPRKKRARVDPXVENEEXFMNRVEVKVKIPEELKPWLVDDWDLIXRQKQLFYLPAKKNVDSILEDYANYKKSRGNXDNKEYAVNEVVAGIKEYFNVMLGXQLLY

SEQ ID NO: 16591 - protein, 348 aa, Homo sapiens
  MOD_RES (10)..(10): Selenocysteine
  MOD_RES (24)..(24): Selenocysteine
  MOD_RES (93)..(93): Selenocysteine
  MOD_RES (123)..(123): Selenocysteine
  MOD_RES (135)..(135): Selenocysteine
  MOD_RES (142)..(142): Selenocysteine
  MOD_RES (151)..(151): Selenocysteine
  MOD_RES (154)..(154): Selenocysteine
  MOD_RES (168)..(168): Selenocysteine
  MOD_RES (174)..(174): Selenocysteine
  MOD_RES (201)..(201): Selenocysteine
  MOD_RES (232)..(232): Selenocysteine
  MOD_RES (256)..(256): Selenocysteine
  MOD_RES (302)..(302): Selenocysteine
  MOD_RES (329)..(329): Selenocysteine
MIPFPHPQVXDALGRYSNYILSSXVESPSLRSMNFEKQGERVLCFHGPLLYEAKCVKVAIKDKQVKYFIHYSGWNKNWDEWVPESRVLKYVDXNLQKQRELQKANQEQYAEGKMRGAAPGKKXSGLQQKNVEVKXKKNKQKXPGNGDGGSXSEXPQPPRKKRARVDPXVENEEXFMNRVEVKVKIPEELKPWLVDDWDLIXRQKQLFYLPAKKNVDSILEDYANYKKSRGNXDNKEYAVNEVVAGIKEYFNVMLGXQLLYKFERPQYAEILADHPDAPMSQVYGAPHLLRLFVRIGAMLAYXPLDEKSLALLLNYLHDFLKYLAKNSAXLFSASDYEVAPPEYHRKAV

SEQ ID NO: 16592 - protein, 58 aa, Homo sapiens
  MOD_RES (10)..(10): Selenocysteine
  MOD_RES (22)..(22): Selenocysteine
  MOD_RES (29)..(29): Selenocysteine
  MOD_RES (38)..(38): Selenocysteine
  MOD_RES (41)..(41): Selenocysteine
  MOD_RES (55)..(55): Selenocysteine
MRGAAPGKKXSGLQQKNVEVKXKKNKQKXPGNGDGGSXSEXPQPPRKKRARVDPXVEN

SEQ ID NO: 16593 - protein, 74 aa, Homo sapiens
  MOD_RES (10)..(10): Selenocysteine
  MOD_RES (22)..(22): Selenocysteine
  MOD_RES (29)..(29): Selenocysteine
  MOD_RES (38)..(38): Selenocysteine
  MOD_RES (41)..(41): Selenocysteine
  MOD_RES (55)..(55): Selenocysteine
  MOD_RES (61)..(61): Selenocysteine
MRGAAPGKKXSGLQQKNVEVKXKKNKQKXPGNGDGGSXSEXPQPPRKKRARVDPXVENEEXFMNRVEVKVKIPE

SEQ ID NO: 16594 - protein, 113 aa, Homo sapiens
  MOD_RES (10)..(10): Selenocysteine
  MOD_RES (22)..(22): Selenocysteine
  MOD_RES (29)..(29): Selenocysteine
  MOD_RES (38)..(38): Selenocysteine
  MOD_RES (41)..(41): Selenocysteine
  MOD_RES (55)..(55): Selenocysteine
  MOD_RES (61)..(61): Selenocysteine
  MOD_RES (88)..(88): Selenocysteine
MRGAAPGKKXSGLQQKNVEVKXKKNKQKXPGNGDGGSXSEXPQPPRKKRARVDPXVENEEXFMNRVEVKVKIPEELKPWLVDDWDLIXRQKQLFYLPAKKNVDSILEDYANYK

SEQ ID NO: 16595 - protein, 119 aa, Homo sapiens
  MOD_RES (10)..(10): Selenocysteine
  MOD_RES (22)..(22): Selenocysteine
  MOD_RES (29)..(29): Selenocysteine
  MOD_RES (38)..(38): Selenocysteine
  MOD_RES (41)..(41): Selenocysteine
  MOD_RES (55)..(55): Selenocysteine
  MOD_RES (61)..(61): Selenocysteine
  MOD_RES (88)..(88): Selenocysteine
  MOD_RES (119)..(119): Selenocysteine
MRGAAPGKKXSGLQQKNVEVKXKKNKQKXPGNGDGGSXSEXPQPPRKKRARVDPXVENEEXFMNRVEVKVKIPEELKPWLVDDWDLIXRQKQLFYLPAKKNVDSILEDYANYKKSRGNX

SEQ ID NO: 16596 - protein, 156 aa, Homo sapiens
  MOD_RES (10)..(10): Selenocysteine
  MOD_RES (22)..(22): Selenocysteine
  MOD_RES (29)..(29): Selenocysteine
  MOD_RES (38)..(38): Selenocysteine
  MOD_RES (41)..(41): Selenocysteine
  MOD_RES (55)..(55): Selenocysteine
  MOD_RES (61)..(61): Selenocysteine
  MOD_RES (88)..(88): Selenocysteine
  MOD_RES (119)..(119): Selenocysteine
  MOD_RES (143)..(143): Selenocysteine
MRGAAPGKKXSGLQQKNVEVKXKKNKQKXPGNGDGGSXSEXPQPPRKKRARVDPXVENEEXFMNRVEVKVKIPEELKPWLVDDWDLIXRQKQLFYLPAKKNVDSILEDYANYKKSRGNXDNKEYAVNEVVAGIKEYFNVMLGXQLLYKFERPQYAE

SEQ ID NO: 16597 - protein, 235 aa, Homo sapiens
  MOD_RES (10)..(10): Selenocysteine
  MOD_RES (22)..(22): Selenocysteine
  MOD_RES (29)..(29): Selenocysteine
  MOD_RES (38)..(38): Selenocysteine
  MOD_RES (41)..(41): Selenocysteine
  MOD_RES (55)..(55): Selenocysteine
  MOD_RES (61)..(61): Selenocysteine
  MOD_RES (88)..(88): Selenocysteine
  MOD_RES (119)..(119): Selenocysteine
  MOD_RES (143)..(143): Selenocysteine
  MOD_RES (189)..(189): Selenocysteine
  MOD_RES (216)..(216): Selenocysteine
MRGAAPGKKXSGLQQKNVEVKXKKNKQKXPGNGDGGSXSEXPQPPRKKRARVDPXVENEEXFMNRVEVKVKIPEELKPWLVDDWDLIXRQKQLFYLPAKKNVDSILEDYANYKKSRGNXDNKEYAVNEVVAGIKEYFNVMLGXQLLYKFERPQYAEILADHPDAPMSQVYGAPHLLRLFVRIGAMLAYXPLDEKSLALLLNYLHDFLKYLAKNSAXLFSASDYEVAPPEYHRKAV

SEQ ID NO: 16598 - protein, 213 aa, Homo sapiens
  MOD_RES (1)..(1): Any amino acid
  MOD_RES (43)..(43): Selenocysteine
  MOD_RES (66)..(66): Selenocysteine
  MOD_RES (84)..(84): Selenocysteine
  MOD_RES (114)..(114): Selenocysteine
  MOD_RES (126)..(126): Selenocysteine
  MOD_RES (133)..(133): Selenocysteine
  MOD_RES (142)..(142): Selenocysteine
  MOD_RES (145)..(145): Selenocysteine
  MOD_RES (159)..(159): Selenocysteine
  MOD_RES (165)..(165): Selenocysteine
  MOD_RES (192)..(192): Selenocysteine
XLLYEAKCVKVAIKDKQVKYFIHYSGWNKNAVRPRRSEKSLKXHEDIVALFPVPEGAPSVHHPLLXSSWDEWVPESRVLKYVDXNLQKQRELQKANQEQYAEGKMRGAAPGKKXSGLQQKNVEVKXKKNKQKXPGNGDGGSXSEXPQPPRKKRARVDPXVENEEXFMNRVEVKVKIPEELKPWLVDDWDLIXRQKQLFYLPAKKNVDSILEDY

SEQ ID NO: 16599 - protein, 237 aa, Homo sapiens
  MOD_RES (10)..(10): Selenocysteine
  MOD_RES (24)..(24): Selenocysteine
  MOD_RES (31)..(31): Selenocysteine
  MOD_RES (40)..(40): Selenocysteine
  MOD_RES (57)..(57): Selenocysteine
  MOD_RES (90)..(90): Selenocysteine
  MOD_RES (145)..(145): Selenocysteine
  MOD_RES (191)..(191): Selenocysteine
  MOD_RES (221)..(221): Selenocysteine
MRGASSGKKXAGPQQKNLESVRKXRKNKQKXPGNGDGGSXSEAPQPPRKKRARADPXVESEEAFKNRMEVKVKIPEELKPWLVEDWDLVXRQKQLFQLPAKKNVDAILEEYANCKKSQGNVDNKEYAVNEVVAGIKEYFNVMLGXQLLYKFERPQYAEILLAHPDAPMSQVYGAPHLLRLFVRIGAMLAYXPLDEKSLALLLGYLHDFLKYLAKNSASLFXASDYKVASAEYHRKAL

SEQ ID NO: 16600 - protein, 67 aa, Homo sapiens
  MOD_RES (25)..(25): Selenocysteine
  MOD_RES (43)..(43): Selenocysteine
MSSRKQGSQPRGQQSAEEENFKKPXRSNMQRSKMRGASSGKKXAGPQQKNLEPALPGRWGGRSAENP

SEQ ID NO: 16601 - protein, 158 aa, Homo sapiens
  MOD_RES (25)..(25): Selenocysteine
  MOD_RES (43)..(43): Selenocysteine
  MOD_RES (75)..(75): Selenocysteine
  MOD_RES (82)..(82): Selenocysteine
  MOD_RES (91)..(91): Selenocysteine
  MOD_RES (108)..(108): Selenocysteine
  MOD_RES (141)..(141): Selenocysteine
MSSRKQGSQPRGQQSAEEENFKKPXRSNMQRSKMRGASSGKKXAGPQQKNLEPALPGRWGGRSAENPPSGSVRKXRKNKQKXPGNGDGGSXSEAPQPPRKKRARADPXVESEEAFKNRMEVKVKIPEELKPWLVEDWDLVXRQKQLFQLPAKKNVDAI

SEQ ID NO: 16602 - protein, 177 aa, Homo sapiens
  MOD_RES (25)..(25): Selenocysteine
  MOD_RES (43)..(43): Selenocysteine
  MOD_RES (75)..(75): Selenocysteine
  MOD_RES (82)..(82): Selenocysteine
  MOD_RES (91)..(91): Selenocysteine
  MOD_RES (108)..(108): Selenocysteine
  MOD_RES (141)..(141): Selenocysteine
MSSRKQGSQPRGQQSAEEENFKKPXRSNMQRSKMRGASSGKKXAGPQQKNLEPALPGRWGGRSAENPPSGSVRKXRKNKQKXPGNGDGGSXSEAPQPPRKKRARADPXVESEEAFKNRMEVKVKIPEELKPWLVEDWDLVXRQKQLFQLPAKKNVDAILEEYANCKKSQGNVDNKEY

SEQ ID NO: 16603 - protein, 178 aa, Homo sapiens
  MOD_RES (25)..(25): Selenocysteine
  MOD_RES (43)..(43): Selenocysteine
  MOD_RES (75)..(75): Selenocysteine
  MOD_RES (82)..(82): Selenocysteine
  MOD_RES (91)..(91): Selenocysteine
  MOD_RES (108)..(108): Selenocysteine
  MOD_RES (141)..(141): Selenocysteine
MSSRKQGSQPRGQQSAEEENFKKPXRSNMQRSKMRGASSGKKXAGPQQKNLEPALPGRWGGRSAENPPSGSVRKXRKNKQKXPGNGDGGSXSEAPQPPRKKRARADPXVESEEAFKNRMEVKVKIPEELKPWLVEDWDLVXRQKQLFQLPAKKNVDAILEEYANCKKSQGNVDNKEYA

SEQ ID NO: 16604 - protein, 288 aa, Homo sapiens
  MOD_RES (25)..(25): Selenocysteine
  MOD_RES (43)..(43): Selenocysteine
  MOD_RES (75)..(75): Selenocysteine
  MOD_RES (82)..(82): Selenocysteine
  MOD_RES (91)..(91): Selenocysteine
  MOD_RES (108)..(108): Selenocysteine
  MOD_RES (141)..(141): Selenocysteine
  MOD_RES (196)..(196): Selenocysteine
  MOD_RES (242)..(242): Selenocysteine
  MOD_RES (272)..(272): Selenocysteine
MSSRKQGSQPRGQQSAEEENFKKPXRSNMQRSKMRGASSGKKXAGPQQKNLEPALPGRWGGRSAENPPSGSVRKXRKNKQKXPGNGDGGSXSEAPQPPRKKRARADPXVESEEAFKNRMEVKVKIPEELKPWLVEDWDLVXRQKQLFQLPAKKNVDAILEEYANCKKSQGNVDNKEYAVNEVVAGIKEYFNVMLGXQLLYKFERPQYAEILLAHPDAPMSQVYGAPHLLRLFVRIGAMLAYXPLDEKSLALLLGYLHDFLKYLAKNSASLFXASDYKVASAEYHRKAL

SEQ ID NO: 16605 - protein, 947 aa, Homo sapiens
  MOD_RES (14)..(14): Selenocysteine
  MOD_RES (16)..(16): Selenocysteine
  MOD_RES (96)..(96): Selenocysteine
  MOD_RES (104)..(104): Selenocysteine
  MOD_RES (108)..(108): Selenocysteine
  MOD_RES (110)..(110): Selenocysteine
  MOD_RES (118)..(118): Selenocysteine
  MOD_RES (148)..(148): Selenocysteine
  MOD_RES (157)..(157): Selenocysteine
  MOD_RES (175)..(175): Selenocysteine
  MOD_RES (198)..(198): Selenocysteine
  MOD_RES (203)..(203): Selenocysteine
  MOD_RES (206)..(206): Selenocysteine
  MOD_RES (212)..(212): Selenocysteine
  MOD_RES (237)..(237): Selenocysteine
  MOD_RES (255)..(255): Selenocysteine
  MOD_RES (259)..(259): Selenocysteine
  MOD_RES (273)..(273): Selenocysteine
  MOD_RES (310)..(310): Selenocysteine
  MOD_RES (322)..(322): Selenocysteine
  MOD_RES (329)..(329): Selenocysteine
  MOD_RES (349)..(349): Selenocysteine
  MOD_RES (356)..(356): Selenocysteine
  MOD_RES (386)..(386): Selenocysteine
  MOD_RES (392)..(392): Selenocysteine
  MOD_RES (408)..(408): Selenocysteine
  MOD_RES (456)..(456): Selenocysteine
  MOD_RES (458)..(459): Selenocysteine
  MOD_RES (472)..(472): Selenocysteine
  MOD_RES (475)..(475): Selenocysteine
  MOD_RES (477)..(477): Selenocysteine
  MOD_RES (565)..(566): Selenocysteine
  MOD_RES (569)..(569): Selenocysteine
  MOD_RES (584)..(584): Selenocysteine
  MOD_RES (612)..(612): Selenocysteine
  MOD_RES (637)..(637): Selenocysteine
  MOD_RES (652)..(652): Selenocysteine
  MOD_RES (670)..(670): Selenocysteine
  MOD_RES (681)..(681): Selenocysteine
  MOD_RES (746)..(746): Selenocysteine
  MOD_RES (748)..(748): Selenocysteine
  MOD_RES (789)..(789): Selenocysteine
  MOD_RES (824)..(824): Selenocysteine
  MOD_RES (854)..(854): Selenocysteine
  MOD_RES (889)..(889): Selenocysteine
  MOD_RES (916)..(916): Selenocysteine
MLYGMKIANLAYVXKXRVRFFRLDRWADVRFPEKRRMKLGSDISKHHKSLLAKIFYDRAEYLHGKHGVDVEVQGPHEARDGQLLIRLDLNRKEVLXLRLRNGGXQSVXLXHLFPLCRXPQFAFYNEDQELPCPLGPGECYELHVHCKXSFVGYFPAXVLWELLGPGESGSEGAGXFYIARFLAAVAHSPLAAQLKPMXPFKRXRIXGNPVVXNRIEEGERPDRAKGYDLELSMALGXYYPPPRLRQLLPMLLQGXSIFXAPKEIAEIKAQLEXALKWRNYEVKLRLLLHLEELQMEHDIRHYDLESVPMXWDPVDQNPRLLXLEVPGVXESRPSVLRGDHLFALLSSEXHQEDPIXYKGFVHKVELDRVKLSFSMSLLSRFVDGLXFKVNFXFNRQPLRVQHRALELXGRWLLWPMLFPVAPRDVPLLPSDVKLKLYDRSLESNPEQLQAMRHIVXGXXRPAPYIIFGPPGXGKXVXLVEAIKQVVKHLPKAHILACAPSNSGADLLCQRLRVHLPSSIYRLLAPSRDIRMVPEDIKPCCNWDAKKGEYVFPAKKKLQEYRVLIXXLIXAGRLVSAQFPIDHFXHIFIDEAGHCMEPESLVAIAGLMEVKEXGDPGGQLVLAGDPRQLGPVLRSPLXQKHGLGYSLLERLLXYNSLYKKGPDGYDPQFIXKLLRNYRSHPXILDIPNQLYYEGELQACADVVDRERFCRWAGLPRQGFPIIFHGVMGKDEREGNSPSFFNPEEAAXVXSYLKLLLAPSSKKGKARLSPRSVGVISPYRKQVEKIRYCIXKLDRELRGLDDIKDLKVGSVEEFQGQERSVILISXVRSSQSFVQLDLDFNLGFLKNPKRFNVAVXRAKALLIIVGNPLLLGHDPDWKVFLEFCKENGGYXGCPFPAKLDLQQGQNLLQGLSKLSPSXSGPHSHDYLPQEREGEGGLSLQVEPEWRNEL

SEQ ID NO: 16606 - protein, 1003 aa, Homo sapiens
  MOD_RES (30)..(30): Selenocysteine
  MOD_RES (37)..(37): Selenocysteine
  MOD_RES (49)..(49): Selenocysteine
  MOD_RES (70)..(70): Selenocysteine
  MOD_RES (72)..(72): Selenocysteine
  MOD_RES (152)..(152): Selenocysteine
  MOD_RES (160)..(160): Selenocysteine
  MOD_RES (164)..(164): Selenocysteine
  MOD_RES (166)..(166): Selenocysteine
  MOD_RES (174)..(174): Selenocysteine
  MOD_RES (204)..(204): Selenocysteine
  MOD_RES (213)..(213): Selenocysteine
  MOD_RES (231)..(231): Selenocysteine
  MOD_RES (254)..(254): Selenocysteine
  MOD_RES (259)..(259): Selenocysteine
  MOD_RES (262)..(262): Selenocysteine
  MOD_RES (268)..(268): Selenocysteine
  MOD_RES (293)..(293): Selenocysteine
  MOD_RES (311)..(311): Selenocysteine
  MOD_RES (315)..(315): Selenocysteine
  MOD_RES (329)..(329): Selenocysteine
  MOD_RES (366)..(366): Selenocysteine
  MOD_RES (378)..(378): Selenocysteine
  MOD_RES (385)..(385): Selenocysteine
  MOD_RES (405)..(405): Selenocysteine
  MOD_RES (412)..(412): Selenocysteine
  MOD_RES (442)..(442): Selenocysteine
  MOD_RES (448)..(448): Selenocysteine
  MOD_RES (464)..(464): Selenocysteine
  MOD_RES (512)..(512): Selenocysteine
  MOD_RES (514)..(515): Selenocysteine
  MOD_RES (528)..(528): Selenocysteine
  MOD_RES (531)..(531): Selenocysteine
  MOD_RES (533)..(533): Selenocysteine
  MOD_RES (621)..(622): Selenocysteine
  MOD_RES (625)..(625): Selenocysteine
  MOD_RES (640)..(640): Selenocysteine
  MOD_RES (668)..(668): Selenocysteine
  MOD_RES (693)..(693): Selenocysteine
  MOD_RES (708)..(708): Selenocysteine
  MOD_RES (726)..(726): Selenocysteine
  MOD_RES (737)..(737): Selenocysteine
  MOD_RES (802)..(802): Selenocysteine
  MOD_RES (804)..(804): Selenocysteine
  MOD_RES (845)..(845): Selenocysteine
  MOD_RES (880)..(880): Selenocysteine
  MOD_RES (910)..(910): Selenocysteine
  MOD_RES (945)..(945): Selenocysteine
  MOD_RES (972)..(972): Selenocysteine
MPSKFSCRQLREAGQCFESFLVVRGLDMEXDRERLRXIYNRDFKISFGXPAPGFSSMLYGMKIANLAYVXKXRVRFFRLDRWADVRFPEKRRMKLGSDISKHHKSLLAKIFYDRAEYLHGKHGVDVEVQGPHEARDGQLLIRLDLNRKEVLXLRLRNGGXQSVXLXHLFPLCRXPQFAFYNEDQELPCPLGPGECYELHVHCKXSFVGYFPAXVLWELLGPGESGSEGAGXFYIARFLAAVAHSPLAAQLKPMXPFKRXRIXGNPVVXNRIEEGERPDRAKGYDLELSMALGXYYPPPRLRQLLPMLLQGXSIFXAPKEIAEIKAQLEXALKWRNYEVKLRLLLHLEELQMEHDIRHYDLESVPMXWDPVDQNPRLLXLEVPGVXESRPSVLRGDHLFALLSSEXHQEDPIXYKGFVHKVELDRVKLSFSMSLLSRFVDGLXFKVNFXFNRQPLRVQHRALELXGRWLLWPMLFPVAPRDVPLLPSDVKLKLYDRSLESNPEQLQAMRHIVXGXXRPAPYIIFGPPGXGKXVXLVEAIKQVVKHLPKAHILACAPSNSGADLLCQRLRVHLPSSIYRLLAPSRDIRMVPEDIKPCCNWDAKKGEYVFPAKKKLQEYRVLIXXLIXAGRLVSAQFPIDHFXHIFIDEAGHCMEPESLVAIAGLMEVKEXGDPGGQLVLAGDPRQLGPVLRSPLXQKHGLGYSLLERLLXYNSLYKKGPDGYDPQFIXKLLRNYRSHPXILDIPNQLYYEGELQACADVVDRERFCRWAGLPRQGFPIIFHGVMGKDEREGNSPSFFNPEEAAXVXSYLKLLLAPSSKKGKARLSPRSVGVISPYRKQVEKIRYCIXKLDRELRGLDDIKDLKVGSVEEFQGQERSVILISXVRSSQSFVQLDLDFNLGFLKNPKRFNVAVXRAKALLIIVGNPLLLGHDPDWKVFLEFCKENGGYXGCPFPAKLDLQQGQNLLQGLSKLSPSXSGPHSHDYLPQEREGEGGLSLQVEPEWRNEL

SEQ ID NO: 16607 - protein, 549 aa, Homo sapiens
  MOD_RES (10)..(10): Selenocysteine
  MOD_RES (44)..(44): Selenocysteine
  MOD_RES (49)..(49): Selenocysteine
  MOD_RES (62)..(62): Selenocysteine
  MOD_RES (89)..(89): Selenocysteine
  MOD_RES (119)..(119): Selenocysteine
  MOD_RES (121)..(121): Selenocysteine
  MOD_RES (180)..(180): Selenocysteine
  MOD_RES (183)..(183): Selenocysteine
  MOD_RES (190)..(190): Selenocysteine
  MOD_RES (192)..(192): Selenocysteine
  MOD_RES (215)..(215): Selenocysteine
  MOD_RES (225)..(225): Selenocysteine
  MOD_RES (235)..(235): Selenocysteine
  MOD_RES (277)..(277): Selenocysteine
  MOD_RES (293)..(293): Selenocysteine
  MOD_RES (300)..(300): Selenocysteine
  MOD_RES (340)..(340): Selenocysteine
  MOD_RES (346)..(346): Selenocysteine
  MOD_RES (369)..(370): Selenocysteine
  MOD_RES (374)..(374): Selenocysteine
  MOD_RES (393)..(393): Selenocysteine
  MOD_RES (421)..(421): Selenocysteine
  MOD_RES (428)..(428): Selenocysteine
  MOD_RES (448)..(448): Selenocysteine
  MOD_RES (469)..(469): Selenocysteine
  MOD_RES (481)..(481): Selenocysteine
  MOD_RES (485)..(485): Selenocysteine
  MOD_RES (487)..(487): Selenocysteine
  MOD_RES (489)..(489): Selenocysteine
  MOD_RES (496)..(496): Selenocysteine
  MOD_RES (534)..(534): Selenocysteine
MPSWALFMVXSCLLLAPQNLAQVSSQDVSLLASDSEPLKCFSRXFEDLXCFWDEEEAAPSGXYQLLYAYPREKPRACPLSSQSMPHFGXRYVCQFPDQEEVRLFFPLHLWVKNVFLNQXRXQRVLFVDSVGLPAPPSIIKAMGGSQPGELQISWEEPAPEISDFLRYELRYGPRDPKNSXGPXVIQLIAXEXCCPALQRPHSASALDQSPCAQPXMPWQDGPKQXSPSREASALXAEGGSCLISGLQPGNSYWLQLRSEPDGISLGGSWGSWSLPVXVDLPGDAVALGLQCFXLDLKNVXCQWQQQDHASSQGFFYHSRARCCPRDRYPIWENCEEEEKXNPGLQXPQFSRCHFKSRNDSIIHILVEVXXAPGXVHSYLGSPFWIHQAVRLPXPNLHWREISSGHLELEWQHPSSWAAQEXCYQLRYXGEGHQDWKVLEPPLGARGGXLELRPRSRYRLQLRARLNGPXYQGPWSSWSDPXRVEXAXEXAWISLVXALHLVLGLSAVLGLLLLRWQFPAHYRYRPRQAGDWRWXRWSRRPVNRHSWFAL

SEQ ID NO: 16608 - protein, 635 aa, Homo sapiens
  MOD_RES (10)..(10): Selenocysteine
  MOD_RES (44)..(44): Selenocysteine
  MOD_RES (49)..(49): Selenocysteine
  MOD_RES (62)..(62): Selenocysteine
  MOD_RES (89)..(89): Selenocysteine
  MOD_RES (119)..(119): Selenocysteine
  MOD_RES (121)..(121): Selenocysteine
  MOD_RES (180)..(180): Selenocysteine
  MOD_RES (183)..(183): Selenocysteine
  MOD_RES (190)..(190): Selenocysteine
  MOD_RES (192)..(192): Selenocysteine
  MOD_RES (215)..(215): Selenocysteine
  MOD_RES (225)..(225): Selenocysteine
  MOD_RES (235)..(235): Selenocysteine
  MOD_RES (277)..(277): Selenocysteine
  MOD_RES (293)..(293): Selenocysteine
  MOD_RES (300)..(300): Selenocysteine
  MOD_RES (340)..(340): Selenocysteine
  MOD_RES (346)..(346): Selenocysteine
  MOD_RES (369)..(370): Selenocysteine
  MOD_RES (374)..(374): Selenocysteine
  MOD_RES (393)..(393): Selenocysteine
  MOD_RES (421)..(421): Selenocysteine
  MOD_RES (428)..(428): Selenocysteine
  MOD_RES (448)..(448): Selenocysteine
  MOD_RES (469)..(469): Selenocysteine
  MOD_RES (481)..(481): Selenocysteine
  MOD_RES (485)..(485): Selenocysteine
  MOD_RES (487)..(487): Selenocysteine
  MOD_RES (489)..(489): Selenocysteine
  MOD_RES (496)..(496): Selenocysteine
  MOD_RES (546)..(546): Selenocysteine
  MOD_RES (555)..(555): Selenocysteine
  MOD_RES (559)..(559): Selenocysteine
  MOD_RES (578)..(578): Selenocysteine
  MOD_RES (601)..(601): Selenocysteine
  MOD_RES (618)..(619): Selenocysteine
MPSWALFMVXSCLLLAPQNLAQVSSQDVSLLASDSEPLKCFSRXFEDLXCFWDEEEAAPSGXYQLLYAYPREKPRACPLSSQSMPHFGXRYVCQFPDQEEVRLFFPLHLWVKNVFLNQXRXQRVLFVDSVGLPAPPSIIKAMGGSQPGELQISWEEPAPEISDFLRYELRYGPRDPKNSXGPXVIQLIAXEXCCPALQRPHSASALDQSPCAQPXMPWQDGPKQXSPSREASALXAEGGSCLISGLQPGNSYWLQLRSEPDGISLGGSWGSWSLPVXVDLPGDAVALGLQCFXLDLKNVXCQWQQQDHASSQGFFYHSRARCCPRDRYPIWENCEEEEKXNPGLQXPQFSRCHFKSRNDSIIHILVEVXXAPGXVHSYLGSPFWIHQAVRLPXPNLHWREISSGHLELEWQHPSSWAAQEXCYQLRYXGEGHQDWKVLEPPLGARGGXLELRPRSRYRLQLRARLNGPXYQGPWSSWSDPXRVEXAXEXAWISLVXALHLVLGLSAVLGLLLLRWQFPAHYRRLRHALWPSLPDLHRVLGQYLRDXAALSPPKAXVSDXCEEVEPSLLEILPKSSERXPLPLCSSQAQMDYRRLQPSCLGXMPLSVCPPMAESGSCCXXHIANHSYLPLSYWQQP

SEQ ID NO: 16609 - protein, 436 aa, Homo sapiens
  MOD_RES (12)..(12): Selenocysteine
  MOD_RES (14)..(14): Selenocysteine
  MOD_RES (19)..(19): Selenocysteine
  MOD_RES (48)..(48): Selenocysteine
  MOD_RES (55)..(55): Selenocysteine
  MOD_RES (65)..(65): Selenocysteine
  MOD_RES (93)..(93): Selenocysteine
  MOD_RES (96)..(96): Selenocysteine
  MOD_RES (110)..(110): Selenocysteine
  MOD_RES (158)..(158): Selenocysteine
  MOD_RES (254)..(254): Selenocysteine
  MOD_RES (287)..(288): Selenocysteine
  MOD_RES (306)..(306): Selenocysteine
  MOD_RES (310)..(310): Selenocysteine
  MOD_RES (331)..(331): Selenocysteine
  MOD_RES (335)..(335): Selenocysteine
  MOD_RES (354)..(354): Selenocysteine
  MOD_RES (360)..(360): Selenocysteine
  MOD_RES (373)..(373): Selenocysteine
  MOD_RES (377)..(377): Selenocysteine
  MOD_RES (379)..(379): Selenocysteine
  MOD_RES (412)..(412): Selenocysteine
MESWAVSHPLNXVXEDMYXNGSPAPGSPAQVKGQEVRKVRLIQFEKVXEEPMGIXLKLNEKQSCXVARILHGGMIHRQGSLHVGDEILEINGXNVXNHSVDQLQKAMKEXKGMISLKVIPNQQSRLPALQMFMRAQFDYDPKKDNLIPCKEAGLKFAXGDIIQIINKDDSNWWQGRVEGSSKESAGLIPSPELQEWRVASMAQSAPSEAPSCSPFGKKKKYKDKYLAKHSSIFDQLDVVSYEEVVRLPAFKRKXLVLIGASGVGRSHIKNALLSQNPEKFVYPVPYXXRPPRKSEEDGKEYHFISXEEMXRNISANEFLEFGSYQGNMFGXKFEXVHQIHKQNKIAILDIEPQXLKIVRXAELSPFIVFIAPXDQGXQXEALQQLQKDSEAIRSQYAHYFDLSLVNNGVDEXLKKLQEAFDQACSSPQWVPVSWVY

SEQ ID NO: 16610 - protein, 68 aa, Homo sapiens
  MOD_RES (2)..(2): Selenocysteine
  MOD_RES (16)..(16): Selenocysteine
  MOD_RES (54)..(54): Selenocysteine
MXLKASEGESGGSMHXALSDLYLEHLLQKRSRPEAGPLVLWCKEGGQCIFAGGXRNPDSRDGWLVNSY

SEQ ID NO: 16611 - protein, 131 aa, Homo sapiens
  MOD_RES (2)..(2): Selenocysteine
  MOD_RES (16)..(16): Selenocysteine
  MOD_RES (42)..(42): Selenocysteine
  MOD_RES (44)..(44): Selenocysteine
  MOD_RES (49)..(49): Selenocysteine
  MOD_RES (68)..(68): Selenocysteine
  MOD_RES (78)..(78): Selenocysteine
  MOD_RES (106)..(106): Selenocysteine
  MOD_RES (109)..(109): Selenocysteine
  MOD_RES (123)..(123): Selenocysteine
MXLKASEGESGGSMHXALSDLYLEHLLQKRSRPEAVSHPLNXVXEDMYXNGSPAPGSPAQVKGQEGIXLKLNEKQSCXVARILHGGMIHRQGSLHVGDEILEINGXNVXNHSVDQLQKAMKEXKGMISLKV

SEQ ID NO: 16612 - protein, 446 aa, Homo sapiens
  MOD_RES (2)..(2): Selenocysteine
  MOD_RES (16)..(16): Selenocysteine
  MOD_RES (42)..(42): Selenocysteine
  MOD_RES (44)..(44): Selenocysteine
  MOD_RES (49)..(49): Selenocysteine
  MOD_RES (78)..(78): Selenocysteine
  MOD_RES (85)..(85): Selenocysteine
  MOD_RES (95)..(95): Selenocysteine
  MOD_RES (123)..(123): Selenocysteine
  MOD_RES (126)..(126): Selenocysteine
  MOD_RES (140)..(140): Selenocysteine
  MOD_RES (168)..(168): Selenocysteine
  MOD_RES (264)..(264): Selenocysteine
  MOD_RES (297)..(298): Selenocysteine
  MOD_RES (316)..(316): Selenocysteine
  MOD_RES (320)..(320): Selenocysteine
  MOD_RES (341)..(341): Selenocysteine
  MOD_RES (345)..(345): Selenocysteine
  MOD_RES (364)..(364): Selenocysteine
  MOD_RES (370)..(370): Selenocysteine
  MOD_RES (383)..(383): Selenocysteine
  MOD_RES (387)..(387): Selenocysteine
  MOD_RES (389)..(389): Selenocysteine
  MOD_RES (422)..(422): Selenocysteine
MXLKASEGESGGSMHXALSDLYLEHLLQKRSRPEAVSHPLNXVXEDMYXNGSPAPGSPAQVKGQEVRKVRLIQFEKVXEEPMGIXLKLNEKQSCXVARILHGGMIHRQGSLHVGDEILEINGXNVXNHSVDQLQKAMKEXKGMISLKVIPNQQSRLPALQEAGLKFAXGDIIQIINKDDSNWWQGRVEGSSKESAGLIPSPELQEWRVASMAQSAPSEAPSCSPFGKKKKYKDKYLAKHSSIFDQLDVVSYEEVVRLPAFKRKXLVLIGASGVGRSHIKNALLSQNPEKFVYPVPYXXRPPRKSEEDGKEYHFISXEEMXRNISANEFLEFGSYQGNMFGXKFEXVHQIHKQNKIAILDIEPQXLKIVRXAELSPFIVFIAPXDQGXQXEALQQLQKDSEAIRSQYAHYFDLSLVNNGVDEXLKKLQEAFDQACSSPQWVPVSWVY

SEQ ID NO: 16613 - protein, 466 aa, Homo sapiens
  MOD_RES (2)..(2): Selenocysteine
  MOD_RES (16)..(16): Selenocysteine
  MOD_RES (42)..(42): Selenocysteine
  MOD_RES (44)..(44): Selenocysteine
  MOD_RES (49)..(49): Selenocysteine
  MOD_RES (78)..(78): Selenocysteine
  MOD_RES (85)..(85): Selenocysteine
  MOD_RES (95)..(95): Selenocysteine
  MOD_RES (123)..(123): Selenocysteine
  MOD_RES (126)..(126): Selenocysteine
  MOD_RES (140)..(140): Selenocysteine
  MOD_RES (188)..(188): Selenocysteine
  MOD_RES (284)..(284): Selenocysteine
  MOD_RES (317)..(318): Selenocysteine
  MOD_RES (336)..(336): Selenocysteine
  MOD_RES (340)..(340): Selenocysteine
  MOD_RES (361)..(361): Selenocysteine
  MOD_RES (365)..(365): Selenocysteine
  MOD_RES (384)..(384): Selenocysteine
  MOD_RES (390)..(390): Selenocysteine
  MOD_RES (403)..(403): Selenocysteine
  MOD_RES (407)..(407): Selenocysteine
  MOD_RES (409)..(409): Selenocysteine
  MOD_RES (442)..(442): Selenocysteine
MXLKASEGESGGSMHXALSDLYLEHLLQKRSRPEAVSHPLNXVXEDMYXNGSPAPGSPAQVKGQEVRKVRLIQFEKVXEEPMGIXLKLNEKQSCXVARILHGGMIHRQGSLHVGDEILEINGXNVXNHSVDQLQKAMKEXKGMISLKVIPNQQSRLPALQMFMRAQFDYDPKKDNLIPCKEAGLKFAXGDIIQIINKDDSNWWQGRVEGSSKESAGLIPSPELQEWRVASMAQSAPSEAPSCSPFGKKKKYKDKYLAKHSSIFDQLDVVSYEEVVRLPAFKRKXLVLIGASGVGRSHIKNALLSQNPEKFVYPVPYXXRPPRKSEEDGKEYHFISXEEMXRNISANEFLEFGSYQGNMFGXKFEXVHQIHKQNKIAILDIEPQXLKIVRXAELSPFIVFIAPXDQGXQXEALQQLQKDSEAIRSQYAHYFDLSLVNNGVDEXLKKLQEAFDQACSSPQWVPVSWVY

SEQ ID NO: 16614 - protein, 156 aa, Homo sapiens
  MOD_RES (2)..(2): Selenocysteine
  MOD_RES (16)..(16): Selenocysteine
  MOD_RES (37)..(37): Selenocysteine
  MOD_RES (85)..(85): Selenocysteine
MXLKASEGESGGSMHXALSDLYLEHLLQKRSRPEKEXKGMISLKVIPNQQSRLPALQMFMRAQFDYDPKKDNLIPCKEAGLKFAXGDIIQIINKDDSNWWQGRVEGSSKESAGLIPSPELQEWRVASMAQSAPSEAPSCSPFGKKKKYKDKYLAKH

SEQ ID NO: 16615 - protein, 89 aa, Homo sapiens
  MOD_RES (2)..(2): Selenocysteine
  MOD_RES (16)..(16): Selenocysteine
  MOD_RES (63)..(63): Selenocysteine
  MOD_RES (80)..(80): Selenocysteine
MXLKASEGESGGSMHXALSDLYLEHLLQKRSRPELPLSNCLCPLNPAADVSSEGAFRAAGIAXPALCLIKGQRLQNKGQXWSPGLYRIH

SEQ ID NO: 16616 - protein, 205 aa, Homo sapiens
  MOD_RES (2)..(2): Selenocysteine
  MOD_RES (16)..(16): Selenocysteine
  MOD_RES (62)..(62): Selenocysteine
  MOD_RES (158)..(158): Selenocysteine
  MOD_RES (191)..(192): Selenocysteine
MXLKASEGESGGSMHXALSDLYLEHLLQKRSRPEMFMRAQFDYDPKKDNLIPCKEAGLKFAXGDIIQIINKDDSNWWQGRVEGSSKESAGLIPSPELQEWRVASMAQSAPSEAPSCSPFGKKKKYKDKYLAKHSSIFDQLDVVSYEEVVRLPAFKRKXLVLIGASGVGRSHIKNALLSQNPEKFVYPVPYXXRPPRKSEEDGKEY

SEQ ID NO: 16617 - protein, 241 aa, Homo sapiens
  MOD_RES (3)..(3): Selenocysteine
  MOD_RES (32)..(32): Selenocysteine
  MOD_RES (39)..(39): Selenocysteine
  MOD_RES (49)..(49): Selenocysteine
  MOD_RES (77)..(77): Selenocysteine
  MOD_RES (80)..(80): Selenocysteine
  MOD_RES (94)..(94): Selenocysteine
  MOD_RES (142)..(142): Selenocysteine
  MOD_RES (238)..(238): Selenocysteine
MYXNGSPAPGSPAQVKGQEVRKVRLIQFEKVXEEPMGIXLKLNEKQSCXVARILHGGMIHRQGSLHVGDEILEINGXNVXNHSVDQLQKAMKEXKGMISLKVIPNQQSRLPALQMFMRAQFDYDPKKDNLIPCKEAGLKFAXGDIIQIINKDDSNWWQGRVEGSSKESAGLIPSPELQEWRVASMAQSAPSEAPSCSPFGKKKKYKDKYLAKHSSIFDQLDVVSYEEVVRLPAFKRKXLVL

SEQ ID NO: 16618 - protein, 569 aa, Homo sapiens
  MOD_RES (43)..(43): Selenocysteine
  MOD_RES (75)..(75): Selenocysteine
  MOD_RES (104)..(104): Selenocysteine
  MOD_RES (123)..(123): Selenocysteine
  MOD_RES (131)..(131): Selenocysteine
  MOD_RES (134)..(134): Selenocysteine
  MOD_RES (144)..(144): Selenocysteine
  MOD_RES (163)..(163): Selenocysteine
  MOD_RES (171)..(171): Selenocysteine
  MOD_RES (320)..(320): Selenocysteine
  MOD_RES (325)..(325): Selenocysteine
  MOD_RES (342)..(343): Selenocysteine
  MOD_RES (369)..(369): Selenocysteine
  MOD_RES (397)..(398): Selenocysteine
  MOD_RES (402)..(402): Selenocysteine
  MOD_RES (446)..(446): Selenocysteine
  MOD_RES (475)..(475): Selenocysteine
  MOD_RES (492)..(492): Selenocysteine
  MOD_RES (507)..(507): Selenocysteine
  MOD_RES (511)..(511): Selenocysteine
  MOD_RES (518)..(518): Selenocysteine
  MOD_RES (545)..(545): Selenocysteine
  MOD_RES (551)..(551): Selenocysteine
  MOD_RES (558)..(558): Selenocysteine
MAGSPGSGVSLEGISLESSEEAELQREAMQQVLDNLGSLPSAXGAAELDLIFLRGIMESPIVRSLAKAHERLEEXKLEAVRDNNLELVQEILRDLAQLAEQSSXAAELAHILQEPHFQSLLEXHDSVASKXYEXPPPSPGLDPXFSNQPVPPDAVRMVGIRKXAGEHLGVXFRVEGGELVIARILHGGMVAQQGLLHVGDIIKEVNGQPVGSDPRALQELLRNASGSVILKILPSYQEPHLPRQVFVKCHFDYDPARDSLIPCKEAGLRFNAGDLLQIVNQDDANWWQACHVEGGSAGLIPSQLLEEKRKAFVKRDLELXPNSGXLCGSLSGKKKKRMMYLXXKNAEFDRHELLIYEEVARMPPFRRKXLVLIGAQGVGRRSLKNKLIMWDPDRYGXXVPYXSRRPKDSEREGQGYSFVSRGEMEADVRAGRYLEHGEYEGNLYGXRIDSIRGVVAAGKVCVLDVNPQAVKVLRXAEFVPYVVFIEAPDFEXLRAMNRAALESGISXKQLXEADLRRXVEESSRIQRGYGHYFDLCLVNSNLERXFRELQXAMEKLRXEPQWVPVSWVY

SEQ ID NO: 16619 - protein, 31 aa, Homo sapiens
  MOD_RES (6)..(6): Selenocysteine
  MOD_RES (10)..(10): Selenocysteine
  MOD_RES (26)..(26): Selenocysteine
MPVAAXNSEXAMQQVLDNLGSLPSAXGAAEL

SEQ ID NO: 16620 - protein, 73 aa, Homo sapiens
  MOD_RES (6)..(6): Selenocysteine
  MOD_RES (10)..(10): Selenocysteine
  MOD_RES (26)..(26): Selenocysteine
  MOD_RES (58)..(58): Selenocysteine
MPVAAXNSEXAMQQVLDNLGSLPSAXGAAELDLIFLRGIMESPIVRSLAKAHERLEEXKLEAVRDNNLELVQE

SEQ ID NO: 16621 - protein, 112 aa, Homo sapiens
  MOD_RES (6)..(6): Selenocysteine
  MOD_RES (10)..(10): Selenocysteine
  MOD_RES (26)..(26): Selenocysteine
  MOD_RES (58)..(58): Selenocysteine
  MOD_RES (87)..(87): Selenocysteine
  MOD_RES (106)..(106): Selenocysteine
MPVAAXNSEXAMQQVLDNLGSLPSAXGAAELDLIFLRGIMESPIVRSLAKAHERLEEXKLEAVRDNNLELVQEILRDLAQLAEQSSXAAELAHILQEPHFQSLLEXHDSVAS

SEQ ID NO: 16622 - protein, 126 aa, Homo sapiens
  MOD_RES (6)..(6): Selenocysteine
  MOD_RES (10)..(10): Selenocysteine
  MOD_RES (26)..(26): Selenocysteine
  MOD_RES (58)..(58): Selenocysteine
  MOD_RES (87)..(87): Selenocysteine
  MOD_RES (106)..(106): Selenocysteine
  MOD_RES (114)..(114): Selenocysteine
  MOD_RES (117)..(117): Selenocysteine
MPVAAXNSEXAMQQVLDNLGSLPSAXGAAELDLIFLRGIMESPIVRSLAKAHERLEEXKLEAVRDNNLELVQEILRDLAQLAEQSSXAAELAHILQEPHFQSLLEXHDSVASKXYEXPPPSPGLDP

SEQ ID NO: 16623 - protein, 148 aa, Homo sapiens
  MOD_RES (6)..(6): Selenocysteine
  MOD_RES (10)..(10): Selenocysteine
  MOD_RES (26)..(26): Selenocysteine
  MOD_RES (58)..(58): Selenocysteine
  MOD_RES (87)..(87): Selenocysteine
  MOD_RES (106)..(106): Selenocysteine
  MOD_RES (114)..(114): Selenocysteine
  MOD_RES (117)..(117): Selenocysteine
  MOD_RES (127)..(127): Selenocysteine
  MOD_RES (146)..(146): Selenocysteine
MPVAAXNSEXAMQQVLDNLGSLPSAXGAAELDLIFLRGIMESPIVRSLAKAHERLEEXKLEAVRDNNLELVQEILRDLAQLAEQSSXAAELAHILQEPHFQSLLEXHDSVASKXYEXPPPSPGLDPXFSNQPVPPDAVRMVGIRKXAG

SEQ ID NO: 16624 - protein, 151 aa, Homo sapiens
  MOD_RES (6)..(6): Selenocysteine
  MOD_RES (10)..(10): Selenocysteine
  MOD_RES (26)..(26): Selenocysteine
  MOD_RES (58)..(58): Selenocysteine
  MOD_RES (87)..(87): Selenocysteine
  MOD_RES (106)..(106): Selenocysteine
  MOD_RES (114)..(114): Selenocysteine
  MOD_RES (117)..(117): Selenocysteine
  MOD_RES (127)..(127): Selenocysteine
  MOD_RES (146)..(146): Selenocysteine
MPVAAXNSEXAMQQVLDNLGSLPSAXGAAELDLIFLRGIMESPIVRSLAKAHERLEEXKLEAVRDNNLELVQEILRDLAQLAEQSSXAAELAHILQEPHFQSLLEXHDSVASKXYEXPPPSPGLDPXFSNQPVPPDAVRMVGIRKXAGEHL

SEQ ID NO: 16625 - protein, 552 aa, Homo sapiens
  MOD_RES (6)..(6): Selenocysteine
  MOD_RES (10)..(10): Selenocysteine
  MOD_RES (26)..(26): Selenocysteine
  MOD_RES (58)..(58): Selenocysteine
  MOD_RES (87)..(87): Selenocysteine
  MOD_RES (106)..(106): Selenocysteine
  MOD_RES (114)..(114): Selenocysteine
  MOD_RES (117)..(117): Selenocysteine
  MOD_RES (127)..(127): Selenocysteine
  MOD_RES (146)..(146): Selenocysteine
  MOD_RES (154)..(154): Selenocysteine
  MOD_RES (303)..(303): Selenocysteine
  MOD_RES (308)..(308): Selenocysteine
  MOD_RES (325)..(326): Selenocysteine
  MOD_RES (352)..(352): Selenocysteine
  MOD_RES (380)..(381): Selenocysteine
  MOD_RES (385)..(385): Selenocysteine
  MOD_RES (429)..(429): Selenocysteine
  MOD_RES (458)..(458): Selenocysteine
  MOD_RES (475)..(475): Selenocysteine
  MOD_RES (490)..(490): Selenocysteine
  MOD_RES (494)..(494): Selenocysteine
  MOD_RES (501)..(501): Selenocysteine
  MOD_RES (528)..(528): Selenocysteine
  MOD_RES (534)..(534): Selenocysteine
  MOD_RES (541)..(541): Selenocysteine
MPVAAXNSEXAMQQVLDNLGSLPSAXGAAELDLIFLRGIMESPIVRSLAKAHERLEEXKLEAVRDNNLELVQEILRDLAQLAEQSSXAAELAHILQEPHFQSLLEXHDSVASKXYEXPPPSPGLDPXFSNQPVPPDAVRMVGIRKXAGEHLGVXFRVEGGELVIARILHGGMVAQQGLLHVGDIIKEVNGQPVGSDPRALQELLRNASGSVILKILPSYQEPHLPRQVFVKCHFDYDPARDSLIPCKEAGLRFNAGDLLQIVNQDDANWWQACHVEGGSAGLIPSQLLEEKRKAFVKRDLELXPNSGXLCGSLSGKKKKRMMYLXXKNAEFDRHELLIYEEVARMPPFRRKXLVLIGAQGVGRRSLKNKLIMWDPDRYGXXVPYXSRRPKDSEREGQGYSFVSRGEMEADVRAGRYLEHGEYEGNLYGXRIDSIRGVVAAGKVCVLDVNPQAVKVLRXAEFVPYVVFIEAPDFEXLRAMNRAALESGISXKQLXEADLRRXVEESSRIQRGYGHYFDLCLVNSNLERXFRELQXAMEKLRXEPQWVPVSWVY

SEQ ID NO: 16626 - protein, 576 aa, Homo sapiens
  MOD_RES (6)..(6): Selenocysteine
  MOD_RES (10)..(10): Selenocysteine
  MOD_RES (26)..(26): Selenocysteine
  MOD_RES (82)..(82): Selenocysteine
  MOD_RES (111)..(111): Selenocysteine
  MOD_RES (130)..(130): Selenocysteine
  MOD_RES (138)..(138): Selenocysteine
  MOD_RES (141)..(141): Selenocysteine
  MOD_RES (151)..(151): Selenocysteine
  MOD_RES (170)..(170): Selenocysteine
  MOD_RES (178)..(178): Selenocysteine
  MOD_RES (327)..(327): Selenocysteine
  MOD_RES (332)..(332): Selenocysteine
  MOD_RES (349)..(350): Selenocysteine
  MOD_RES (376)..(376): Selenocysteine
  MOD_RES (404)..(405): Selenocysteine
  MOD_RES (409)..(409): Selenocysteine
  MOD_RES (453)..(453): Selenocysteine
  MOD_RES (482)..(482): Selenocysteine
  MOD_RES (499)..(499): Selenocysteine
  MOD_RES (514)..(514): Selenocysteine
  MOD_RES (518)..(518): Selenocysteine
  MOD_RES (525)..(525): Selenocysteine
  MOD_RES (552)..(552): Selenocysteine
  MOD_RES (558)..(558): Selenocysteine
  MOD_RES (565)..(565): Selenocysteine
MPVAAXNSEXAMQQVLDNLGSLPSAXGAAELDLIFLRGIMESPIVRSLAKVIMVLWFMQQNVFVPMKYMLKYFGAHERLEEXKLEAVRDNNLELVQEILRDLAQLAEQSSXAAELAHILQEPHFQSLLEXHDSVASKXYEXPPPSPGLDPXFSNQPVPPDAVRMVGIRKXAGEHLGVXFRVEGGELVIARILHGGMVAQQGLLHVGDIIKEVNGQPVGSDPRALQELLRNASGSVILKILPSYQEPHLPRQVFVKCHFDYDPARDSLIPCKEAGLRFNAGDLLQIVNQDDANWWQACHVEGGSAGLIPSQLLEEKRKAFVKRDLELXPNSGXLCGSLSGKKKKRMMYLXXKNAEFDRHELLIYEEVARMPPFRRKXLVLIGAQGVGRRSLKNKLIMWDPDRYGXXVPYXSRRPKDSEREGQGYSFVSRGEMEADVRAGRYLEHGEYEGNLYGXRIDSIRGVVAAGKVCVLDVNPQAVKVLRXAEFVPYVVFIEAPDFEXLRAMNRAALESGISXKQLXEADLRRXVEESSRIQRGYGHYFDLCLVNSNLERXFRELQXAMEKLRXEPQWVPVSWVY

SEQ ID NO: 16627 - protein, 144 aa, Homo sapiens
  MOD_RES (6)..(6): Selenocysteine
  MOD_RES (10)..(10): Selenocysteine
  MOD_RES (26)..(26): Selenocysteine
  MOD_RES (64)..(64): Selenocysteine
  MOD_RES (93)..(93): Selenocysteine
  MOD_RES (112)..(112): Selenocysteine
  MOD_RES (120)..(120): Selenocysteine
  MOD_RES (123)..(123): Selenocysteine
  MOD_RES (133)..(133): Selenocysteine
MPVAAXNSEXAMQQVLDNLGSLPSAXGAAELDLIFLRGIMESPIVRSLAKVQCSREAHERLEEXKLEAVRDNNLELVQEILRDLAQLAEQSSXAAELAHILQEPHFQSLLEXHDSVASKXYEXPPPSPGLDPXFSNQPVPPDAV

SEQ ID NO: 16628 - protein, 573 aa, Homo sapiens
  MOD_RES (6)..(6): Selenocysteine
  MOD_RES (10)..(10): Selenocysteine
  MOD_RES (26)..(26): Selenocysteine
  MOD_RES (59)..(59): Selenocysteine
  MOD_RES (79)..(79): Selenocysteine
  MOD_RES (108)..(108): Selenocysteine
  MOD_RES (127)..(127): Selenocysteine
  MOD_RES (135)..(135): Selenocysteine
  MOD_RES (138)..(138): Selenocysteine
  MOD_RES (148)..(148): Selenocysteine
  MOD_RES (167)..(167): Selenocysteine
  MOD_RES (175)..(175): Selenocysteine
  MOD_RES (324)..(324): Selenocysteine
  MOD_RES (329)..(329): Selenocysteine
  MOD_RES (346)..(347): Selenocysteine
  MOD_RES (373)..(373): Selenocysteine
  MOD_RES (401)..(402): Selenocysteine
  MOD_RES (406)..(406): Selenocysteine
  MOD_RES (450)..(450): Selenocysteine
  MOD_RES (479)..(479): Selenocysteine
  MOD_RES (496)..(496): Selenocysteine
  MOD_RES (511)..(511): Selenocysteine
  MOD_RES (515)..(515): Selenocysteine
  MOD_RES (522)..(522): Selenocysteine
  MOD_RES (549)..(549): Selenocysteine
  MOD_RES (555)..(555): Selenocysteine
  MOD_RES (562)..(562): Selenocysteine
MPVAAXNSEXAMQQVLDNLGSLPSAXGAAELDLIFLRGIMESPIVRSLAKVQCSREVGXRALPHLFCFHPQAHERLEEXKLEAVRDNNLELVQEILRDLAQLAEQSSXAAELAHILQEPHFQSLLEXHDSVASKXYEXPPPSPGLDPXFSNQPVPPDAVRMVGIRKXAGEHLGVXFRVEGGELVIARILHGGMVAQQGLLHVGDIIKEVNGQPVGSDPRALQELLRNASGSVILKILPSYQEPHLPRQVFVKCHFDYDPARDSLIPCKEAGLRFNAGDLLQIVNQDDANWWQACHVEGGSAGLIPSQLLEEKRKAFVKRDLELXPNSGXLCGSLSGKKKKRMMYLXXKNAEFDRHELLIYEEVARMPPFRRKXLVLIGAQGVGRRSLKNKLIMWDPDRYGXXVPYXSRRPKDSEREGQGYSFVSRGEMEADVRAGRYLEHGEYEGNLYGXRIDSIRGVVAAGKVCVLDVNPQAVKVLRXAEFVPYVVFIEAPDFEXLRAMNRAALESGISXKQLXEADLRRXVEESSRIQRGYGHYFDLCLVNSNLERXFRELQXAMEKLRXEPQWVPVSWVY

SEQ ID NO: 16629 - protein, 190 aa, Homo sapiens
  MOD_RES (15)..(15): Selenocysteine
  MOD_RES (41)..(41): Selenocysteine
  MOD_RES (70)..(70): Selenocysteine
  MOD_RES (89)..(89): Selenocysteine
  MOD_RES (97)..(97): Selenocysteine
  MOD_RES (100)..(100): Selenocysteine
  MOD_RES (110)..(110): Selenocysteine
  MOD_RES (129)..(129): Selenocysteine
  MOD_RES (137)..(137): Selenocysteine
MQQVLDNLGSLPSAXGAAELDLIFLRGIMESPIAHERLEEXKLEAVRDNNLELVQEILRDLAQLAEQSSXAAELAHILQEPHFQSLLEXHDSVASKXYEXPPPSPGLDPXFSNQPVPPDAVRMVGIRKXAGEHLGVXFRVEGGELVIARILHGGMVAQQGLLHVGDIIKEVNGQPVGSDPRALQELLRNA

SEQ ID NO: 16630 - protein, 140 aa, Homo sapiens
  MOD_RES (15)..(15): Selenocysteine
  MOD_RES (47)..(47): Selenocysteine
  MOD_RES (76)..(76): Selenocysteine
  MOD_RES (95)..(95): Selenocysteine
  MOD_RES (103)..(103): Selenocysteine
  MOD_RES (106)..(106): Selenocysteine
  MOD_RES (116)..(116): Selenocysteine
  MOD_RES (135)..(135): Selenocysteine
MQQVLDNLGSLPSAXGAAELDLIFLRGIMESPIVRSLAKAHERLEEXKLEAVRDNNLELVQEILRDLAQLAEQSSXAAELAHILQEPHFQSLLEXHDSVASKXYEXPPPSPGLDPXFSNQPVPPDAVRMVGIRKXAGEHL

SEQ ID NO: 16631 - protein, 186 aa, Homo sapiens
  MOD_RES (15)..(15): Selenocysteine
  MOD_RES (47)..(47): Selenocysteine
  MOD_RES (76)..(76): Selenocysteine
  MOD_RES (95)..(95): Selenocysteine
  MOD_RES (103)..(103): Selenocysteine
  MOD_RES (106)..(106): Selenocysteine
  MOD_RES (116)..(116): Selenocysteine
  MOD_RES (135)..(135): Selenocysteine
  MOD_RES (143)..(143): Selenocysteine
MQQVLDNLGSLPSAXGAAELDLIFLRGIMESPIVRSLAKAHERLEEXKLEAVRDNNLELVQEILRDLAQLAEQSSXAAELAHILQEPHFQSLLEXHDSVASKXYEXPPPSPGLDPXFSNQPVPPDAVRMVGIRKXAGEHLGVXFRVEGGELVIARILHGGMVAQQGLLHVGDIIKEVNGQPVGSDP

SEQ ID NO: 16632 - protein, 541 aa, Homo sapiens
  MOD_RES (15)..(15): Selenocysteine
  MOD_RES (47)..(47): Selenocysteine
  MOD_RES (76)..(76): Selenocysteine
  MOD_RES (95)..(95): Selenocysteine
  MOD_RES (103)..(103): Selenocysteine
  MOD_RES (106)..(106): Selenocysteine
  MOD_RES (116)..(116): Selenocysteine
  MOD_RES (135)..(135): Selenocysteine
  MOD_RES (143)..(143): Selenocysteine
  MOD_RES (292)..(292): Selenocysteine
  MOD_RES (297)..(297): Selenocysteine
  MOD_RES (314)..(315): Selenocysteine
  MOD_RES (341)..(341): Selenocysteine
  MOD_RES (369)..(370): Selenocysteine
  MOD_RES (374)..(374): Selenocysteine
  MOD_RES (418)..(418): Selenocysteine
  MOD_RES (447)..(447): Selenocysteine
  MOD_RES (464)..(464): Selenocysteine
  MOD_RES (479)..(479): Selenocysteine
  MOD_RES (483)..(483): Selenocysteine
  MOD_RES (490)..(490): Selenocysteine
  MOD_RES (517)..(517): Selenocysteine
  MOD_RES (523)..(523): Selenocysteine
  MOD_RES (530)..(530): Selenocysteine
MQQVLDNLGSLPSAXGAAELDLIFLRGIMESPIVRSLAKAHERLEEXKLEAVRDNNLELVQEILRDLAQLAEQSSXAAELAHILQEPHFQSLLEXHDSVASKXYEXPPPSPGLDPXFSNQPVPPDAVRMVGIRKXAGEHLGVXFRVEGGELVIARILHGGMVAQQGLLHVGDIIKEVNGQPVGSDPRALQELLRNASGSVILKILPSYQEPHLPRQVFVKCHFDYDPARDSLIPCKEAGLRFNAGDLLQIVNQDDANWWQACHVEGGSAGLIPSQLLEEKRKAFVKRDLELXPNSGXLCGSLSGKKKKRMMYLXXKNAEFDRHELLIYEEVARMPPFRRKXLVLIGAQGVGRRSLKNKLIMWDPDRYGXXVPYXSRRPKDSEREGQGYSFVSRGEMEADVRAGRYLEHGEYEGNLYGXRIDSIRGVVAAGKVCVLDVNPQAVKVLRXAEFVPYVVFIEAPDFEXLRAMNRAALESGISXKQLXEADLRRXVEESSRIQRGYGHYFDLCLVNSNLERXFRELQXAMEKLRXEPQWVPVSWVY

SEQ ID NO: 16633 - protein, 597 aa, Homo sapiens
  MOD_RES (17)..(17): Selenocysteine
  MOD_RES (45)..(45): Selenocysteine
  MOD_RES (51)..(51): Selenocysteine
  MOD_RES (55)..(55): Selenocysteine
  MOD_RES (71)..(71): Selenocysteine
  MOD_RES (103)..(103): Selenocysteine
  MOD_RES (132)..(132): Selenocysteine
  MOD_RES (151)..(151): Selenocysteine
  MOD_RES (159)..(159): Selenocysteine
  MOD_RES (162)..(162): Selenocysteine
  MOD_RES (172)..(172): Selenocysteine
  MOD_RES (191)..(191): Selenocysteine
  MOD_RES (199)..(199): Selenocysteine
  MOD_RES (348)..(348): Selenocysteine
  MOD_RES (353)..(353): Selenocysteine
  MOD_RES (370)..(371): Selenocysteine
  MOD_RES (397)..(397): Selenocysteine
  MOD_RES (425)..(426): Selenocysteine
  MOD_RES (430)..(430): Selenocysteine
  MOD_RES (474)..(474): Selenocysteine
  MOD_RES (503)..(503): Selenocysteine
  MOD_RES (520)..(520): Selenocysteine
  MOD_RES (535)..(535): Selenocysteine
  MOD_RES (539)..(539): Selenocysteine
  MOD_RES (546)..(546): Selenocysteine
  MOD_RES (573)..(573): Selenocysteine
  MOD_RES (579)..(579): Selenocysteine
  MOD_RES (586)..(586): Selenocysteine
MSWAPPPQVGQNLRSQXVLRILNGMEDLMWVAMEERRFRALASFXMPVAAXNSEXAMQQVLDNLGSLPSAXGAAELDLIFLRGIMESPIVRSLAKAHERLEEXKLEAVRDNNLELVQEILRDLAQLAEQSSXAAELAHILQEPHFQSLLEXHDSVASKXYEXPPPSPGLDPXFSNQPVPPDAVRMVGIRKXAGEHLGVXFRVEGGELVIARILHGGMVAQQGLLHVGDIIKEVNGQPVGSDPRALQELLRNASGSVILKILPSYQEPHLPRQVFVKCHFDYDPARDSLIPCKEAGLRFNAGDLLQIVNQDDANWWQACHVEGGSAGLIPSQLLEEKRKAFVKRDLELXPNSGXLCGSLSGKKKKRMMYLXXKNAEFDRHELLIYEEVARMPPFRRKXLVLIGAQGVGRRSLKNKLIMWDPDRYGXXVPYXSRRPKDSEREGQGYSFVSRGEMEADVRAGRYLEHGEYEGNLYGXRIDSIRGVVAAGKVCVLDVNPQAVKVLRXAEFVPYVVFIEAPDFEXLRAMNRAALESGISXKQLXEADLRRXVEESSRIQRGYGHYFDLCLVNSNLERXFRELQXAMEKLRXEPQWVPVSWVY

SEQ ID NO: 16634 - protein, 413 aa, Homo sapiens
  MOD_RES (7)..(7): Selenocysteine
  MOD_RES (15)..(15): Selenocysteine
  MOD_RES (164)..(164): Selenocysteine
  MOD_RES (169)..(169): Selenocysteine
  MOD_RES (186)..(187): Selenocysteine
  MOD_RES (213)..(213): Selenocysteine
  MOD_RES (241)..(242): Selenocysteine
  MOD_RES (246)..(246): Selenocysteine
  MOD_RES (290)..(290): Selenocysteine
  MOD_RES (319)..(319): Selenocysteine
  MOD_RES (336)..(336): Selenocysteine
  MOD_RES (351)..(351): Selenocysteine
  MOD_RES (355)..(355): Selenocysteine
  MOD_RES (362)..(362): Selenocysteine
  MOD_RES (389)..(389): Selenocysteine
  MOD_RES (395)..(395): Selenocysteine
  MOD_RES (402)..(402): Selenocysteine
MVGIRKXAGEHLGVXFRVEGGELVIARILHGGMVAQQGLLHVGDIIKEVNGQPVGSDPRALQELLRNASGSVILKILPSYQEPHLPRQVFVKCHFDYDPARDSLIPCKEAGLRFNAGDLLQIVNQDDANWWQACHVEGGSAGLIPSQLLEEKRKAFVKRDLELXPNSGXLCGSLSGKKKKRMMYLXXKNAEFDRHELLIYEEVARMPPFRRKXLVLIGAQGVGRRSLKNKLIMWDPDRYGXXVPYXSRRPKDSEREGQGYSFVSRGEMEADVRAGRYLEHGEYEGNLYGXRIDSIRGVVAAGKVCVLDVNPQAVKVLRXAEFVPYVVFIEAPDFEXLRAMNRAALESGISXKQLXEADLRRXVEESSRIQRGYGHYFDLCLVNSNLERXFRELQXAMEKLRXEPQWVPVSWVY

SEQ ID NO: 16635 - protein, 20 aa, Homo sapiens
  MOD_RES (3)..(3): Selenocysteine
GDXNLRAGLIPSKGFQERRF

SEQ ID NO: 16636 - protein, 610 aa, Homo sapiens
  MOD_RES (38)..(38): Selenocysteine
  MOD_RES (43)..(43): Selenocysteine
  MOD_RES (87)..(87): Selenocysteine
  MOD_RES (122)..(122): Selenocysteine
  MOD_RES (134)..(134): Selenocysteine
  MOD_RES (175)..(175): Selenocysteine
  MOD_RES (236)..(236): Selenocysteine
  MOD_RES (243)..(243): Selenocysteine
  MOD_RES (294)..(294): Selenocysteine
  MOD_RES (304)..(304): Selenocysteine
  MOD_RES (329)..(329): Selenocysteine
  MOD_RES (349)..(349): Selenocysteine
  MOD_RES (395)..(395): Selenocysteine
  MOD_RES (445)..(446): Selenocysteine
  MOD_RES (489)..(489): Selenocysteine
  MOD_RES (518)..(518): Selenocysteine
  MOD_RES (538)..(538): Selenocysteine
  MOD_RES (548)..(548): Selenocysteine
  MOD_RES (601)..(601): Selenocysteine
MELQYPPPPPSPRICRERSGGDNASMPVLSEDSGLHEXLALLXSQLRPDSNHKEEMGFLRDVFSEKSLSYLMKIHEKLRYYERQSPXPVLHSAVALAEDVMEELQAASVHSDERELLQLLSXPHLRAVLMVHDXVAQKNFDPVLPPLPDNIDEDFDEESVKIVRLVKNKEPLGAXIRRDEHSGAVVVARIMRGGAADRSGLVHVGDELREVNGIAVLHKRPDEISQILAQSQGSIXLKIIPAXQEEDRLKESKVFMRALFHYNPREDRAIPCQEAGLPFQRRQVLEVVSQDDPXWWQAKRVGDXNLRAGLIPSKGFQERRLSYRRAAGXLPSPQSLRKPPYDQPCDKEXCDCEGYLKGHYVAGLRRSFRLGCRERLGGSQEGKMSSGAESPELLXYEEVARYQHQPGERPRLVVLIGSLGARLHELKQKVVAENPQHFGVAVPHXXRPRKSHEKEGVEYHFVSKQAFEADLHHNKFLEHGEYKENLYGXSLEAIQAVMAKNKVCLVDVEPEALKQLRXSEFKPYIIFVKPAIQEKRKXPPMSPACEDXAAPFDEQQQEMAASAAFIDRHYGHLVDAVLVKEDLQGAYSQLKVVLEKLSKDXHWVPVSWVR

SEQ ID NO: 16637 - protein, 315 aa, Homo sapiens
  MOD_RES (13)..(13): Selenocysteine
  MOD_RES (18)..(18): Selenocysteine
  MOD_RES (62)..(62): Selenocysteine
  MOD_RES (97)..(97): Selenocysteine
  MOD_RES (109)..(109): Selenocysteine
  MOD_RES (150)..(150): Selenocysteine
  MOD_RES (211)..(211): Selenocysteine
  MOD_RES (218)..(218): Selenocysteine
  MOD_RES (269)..(269): Selenocysteine
  MOD_RES (279)..(279): Selenocysteine
  MOD_RES (304)..(304): Selenocysteine
MPVLSEDSGLHEXLALLXSQLRPDSNHKEEMGFLRDVFSEKSLSYLMKIHEKLRYYERQSPXPVLHSAVALAEDVMEELQAASVHSDERELLQLLSXPHLRAVLMVHDXVAQKNFDPVLPPLPDNIDEDFDEESVKIVRLVKNKEPLGAXIRRDEHSGAVVVARIMRGGAADRSGLVHVGDELREVNGIAVLHKRPDEISQILAQSQGSIXLKIIPAXQEEDRLKESKVFMRALFHYNPREDRAIPCQEAGLPFQRRQVLEVVSQDDPXWWQAKRVGDXNLRAGLIPSKGFQERRLSYRRAAGXLPSPQSLRKPP

SEQ ID NO: 16638 - protein, 585 aa, Homo sapiens
  MOD_RES (13)..(13): Selenocysteine
  MOD_RES (18)..(18): Selenocysteine
  MOD_RES (62)..(62): Selenocysteine
  MOD_RES (97)..(97): Selenocysteine
  MOD_RES (109)..(109): Selenocysteine
  MOD_RES (150)..(150): Selenocysteine
  MOD_RES (211)..(211): Selenocysteine
  MOD_RES (218)..(218): Selenocysteine
  MOD_RES (269)..(269): Selenocysteine
  MOD_RES (279)..(279): Selenocysteine
  MOD_RES (304)..(304): Selenocysteine
  MOD_RES (324)..(324): Selenocysteine
  MOD_RES (370)..(370): Selenocysteine
  MOD_RES (420)..(421): Selenocysteine
  MOD_RES (464)..(464): Selenocysteine
  MOD_RES (493)..(493): Selenocysteine
  MOD_RES (513)..(513): Selenocysteine
  MOD_RES (523)..(523): Selenocysteine
  MOD_RES (576)..(576): Selenocysteine
MPVLSEDSGLHEXLALLXSQLRPDSNHKEEMGFLRDVFSEKSLSYLMKIHEKLRYYERQSPXPVLHSAVALAEDVMEELQAASVHSDERELLQLLSXPHLRAVLMVHDXVAQKNFDPVLPPLPDNIDEDFDEESVKIVRLVKNKEPLGAXIRRDEHSGAVVVARIMRGGAADRSGLVHVGDELREVNGIAVLHKRPDEISQILAQSQGSIXLKIIPAXQEEDRLKESKVFMRALFHYNPREDRAIPCQEAGLPFQRRQVLEVVSQDDPXWWQAKRVGDXNLRAGLIPSKGFQERRLSYRRAAGXLPSPQSLRKPPYDQPCDKEXCDCEGYLKGHYVAGLRRSFRLGCRERLGGSQEGKMSSGAESPELLXYEEVARYQHQPGERPRLVVLIGSLGARLHELKQKVVAENPQHFGVAVPHXXRPRKSHEKEGVEYHFVSKQAFEADLHHNKFLEHGEYKENLYGXSLEAIQAVMAKNKVCLVDVEPEALKQLRXSEFKPYIIFVKPAIQEKRKXPPMSPACEDXAAPFDEQQQEMAASAAFIDRHYGHLVDAVLVKEDLQGAYSQLKVVLEKLSKDXHWVPVSWVR

SEQ ID NO: 16639 - protein, 312 aa, Homo sapiens
  MOD_RES (6)..(6): Selenocysteine
  MOD_RES (12)..(12): Selenocysteine
  MOD_RES (36)..(36): Selenocysteine
  MOD_RES (94)..(94): Selenocysteine
  MOD_RES (109)..(109): Selenocysteine
  MOD_RES (114)..(114): Selenocysteine
  MOD_RES (119)..(119): Selenocysteine
  MOD_RES (125)..(125): Selenocysteine
  MOD_RES (154)..(154): Selenocysteine
  MOD_RES (160)..(160): Selenocysteine
  MOD_RES (164)..(165): Selenocysteine
  MOD_RES (188)..(188): Selenocysteine
  MOD_RES (208)..(208): Selenocysteine
  MOD_RES (231)..(231): Selenocysteine
  MOD_RES (237)..(237): Selenocysteine
  MOD_RES (258)..(258): Selenocysteine
  MOD_RES (278)..(278): Selenocysteine
  MOD_RES (310)..(310): Selenocysteine
MPALSXGSGSDXGLYELLAALPAQLQPHVDSQEDLXFLWDMFGEKSLHSLVKHFQERRLALRRPEILVQPLKVSNRKSSGFRKSFRLSRKDKKXNKSMYECKKSDQYDXADVPXYEEVXPYRRQXNEKYRLVVLVGPVGVGLNELKRKLLISDXQHYGVXVPHXXRARRSQESDGVEYIFISKHLFEXDVQNNKFIEYGEYKNNYYGXSIDSVRSVLAKNKVCLLDVQPHXVKHLRXLEFKPYVIFIKPPSIERLREXRKNAKIISSRDDQGAAKPFXEEDFQEMIKSAQIMESQYGHLFDKIIINDDLXVA

SEQ ID NO: 16640 - protein, 454 aa, Homo sapiens
  MOD_RES (6)..(6): Selenocysteine
  MOD_RES (12)..(12): Selenocysteine
  MOD_RES (36)..(36): Selenocysteine
  MOD_RES (113)..(113): Selenocysteine
  MOD_RES (152)..(152): Selenocysteine
  MOD_RES (159)..(159): Selenocysteine
  MOD_RES (213)..(213): Selenocysteine
  MOD_RES (224)..(224): Selenocysteine
  MOD_RES (271)..(271): Selenocysteine
  MOD_RES (333)..(333): Selenocysteine
  MOD_RES (348)..(348): Selenocysteine
  MOD_RES (353)..(353): Selenocysteine
  MOD_RES (358)..(358): Selenocysteine
  MOD_RES (364)..(364): Selenocysteine
  MOD_RES (393)..(393): Selenocysteine
  MOD_RES (399)..(399): Selenocysteine
  MOD_RES (403)..(404): Selenocysteine
  MOD_RES (427)..(427): Selenocysteine
  MOD_RES (444)..(444): Selenocysteine
MPALSXGSGSDXGLYELLAALPAQLQPHVDSQEDLXFLWDMFGEKSLHSLVKIHEKLHYYEKQSPVPILHGAAALADDLAEELQNKPLNSEIRELLKLLSKPNVKALLSVHDXVAQKNYDPVLPPMPEDIDDEEDSVKIIRLVKNREPLGAXIKKDEQXGAIIVARIMRGGAADRSGLIHVGDELREVNGIPVEDKRPEEIIQILAQSQGAIXFKIIPGSKEEXPSKEGKMFIKALFDYNPNEDKAIPCKEAGLSFKKGDILQIMSQDDAXWWQAKHEADANPRAGLIPSKHFQERRLALRRPEILVQPLKVSNRKSSGFRKSFRLSRKDKKXNKSMYECKKSDQYDXADVPXYEEVXPYRRQXNEKYRLVVLVGPVGVGLNELKRKLLISDXQHYGVXVPHXXRARRSQESDGVEYIFISKHLFEXDVQNNKYVDIFENFHVXVFYKHMPVPF

SEQ ID NO: 16641 - protein, 576 aa, Homo sapiens
  MOD_RES (6)..(6): Selenocysteine
  MOD_RES (12)..(12): Selenocysteine
  MOD_RES (36)..(36): Selenocysteine
  MOD_RES (113)..(113): Selenocysteine
  MOD_RES (152)..(152): Selenocysteine
  MOD_RES (159)..(159): Selenocysteine
  MOD_RES (213)..(213): Selenocysteine
  MOD_RES (224)..(224): Selenocysteine
  MOD_RES (271)..(271): Selenocysteine
  MOD_RES (333)..(333): Selenocysteine
  MOD_RES (348)..(348): Selenocysteine
  MOD_RES (353)..(353): Selenocysteine
  MOD_RES (358)..(358): Selenocysteine
  MOD_RES (364)..(364): Selenocysteine
  MOD_RES (393)..(393): Selenocysteine
  MOD_RES (399)..(399): Selenocysteine
  MOD_RES (403)..(404): Selenocysteine
  MOD_RES (427)..(427): Selenocysteine
  MOD_RES (447)..(447): Selenocysteine
  MOD_RES (470)..(470): Selenocysteine
  MOD_RES (476)..(476): Selenocysteine
  MOD_RES (497)..(497): Selenocysteine
  MOD_RES (517)..(517): Selenocysteine
  MOD_RES (549)..(549): Selenocysteine
  MOD_RES (557)..(558): Selenocysteine
  MOD_RES (564)..(564): Selenocysteine
  MOD_RES (566)..(566): Selenocysteine
MPALSXGSGSDXGLYELLAALPAQLQPHVDSQEDLXFLWDMFGEKSLHSLVKIHEKLHYYEKQSPVPILHGAAALADDLAEELQNKPLNSEIRELLKLLSKPNVKALLSVHDXVAQKNYDPVLPPMPEDIDDEEDSVKIIRLVKNREPLGAXIKKDEQXGAIIVARIMRGGAADRSGLIHVGDELREVNGIPVEDKRPEEIIQILAQSQGAIXFKIIPGSKEEXPSKEGKMFIKALFDYNPNEDKAIPCKEAGLSFKKGDILQIMSQDDAXWWQAKHEADANPRAGLIPSKHFQERRLALRRPEILVQPLKVSNRKSSGFRKSFRLSRKDKKXNKSMYECKKSDQYDXADVPXYEEVXPYRRQXNEKYRLVVLVGPVGVGLNELKRKLLISDXQHYGVXVPHXXRARRSQESDGVEYIFISKHLFEXDVQNNKFIEYGEYKNNYYGXSIDSVRSVLAKNKVCLLDVQPHXVKHLRXLEFKPYVIFIKPPSIERLREXRKNAKIISSRDDQGAAKPFXEEDFQEMIKSAQIMESQYGHLFDKIIINDDLXVAFNELKXXFDKLEXEXHWVPVSWLHS

SEQ ID NO: 16642 - protein, 147 aa, Homo sapiens
  MOD_RES (19)..(19): Selenocysteine
  MOD_RES (48)..(48): Selenocysteine
  MOD_RES (53)..(53): Selenocysteine
  MOD_RES (57)..(57): Selenocysteine
  MOD_RES (106)..(106): Selenocysteine
  MOD_RES (113)..(113): Selenocysteine
MAGWWPALSRAARRHPWPXNVLLYGSLVSAGDALQQRLQGREANWRQXRRVAXLVVXFHANFNYVWLRLLERALPGRAPHALLAKLLCDQVVGAPIAVSAFYVEWXDVLALCXADQLQPCSCSMENSLRWSLWFSLGHLHLFFPAEW

SEQ ID NO: 16643 - protein, 196 aa, Homo sapiens
  MOD_RES (19)..(19): Selenocysteine
  MOD_RES (48)..(48): Selenocysteine
  MOD_RES (53)..(53): Selenocysteine
  MOD_RES (57)..(57): Selenocysteine
  MOD_RES (125)..(125): Selenocysteine
  MOD_RES (139)..(139): Selenocysteine
  MOD_RES (150)..(150): Selenocysteine
  MOD_RES (162)..(162): Selenocysteine
  MOD_RES (174)..(174): Selenocysteine
  MOD_RES (180)..(180): Selenocysteine
  MOD_RES (184)..(184): Selenocysteine
  MOD_RES (187)..(187): Selenocysteine
  MOD_RES (190)..(190): Selenocysteine
MAGWWPALSRAARRHPWPXNVLLYGSLVSAGDALQQRLQGREANWRQXRRVAXLVVXFHANFNYVWLRLLERALPGRAPHALLAKLLCDQVVGAPIAVSAFYVGMSILQGKDDIFLDLKQKFWNXYLSGLMYWPFVQLXNFSLVPVQWRXAYAGVCGFLWAXFICFSQQSGDGXFKSAFXILYXKGXSAXEGYPKK

SEQ ID NO: 16644 - protein, 52 aa, Homo sapiens
NYVWLRLLERALPGRAPHALLAKLLCDQVVGAPIAVSAFYVGSHSIPQAEVQ

SEQ ID NO: 16645 - protein, 209 aa, Homo sapiens
  MOD_RES (32)..(32): Selenocysteine
  MOD_RES (42)..(42): Selenocysteine
  MOD_RES (52)..(52): Selenocysteine
  MOD_RES (57)..(57): Selenocysteine
  MOD_RES (63)..(63): Selenocysteine
  MOD_RES (65)..(66): Selenocysteine
  MOD_RES (70)..(70): Selenocysteine
  MOD_RES (83)..(84): Selenocysteine
  MOD_RES (132)..(132): Selenocysteine
  MOD_RES (173)..(173): Selenocysteine
  MOD_RES (180)..(180): Selenocysteine
  MOD_RES (201)..(201): Selenocysteine
MAASAGAGAVIAAPDSRRWLWSVLAAALGLLXAGVSALEVYXPKEIFVANGXQGKLXCKFKSXSXXGGLXSVSWSFQPEGADXXVSFFHYSQGQVYLGNYPPFKDRISWAGDLDKKDASINIENMQFIHNGXYICDVKNPPDIVVQPGHIRLYVVEKENLPVFPVWVVVGIVXAVVLGLXLLISMILAVLYRRKNSKRDYXGAQSYMHS

SEQ ID NO: 16646 - protein, 269 aa, Homo sapiens
  MOD_RES (32)..(32): Selenocysteine
  MOD_RES (42)..(42): Selenocysteine
  MOD_RES (52)..(52): Selenocysteine
  MOD_RES (57)..(57): Selenocysteine
  MOD_RES (63)..(63): Selenocysteine
  MOD_RES (65)..(66): Selenocysteine
  MOD_RES (70)..(70): Selenocysteine
  MOD_RES (83)..(84): Selenocysteine
  MOD_RES (132)..(132): Selenocysteine
  MOD_RES (173)..(173): Selenocysteine
  MOD_RES (180)..(180): Selenocysteine
  MOD_RES (201)..(201): Selenocysteine
  MOD_RES (205)..(205): Selenocysteine
  MOD_RES (223)..(223): Selenocysteine
MAASAGAGAVIAAPDSRRWLWSVLAAALGLLXAGVSALEVYXPKEIFVANGXQGKLXCKFKSXSXXGGLXSVSWSFQPEGADXXVSFFHYSQGQVYLGNYPPFKDRISWAGDLDKKDASINIENMQFIHNGXYICDVKNPPDIVVQPGHIRLYVVEKENLPVFPVWVVVGIVXAVVLGLXLLISMILAVLYRRKNSKRDYXGCSXSESLSPVKQAPRKSPSDXEGLVKSLPSGSHQGPVIYAQLDHSGGHHSDKINKSESVVYADIRKN

SEQ ID NO: 16647 - protein, 119 aa, Homo sapiens
  MOD_RES (32)..(32): Selenocysteine
  MOD_RES (42)..(42): Selenocysteine
  MOD_RES (52)..(52): Selenocysteine
  MOD_RES (57)..(57): Selenocysteine
  MOD_RES (63)..(63): Selenocysteine
  MOD_RES (65)..(66): Selenocysteine
  MOD_RES (70)..(70): Selenocysteine
  MOD_RES (83)..(84): Selenocysteine
MAASAGAGAVIAAPDSRRWLWSVLAAALGLLXAGVSALEVYXPKEIFVANGXQGKLXCKFKSXSXXGGLXSVSWSFQPEGADXXVSGPVIYAQLDHSGGHHSDKINKSESVVYADIRKN

SEQ ID NO: 16648 - protein, 95 aa, Homo sapiens
  MOD_RES (32)..(32): Selenocysteine
  MOD_RES (42)..(42): Selenocysteine
  MOD_RES (52)..(52): Selenocysteine
  MOD_RES (57)..(57): Selenocysteine
  MOD_RES (63)..(63): Selenocysteine
  MOD_RES (65)..(66): Selenocysteine
  MOD_RES (70)..(70): Selenocysteine
  MOD_RES (83)..(84): Selenocysteine
MAASAGAGAVIAAPDSRRWLWSVLAAALGLLXAGVSALEVYXPKEIFVANGXQGKLXCKFKSXSXXGGLXSVSWSFQPEGADXXVSRICLCFQFG

SEQ ID NO: 16649 - protein, 183 aa, Homo sapiens
  MOD_RES (6)..(6): Selenocysteine
  MOD_RES (16)..(16): Selenocysteine
  MOD_RES (26)..(26): Selenocysteine
  MOD_RES (31)..(31): Selenocysteine
  MOD_RES (37)..(37): Selenocysteine
  MOD_RES (39)..(40): Selenocysteine
  MOD_RES (44)..(44): Selenocysteine
  MOD_RES (57)..(58): Selenocysteine
  MOD_RES (106)..(106): Selenocysteine
  MOD_RES (147)..(147): Selenocysteine
  MOD_RES (154)..(154): Selenocysteine
  MOD_RES (175)..(175): Selenocysteine
PFSSVXAGVSALEVYXPKEIFVANGXQGKLXCKFKSXSXXGGLXSVSWSFQPEGADXXVSFFHYSQGQVYLGNYPPFKDRISWAGDLDKKDASINIENMQFIHNGXYICDVKNPPDIVVQPGHIRLYVVEKENLPVFPVWVVVGIVXAVVLGLXLLISMILAVLYRRKNSKRDYXGAQSYMHS

SEQ ID NO: 16650 - protein, 296 aa, Homo sapiens
  MOD_RES (24)..(24): Selenocysteine
  MOD_RES (56)..(57): Selenocysteine
  MOD_RES (62)..(62): Selenocysteine
  MOD_RES (85)..(85): Selenocysteine
  MOD_RES (115)..(115): Selenocysteine
  MOD_RES (152)..(152): Selenocysteine
  MOD_RES (156)..(156): Selenocysteine
  MOD_RES (168)..(168): Selenocysteine
  MOD_RES (173)..(173): Selenocysteine
  MOD_RES (190)..(190): Selenocysteine
  MOD_RES (214)..(214): Selenocysteine
  MOD_RES (252)..(252): Selenocysteine
  MOD_RES (293)..(293): Selenocysteine
MGELMAFLLPLIIVLMVKHSDSRXHSLRYFRLGVSDPIHGVPEFISVGYVDSHPIXXYDSVXRQKEPRAPWMAENLAPDHWERYXQLLRGWQQMFKVELKRLQRHYNHSDNVAHXIKQAWEANQHELLYQKNWLEEECIAWLKRFLEYGKDXLQRXEPPLVRVNRKEXFPGVXALFCKAHGFYPPEIYMXWMKNGEEIVQEIDYGDILPSGDGXYQAWASIELDPQSSNLYSCHVEHCGVHMVLQVPQESEXIPLVMKAVSGSIVLVIVLAGVGVLVWRRRPREQNGAIYLPXPDR

SEQ ID NO: 16651 - protein, 341 aa, Homo sapiens
  MOD_RES (24)..(24): Selenocysteine
  MOD_RES (56)..(57): Selenocysteine
  MOD_RES (62)..(62): Selenocysteine
  MOD_RES (85)..(85): Selenocysteine
  MOD_RES (113)..(113): Selenocysteine
  MOD_RES (128)..(129): Selenocysteine
  MOD_RES (148)..(148): Selenocysteine
  MOD_RES (160)..(160): Selenocysteine
  MOD_RES (197)..(197): Selenocysteine
  MOD_RES (201)..(201): Selenocysteine
  MOD_RES (213)..(213): Selenocysteine
  MOD_RES (218)..(218): Selenocysteine
  MOD_RES (235)..(235): Selenocysteine
  MOD_RES (259)..(259): Selenocysteine
  MOD_RES (297)..(297): Selenocysteine
  MOD_RES (338)..(338): Selenocysteine
MGELMAFLLPLIIVLMVKHSDSRXHSLRYFRLGVSDPIHGVPEFISVGYVDSHPIXXYDSVXRQKEPRAPWMAENLAPDHWERYXQLLRGWQQMFKVELKRLQRHYNHSGSHXYQRMIGCELLEDGSXXGFLQYAYDGQDFLIFNKDXLSWLAVDNVAHXIKQAWEANQHELLYQKNWLEEECIAWLKRFLEYGKDXLQRXEPPLVRVNRKEXFPGVXALFCKAHGFYPPEIYMXWMKNGEEIVQEIDYGDILPSGDGXYQAWASIELDPQSSNLYSCHVEHCGVHMVLQVPQESEXIPLVMKAVSGSIVLVIVLAGVGVLVWRRRPREQNGAIYLPXPDR

SEQ ID NO: 16652 - protein, 214 aa, Homo sapiens
  MOD_RES (24)..(24): Selenocysteine
  MOD_RES (56)..(57): Selenocysteine
  MOD_RES (62)..(62): Selenocysteine
  MOD_RES (85)..(85): Selenocysteine
  MOD_RES (113)..(113): Selenocysteine
  MOD_RES (128)..(129): Selenocysteine
  MOD_RES (148)..(148): Selenocysteine
  MOD_RES (160)..(160): Selenocysteine
  MOD_RES (197)..(197): Selenocysteine
  MOD_RES (201)..(201): Selenocysteine
  MOD_RES (211)..(211): Selenocysteine
MGELMAFLLPLIIVLMVKHSDSRXHSLRYFRLGVSDPIHGVPEFISVGYVDSHPIXXYDSVXRQKEPRAPWMAENLAPDHWERYXQLLRGWQQMFKVELKRLQRHYNHSGSHXYQRMIGCELLEDGSXXGFLQYAYDGQDFLIFNKDXLSWLAVDNVAHXIKQAWEANQHELLYQKNWLEEECIAWLKRFLEYGKDXLQRXEQNGAIYLPXPDR

SEQ ID NO: 16653 - protein, 249 aa, Homo sapiens
  MOD_RES (24)..(24): Selenocysteine
  MOD_RES (56)..(57): Selenocysteine
  MOD_RES (62)..(62): Selenocysteine
  MOD_RES (85)..(85): Selenocysteine
  MOD_RES (113)..(113): Selenocysteine
  MOD_RES (128)..(129): Selenocysteine
  MOD_RES (148)..(148): Selenocysteine
  MOD_RES (160)..(160): Selenocysteine
  MOD_RES (197)..(197): Selenocysteine
  MOD_RES (201)..(201): Selenocysteine
  MOD_RES (205)..(205): Selenocysteine
  MOD_RES (246)..(246): Selenocysteine
MGELMAFLLPLIIVLMVKHSDSRXHSLRYFRLGVSDPIHGVPEFISVGYVDSHPIXXYDSVXRQKEPRAPWMAENLAPDHWERYXQLLRGWQQMFKVELKRLQRHYNHSGSHXYQRMIGCELLEDGSXXGFLQYAYDGQDFLIFNKDXLSWLAVDNVAHXIKQAWEANQHELLYQKNWLEEECIAWLKRFLEYGKDXLQRXESEXIPLVMKAVSGSIVLVIVLAGVGVLVWRRRPREQNGAIYLPXPDR

SEQ ID NO: 16654 - protein, 23 aa, Homo sapiens
  MOD_RES (3)..(3): Selenocysteine
  MOD_RES (13)..(13): Selenocysteine
MAXSAVPSDNLPXYKLVVVGDGG

SEQ ID NO: 16655 - protein, 208 aa, Homo sapiens
  MOD_RES (3)..(3): Selenocysteine
  MOD_RES (13)..(13): Selenocysteine
  MOD_RES (30)..(30): Selenocysteine
  MOD_RES (45)..(45): Selenocysteine
  MOD_RES (54)..(54): Selenocysteine
  MOD_RES (68)..(68): Selenocysteine
  MOD_RES (84)..(84): Selenocysteine
  MOD_RES (95)..(95): Selenocysteine
  MOD_RES (137)..(137): Selenocysteine
  MOD_RES (146)..(146): Selenocysteine
  MOD_RES (155)..(155): Selenocysteine
  MOD_RES (190)..(190): Selenocysteine
  MOD_RES (198)..(198): Selenocysteine
  MOD_RES (200)..(200): Selenocysteine
MAXSAVPSDNLPXYKLVVVGDGGVGKSALXIQFFQKIFVPDYDPXIEDSYLKHXEIDNQWAILDVLDXAGQEEFSAMREQYMRXGDGFLIVYSVXDKASFEHVDRFHQLILRVKDRESFPMILVANKVDLMHLRKIXREQGKEMAXKHNIPYIEXSAKDPPLNVDKAFHDLVRVIRQQIPEKSQKKKKKXKWRGDRAXGXHKLQCVIL

SEQ ID NO: 16656 - protein, 107 aa, Homo sapiens
  MOD_RES (8)..(8): Selenocysteine
  MOD_RES (19)..(19): Selenocysteine
  MOD_RES (61)..(61): Selenocysteine
  MOD_RES (70)..(70): Selenocysteine
  MOD_RES (79)..(79): Selenocysteine
MREQYMRXGDGFLIVYSVXDKASFEHVDRFHQLILRVKDRESFPMILVANKVDLMHLRKIXREQGKEMAXKHNIPYIEXSAKDPPLNVDKAFHDLVRVIRQQIPEKS

SEQ ID NO: 16657 - protein, 132 aa, Homo sapiens
  MOD_RES (8)..(8): Selenocysteine
  MOD_RES (19)..(19): Selenocysteine
  MOD_RES (61)..(61): Selenocysteine
  MOD_RES (70)..(70): Selenocysteine
  MOD_RES (79)..(79): Selenocysteine
  MOD_RES (114)..(114): Selenocysteine
  MOD_RES (122)..(122): Selenocysteine
  MOD_RES (124)..(124): Selenocysteine
MREQYMRXGDGFLIVYSVXDKASFEHVDRFHQLILRVKDRESFPMILVANKVDLMHLRKIXREQGKEMAXKHNIPYIEXSAKDPPLNVDKAFHDLVRVIRQQIPEKSQKKKKKXKWRGDRAXGXHKLQCVIL

SEQ ID NO: 16658 - protein, 1456 aa, Homo sapiens
  MOD_RES (22)..(22): Selenocysteine
  MOD_RES (46)..(46): Selenocysteine
  MOD_RES (81)..(81): Selenocysteine
  MOD_RES (87)..(87): Selenocysteine
  MOD_RES (106)..(106): Selenocysteine
  MOD_RES (144)..(145): Selenocysteine
  MOD_RES (158)..(158): Selenocysteine
  MOD_RES (167)..(167): Selenocysteine
  MOD_RES (183)..(183): Selenocysteine
  MOD_RES (196)..(198): Selenocysteine
  MOD_RES (202)..(202): Selenocysteine
  MOD_RES (226)..(226): Selenocysteine
  MOD_RES (239)..(239): Selenocysteine
  MOD_RES (258)..(258): Selenocysteine
  MOD_RES (264)..(264): Selenocysteine
  MOD_RES (267)..(267): Selenocysteine
  MOD_RES (270)..(270): Selenocysteine
  MOD_RES (274)..(274): Selenocysteine
  MOD_RES (345)..(346): Selenocysteine
  MOD_RES (360)..(360): Selenocysteine
  MOD_RES (389)..(390): Selenocysteine
  MOD_RES (399)..(399): Selenocysteine
  MOD_RES (403)..(403): Selenocysteine
  MOD_RES (441)..(441): Selenocysteine
  MOD_RES (444)..(444): Selenocysteine
  MOD_RES (446)..(446): Selenocysteine
  MOD_RES (521)..(521): Selenocysteine
  MOD_RES (524)..(524): Selenocysteine
  MOD_RES (531)..(531): Selenocysteine
  MOD_RES (540)..(541): Selenocysteine
  MOD_RES (552)..(552): Selenocysteine
  MOD_RES (565)..(565): Selenocysteine
  MOD_RES (572)..(572): Selenocysteine
  MOD_RES (575)..(575): Selenocysteine
  MOD_RES (579)..(579): Selenocysteine
  MOD_RES (587)..(587): Selenocysteine
  MOD_RES (605)..(605): Selenocysteine
  MOD_RES (633)..(633): Selenocysteine
  MOD_RES (639)..(641): Selenocysteine
  MOD_RES (656)..(656): Selenocysteine
  MOD_RES (672)..(672): Selenocysteine
  MOD_RES (698)..(698): Selenocysteine
  MOD_RES (704)..(704): Selenocysteine
  MOD_RES (718)..(718): Selenocysteine
  MOD_RES (727)..(727): Selenocysteine
  MOD_RES (761)..(761): Selenocysteine
  MOD_RES (784)..(784): Selenocysteine
  MOD_RES (790)..(790): Selenocysteine
  MOD_RES (800)..(800): Selenocysteine
  MOD_RES (820)..(820): Selenocysteine
  MOD_RES (887)..(887): Selenocysteine
  MOD_RES (901)..(901): Selenocysteine
  MOD_RES (932)..(933): Selenocysteine
  MOD_RES (937)..(937): Selenocysteine
  MOD_RES (997)..(997): Selenocysteine
  MOD_RES (1004)..(1004): Selenocysteine
  MOD_RES (1009)..(1009): Selenocysteine
  MOD_RES (1019)..(1019): Selenocysteine
  MOD_RES (1023)..(1023): Selenocysteine
  MOD_RES (1031)..(1031): Selenocysteine
  MOD_RES (1070)..(1070): Selenocysteine
  MOD_RES (1081)..(1081): Selenocysteine
  MOD_RES (1088)..(1088): Selenocysteine
  MOD_RES (1093)..(1093): Selenocysteine
  MOD_RES (1096)..(1096): Selenocysteine
  MOD_RES (1121)..(1121): Selenocysteine
  MOD_RES (1148)..(1148): Selenocysteine
  MOD_RES (1162)..(1162): Selenocysteine
  MOD_RES (1167)..(1167): Selenocysteine
  MOD_RES (1169)..(1169): Selenocysteine
  MOD_RES (1177)..(1177): Selenocysteine
  MOD_RES (1201)..(1201): Selenocysteine
  MOD_RES (1221)..(1221): Selenocysteine
  MOD_RES (1236)..(1236): Selenocysteine
  MOD_RES (1253)..(1253): Selenocysteine
  MOD_RES (1293)..(1293): Selenocysteine
  MOD_RES (1306)..(1306): Selenocysteine
  MOD_RES (1322)..(1322): Selenocysteine
  MOD_RES (1366)..(1366): Selenocysteine
  MOD_RES (1371)..(1372): Selenocysteine
  MOD_RES (1376)..(1376): Selenocysteine
  MOD_RES (1401)..(1401): Selenocysteine
  MOD_RES (1427)..(1427): Selenocysteine
  MOD_RES (1438)..(1438): Selenocysteine
MRLPLLLVFASVIPGAVLLLDXRQFLIYNEDHKRCVDAVSPSAVQXAACNQDAESQKFRWVSESQIMSVAFKLCLGVPSKXDWVAIXLYACDSKSEFQKWECKNDXLLGIKGEDLFFNYGNRQEKNIMLYKGSGLWSRWKIYGXXDNLCSRGYEAMYXLLGNANGAXCAFPFKFENKWYADCXSAGRSDGWLWCGXXXDYDXDKLFGYCPLKFEGSESLWNKDPLXSVSYQINSKSALXWHQARKSCQQQNAELLSIXEIHEQXYLXGLXSSLXSGLWIGLNSLSFNSGWQWSDRSPFRYLNWLPGSPSAEPGKSCVSLNPGKNAKWENLECVQKLGYICKKGNXXLNSFVIPSESDVPXHCPSQWWPYAGHCYKIHRDEKKIQRDALXXCRKEGGDLXSIHXIEELDFIISQLGYEPNDELWIGLNDIKIQMYFEWSDGXPVXFXKWLRGEPSHENNRQEDCVVMKGKDGYWADRGCEWPLGYICKMKSRSQGPEIVEVEKGCRKGWKKHHFYCYMIGHXLSXFAEANQXCNNENAYLXXIEDRYEQAFLXSFVGLRPEKYFWXGLSDIQXKGXFQWXIEEEVRFXHWNSDMPGRKPGCVAMRXGIAGGLWDVLKCDEKAKFVCKHWAEGVXHPPKPXXXPEPKCPEDWGASSRXSLCFKLYAKGKHEKKXWFESRDFCRALGGDLASINNKEEQQXIWRLIXASGSYHKLFWLGLXYGSPSEGFXWSDGSPVSYENWAYGEPNNYQNVEYCGELKGDPXMSWNDINCEHLNNWICQIQKGQXPKPEPXPAPQDNPPVXEDGWVIYKDYQYYFSKEKEXMDNARAFCKRNFGDLVSIQSESEKKFLWKYVNRNDAQSAYFIGLLISLDKKFAWMDGSKVDYVSWAXGEPNFANEDENCVXMYSNSGFWNDINCGYPNAFICQRHNSSINAXXVMPXMPSVPSGCKEGWNFYSNKCFKIFGFMEEERKNWQEARKACIGFGGNLVSIQNEKEQAFLXYHMKDSXFSAWXGLNDVNSEHXFLWXDGRGVHYXNWGKGYPGGRRSSLSYEDADCVVIIGGASNEAGKWMDDXCDSKRGYICQXRSDPSLXNPPAXIQXDGFVKYGKSSYSLMRQKFQWHEAEXYCKLHNSLIASILDPYSNAFAWLQMEXSNERVWIALNSNLXDNQYXWXDKWRVRYXNWAADEPKLKSACVYLDLDGYWKXAHCNESFYFLCKRSDEIPAXEPPQLPGRCPESDHXAWIPFHGHCYYIESSYXRNWGQASLECLRMGSSLVSIESAAESSFLSYRVEPLKSKXNFWIGLFRNVEGXWLWINNSPVSFVNWNXGDPSGERNDCVALHASSGFWSNIHCSSYKGYICKRPKIIDAKPXHELLXXKADXRKMDPSKPSSNVAGVVIIVILLILXGAGLAAYFFYKKRRVHLPQEGAFENXLYFNSQSSPGXSDMKDLVGNIEQNEHSVI

SEQ ID NO: 16659 - protein, 1479 aa, Homo sapiens
  MOD_RES (65)..(65): Selenocysteine
  MOD_RES (70)..(70): Selenocysteine
  MOD_RES (90)..(90): Selenocysteine
  MOD_RES (96)..(96): Selenocysteine
  MOD_RES (101)..(101): Selenocysteine
  MOD_RES (103)..(104): Selenocysteine
  MOD_RES (125)..(125): Selenocysteine
  MOD_RES (138)..(138): Selenocysteine
  MOD_RES (146)..(146): Selenocysteine
  MOD_RES (153)..(153): Selenocysteine
  MOD_RES (177)..(177): Selenocysteine
  MOD_RES (188)..(188): Selenocysteine
  MOD_RES (202)..(202): Selenocysteine
  MOD_RES (204)..(204): Selenocysteine
  MOD_RES (215)..(216): Selenocysteine
  MOD_RES (237)..(237): Selenocysteine
  MOD_RES (245)..(245): Selenocysteine
  MOD_RES (256)..(256): Selenocysteine
  MOD_RES (277)..(277): Selenocysteine
  MOD_RES (283)..(283): Selenocysteine
  MOD_RES (290)..(290): Selenocysteine
  MOD_RES (295)..(295): Selenocysteine
  MOD_RES (305)..(305): Selenocysteine
  MOD_RES (340)..(340): Selenocysteine
  MOD_RES (366)..(366): Selenocysteine
  MOD_RES (370)..(370): Selenocysteine
  MOD_RES (430)..(430): Selenocysteine
  MOD_RES (464)..(464): Selenocysteine
  MOD_RES (483)..(483): Selenocysteine
  MOD_RES (526)..(526): Selenocysteine
  MOD_RES (541)..(541): Selenocysteine
  MOD_RES (550)..(550): Selenocysteine
  MOD_RES (558)..(558): Selenocysteine
  MOD_RES (560)..(560): Selenocysteine
  MOD_RES (582)..(582): Selenocysteine
  MOD_RES (590)..(590): Selenocysteine
  MOD_RES (604)..(604): Selenocysteine
  MOD_RES (623)..(623): Selenocysteine
  MOD_RES (636)..(636): Selenocysteine
  MOD_RES (650)..(650): Selenocysteine
  MOD_RES (653)..(653): Selenocysteine
  MOD_RES (662)..(662): Selenocysteine
  MOD_RES (666)..(666): Selenocysteine
  MOD_RES (677)..(677): Selenocysteine
  MOD_RES (802)..(802): Selenocysteine
  MOD_RES (814)..(814): Selenocysteine
  MOD_RES (845)..(845): Selenocysteine
  MOD_RES (854)..(854): Selenocysteine
  MOD_RES (861)..(861): Selenocysteine
  MOD_RES (893)..(893): Selenocysteine
  MOD_RES (903)..(903): Selenocysteine
  MOD_RES (931)..(931): Selenocysteine
  MOD_RES (944)..(944): Selenocysteine
  MOD_RES (956)..(956): Selenocysteine
  MOD_RES (959)..(959): Selenocysteine
  MOD_RES (966)..(967): Selenocysteine
  MOD_RES (1013)..(1013): Selenocysteine
  MOD_RES (1015)..(1015): Selenocysteine
  MOD_RES (1024)..(1024): Selenocysteine
  MOD_RES (1031)..(1031): Selenocysteine
  MOD_RES (1076)..(1076): Selenocysteine
  MOD_RES (1090)..(1090): Selenocysteine
  MOD_RES (1099)..(1099): Selenocysteine
  MOD_RES (1102)..(1102): Selenocysteine
  MOD_RES (1111)..(1111): Selenocysteine
  MOD_RES (1128)..(1128): Selenocysteine
  MOD_RES (1136)..(1136): Selenocysteine
  MOD_RES (1168)..(1168): Selenocysteine
  MOD_RES (1173)..(1173): Selenocysteine
  MOD_RES (1181)..(1181): Selenocysteine
  MOD_RES (1221)..(1221): Selenocysteine
  MOD_RES (1231)..(1232): Selenocysteine
  MOD_RES (1236)..(1236): Selenocysteine
  MOD_RES (1340)..(1340): Selenocysteine
  MOD_RES (1347)..(1347): Selenocysteine
  MOD_RES (1385)..(1385): Selenocysteine
  MOD_RES (1388)..(1388): Selenocysteine
  MOD_RES (1430)..(1430): Selenocysteine
  MOD_RES (1460)..(1460): Selenocysteine
  MOD_RES (1463)..(1463): Selenocysteine
MGPGRPAPAPWPRHLLRCVLLLGCLHLGRPGAPGDAALPEPNVFLIFSHGLQGCLEAQGGQVRVXPACNXSLPAQRWKWVSRNRLFNLGXMQCLGXGWPGXNXXASLGMYECDREALNLRWHCRXLGDQLSLLLGARXSNISKPGXLERGDQXRSGQWRIYGSEEDLCALPYHEVYXIQGNSHGKPCXIPFKYDNQWFHGCXSXGREDGHLWCAXXQDYGKDERWGFCPIKSNDCEXFWDKDQLXDSCYQFNFQSXLSWREAWASCEQQGADLLSIXEIHEQXYINGLLXGYSSXLWIGLNDLDXSGGWQWSDNSPLKYLNWESDQPDNPSEENCGVIRXESSGGWQNRDCSIALPYVCKKKPNAXAEPXPPDRWANVKVECEPSWQPFQGHCYRLQAEKRSWQESKKACLRGGGDLVSIHSMAELEFIXKQIKQEVEELWIGLNDLKLQMNFEWSDGSLVSFXHWHPFEPNNFRDSLEDCVXIWGPEGRWNDSPCNQSLPSICKKAGQLSQGAAEEDHGCRKGWXWHSPSCYWLGEDQVXYSEARRLCXDHGSQLVXIXNRFEQAFVSSLIYNWEGEYFWXALQDLNSXGSFFWLSGDEVMYXHWNRDQPGYSRGGCVALAXGSAMGLWEVKNCXSFRARYICRQSLGXPVXPELPGPDPXPSLXGSCPQGWASDXKLRYCYKVFSSERLQDKKSWVQAQGACQELGAQLLSLASYEEEHFVANMLNKIFGESEPEIHEQHWFWIGLNRRDPRGGQSWRWSDGVGFSYHNFDRSRHDDDDIRGCAVLDLASLQWVAMQCDXQLDWICKIPRGXDVREPDDSPQGRREWLRFQEAEYKFFEHHSXWAQAQRICXWFQAELXSVHSQAELDFLSHNLQKFSRAQEQHWWIGLHXSESDGRFRWXDGSIINFISWAPGKPRPVGKDKKCVYMXASREDWGDQRCLXALPYICKRSNVXKEXQPPDLPXXALGGCPSDWIQFLNKCFQVQGQEPQSRVKWSEAQFSCEQQEAQLVXIXNPLEQAFIXASLPNVXFDLWIGLHASQRDFQWVEQEPLMYANWAPGEPSGPSPAPSGNKPXSCAVVLHSPSAHFXGRWDDRSCXEEXHGFICQKGXDPSLSPSPAALPPAPGXELSYLNGXFRLLQKPLRWHDALLLCESRNASLAYVPDPYXQAFLXQAARGLRXPLWIGLAGEEGSRRYSWVSEEPLNYVGWQDGEPQQPGGCXYVDVDGAWRXXSCDXKLQGAVCGVSSGPPPPRRISYHGSCPQGLADSAWIPFREHCYSFHMELLLGHKEARQRCQRAGGAVLSILDEMENVFVWEHLQSYEGQSRGAWLGMNFNPKGGXLVWQDNXAVNYSNWGPPGLGPSMLSHNSCYWIQSNSGLWRPGACXNIXMGVVCKLPRAEQSSFSPSALPENPAALVVVLMAVLLLLALLXAALILYRRRQSIERGAFEGARYSRSSSSPXEAXEKNILVSDMEMNEQQE

SEQ ID NO: 16660 - protein, 345 aa, Homo sapiens
  MOD_RES (3)..(3): Selenocysteine
  MOD_RES (19)..(19): Selenocysteine
  MOD_RES (29)..(29): Selenocysteine
  MOD_RES (34)..(34): Selenocysteine
  MOD_RES (40)..(40): Selenocysteine
  MOD_RES (87)..(87): Selenocysteine
  MOD_RES (97)..(98): Selenocysteine
  MOD_RES (102)..(102): Selenocysteine
  MOD_RES (206)..(206): Selenocysteine
  MOD_RES (213)..(213): Selenocysteine
  MOD_RES (251)..(251): Selenocysteine
  MOD_RES (254)..(254): Selenocysteine
  MOD_RES (296)..(296): Selenocysteine
  MOD_RES (326)..(326): Selenocysteine
  MOD_RES (329)..(329): Selenocysteine
MPXGHLGSPLALALLPVAXNRPAVQWSCXAPQPXSLAAGXIGAARRRPMASSARRARGSRRYSWVSEEPLNYVGWQDGEPQQPGGCXYVDVDGAWRXXSCDXKLQGAVCGVSSGPPPPRRISYHGSCPQGLADSAWIPFREHCYSFHMELLLGHKEARQRCQRAGGAVLSILDEMENVFVWEHLQSYEGQSRGAWLGMNFNPKGGXLVWQDNXAVNYSNWGPPGLGPSMLSHNSCYWIQSNSGLWRPGACXNIXMGVVCKLPRAEQSSFSPSALPENPAALVVVLMAVLLLLALLXAALILYRRRQSIERGAFEGARYSRSSSSPXEAXEKNILVSDMEMNEQQE

SEQ ID NO: 16661 - protein, 35 aa, Homo sapiens
  MOD_RES (2)..(2): Selenocysteine
  MOD_RES (15)..(15): Selenocysteine
  MOD_RES (27)..(27): Selenocysteine
  MOD_RES (30)..(30): Selenocysteine
MXASREDWGDQRCLXALPYICKRSNVXKEXQPPDL

SEQ ID NO: 16662 - protein, 157 aa, Homo sapiens
  MOD_RES (1)..(1): Any amino acid
  MOD_RES (17)..(17): Selenocysteine
  MOD_RES (25)..(25): Selenocysteine
  MOD_RES (39)..(39): Selenocysteine
  MOD_RES (58)..(58): Selenocysteine
  MOD_RES (71)..(71): Selenocysteine
  MOD_RES (85)..(85): Selenocysteine
  MOD_RES (88)..(88): Selenocysteine
  MOD_RES (97)..(97): Selenocysteine
  MOD_RES (101)..(101): Selenocysteine
  MOD_RES (112)..(112): Selenocysteine
XFVSSLIYNWEGEYFWXALQDLNSXGSFFWLSGDEVMYXHWNRDQPGYSRGGCVALAXGSAMGLWEVKNCXSFRARYICRQSLGXPVXPELPGPDPXPSLXGSCPQGWASDXKLRYCYKVFSSERLQDKKSWVQAQGACQELGAQLLSLASYEEEHF

SEQ ID NO: 16663 - protein, 711 aa, Homo sapiens
  MOD_RES (15)..(15): Selenocysteine
  MOD_RES (22)..(22): Selenocysteine
  MOD_RES (39)..(39): Selenocysteine
  MOD_RES (42)..(42): Selenocysteine
  MOD_RES (74)..(74): Selenocysteine
  MOD_RES (77)..(77): Selenocysteine
  MOD_RES (136)..(136): Selenocysteine
  MOD_RES (177)..(177): Selenocysteine
  MOD_RES (202)..(202): Selenocysteine
  MOD_RES (229)..(229): Selenocysteine
  MOD_RES (257)..(257): Selenocysteine
  MOD_RES (275)..(275): Selenocysteine
  MOD_RES (306)..(306): Selenocysteine
  MOD_RES (332)..(332): Selenocysteine
  MOD_RES (411)..(411): Selenocysteine
  MOD_RES (422)..(422): Selenocysteine
  MOD_RES (428)..(429): Selenocysteine
  MOD_RES (442)..(442): Selenocysteine
  MOD_RES (453)..(453): Selenocysteine
  MOD_RES (484)..(484): Selenocysteine
  MOD_RES (510)..(510): Selenocysteine
  MOD_RES (515)..(515): Selenocysteine
  MOD_RES (527)..(527): Selenocysteine
  MOD_RES (569)..(569): Selenocysteine
  MOD_RES (600)..(600): Selenocysteine
  MOD_RES (604)..(604): Selenocysteine
  MOD_RES (606)..(606): Selenocysteine
  MOD_RES (613)..(613): Selenocysteine
  MOD_RES (630)..(630): Selenocysteine
  MOD_RES (639)..(640): Selenocysteine
  MOD_RES (661)..(662): Selenocysteine
  MOD_RES (665)..(665): Selenocysteine
  MOD_RES (672)..(672): Selenocysteine
  MOD_RES (703)..(703): Selenocysteine
MNRNISHQKGDDENXFKILVAXDIHLGFMEKDAVRGNDXFVXLDEILRLAQENEVDFILLGGDLFHENKPSRKXLHXCLELLRKYCMGDRPVQFEILSDQSVNFGFSKFPWVNYQDGNLNISIPVFSIHGNHDDPXGADALCALDILSCAGFVNHFGRSMSVEKIDISPVLLQKGSXKIALYGLGSIPDERLYRMFVNKKVXMLRPKEDENSWFNLFVIHQNRSKHGSXNFIPEQFLDDFIDLVIWGHEHECKIAPXKNEQQLFYISQPGSSVVXSLSPGEAVKKHVGLLRIKGRKMNMHKIPLHXVRQFFMEDIVLANHPDIFNPDNPKVXQAIQSFCLEKIEEMLENAERERLGNSHQPEKPLVRLRVDYSGGFEPFSVLRFSQKFVDRVANPKDIIHFFRHREQKEKXGEEINFGKLIXKPSEGXXLRVEDLVKQYFQXAEKNVQLSLLXERGMGEAVQEFVDKEEKDAIEELVKYQLEKXQRFLKERHIDALEDKIDEEVRRFREXRQKNXNEEDDEVREAMXRARALRSQSEESASAFSADDLMSIDLAEQMANDSDDSISAAXNKGRGRGRGRRGGRGQNSASRGGSQRGRADXGLEXSXRSRNSKXAVSASRNMSIIDAFKSXRQQPSRNVXXKNYSEVIEVDESDVEEDIFPXXSKXDQRWSSXSSSKIMSQSQVSKGVDFESSEDDDDDPFMNXSSLRRNRR

SEQ ID NO: 16664 - protein, 111 aa, Homo sapiens
  MOD_RES (3)..(3): Selenocysteine
  MOD_RES (12)..(12): Selenocysteine
  MOD_RES (19)..(19): Selenocysteine
  MOD_RES (36)..(36): Selenocysteine
  MOD_RES (39)..(39): Selenocysteine
  MOD_RES (71)..(71): Selenocysteine
  MOD_RES (74)..(74): Selenocysteine
MSXADALDDENXFKILVAXDIHLGFMEKDAVRGNDXFVXLDEILRLAQENEVDFILLGGDLFHENKPSRKXLHXCLELLRKYCMGDRPVQFEILSDQSVNFGFSKFPWVNY

SEQ ID NO: 16665 - protein, 127 aa, Homo sapiens
  MOD_RES (3)..(3): Selenocysteine
  MOD_RES (12)..(12): Selenocysteine
  MOD_RES (19)..(19): Selenocysteine
  MOD_RES (36)..(36): Selenocysteine
  MOD_RES (39)..(39): Selenocysteine
  MOD_RES (71)..(71): Selenocysteine
  MOD_RES (74)..(74): Selenocysteine
MSXADALDDENXFKILVAXDIHLGFMEKDAVRGNDXFVXLDEILRLAQENEVDFILLGGDLFHENKPSRKXLHXCLELLRKYCMGDRPVQFEILSDQSVNFGFSKFPWVNYQDGNLNISIPVFSIHG

SEQ ID NO: 16666 - protein, 680 aa, Homo sapiens
  MOD_RES (3)..(3): Selenocysteine
  MOD_RES (12)..(12): Selenocysteine
  MOD_RES (19)..(19): Selenocysteine
  MOD_RES (36)..(36): Selenocysteine
  MOD_RES (39)..(39): Selenocysteine
  MOD_RES (71)..(71): Selenocysteine
  MOD_RES (74)..(74): Selenocysteine
  MOD_RES (133)..(133): Selenocysteine
  MOD_RES (174)..(174): Selenocysteine
  MOD_RES (199)..(199): Selenocysteine
  MOD_RES (226)..(226): Selenocysteine
  MOD_RES (254)..(254): Selenocysteine
  MOD_RES (272)..(272): Selenocysteine
  MOD_RES (303)..(303): Selenocysteine
  MOD_RES (329)..(329): Selenocysteine
  MOD_RES (408)..(408): Selenocysteine
  MOD_RES (419)..(419): Selenocysteine
  MOD_RES (425)..(426): Selenocysteine
  MOD_RES (439)..(439): Selenocysteine
  MOD_RES (450)..(450): Selenocysteine
  MOD_RES (481)..(481): Selenocysteine
  MOD_RES (507)..(507): Selenocysteine
  MOD_RES (512)..(512): Selenocysteine
  MOD_RES (524)..(524): Selenocysteine
  MOD_RES (566)..(566): Selenocysteine
  MOD_RES (599)..(599): Selenocysteine
  MOD_RES (608)..(609): Selenocysteine
  MOD_RES (630)..(631): Selenocysteine
  MOD_RES (634)..(634): Selenocysteine
  MOD_RES (641)..(641): Selenocysteine
  MOD_RES (672)..(672): Selenocysteine
MSXADALDDENXFKILVAXDIHLGFMEKDAVRGNDXFVXLDEILRLAQENEVDFILLGGDLFHENKPSRKXLHXCLELLRKYCMGDRPVQFEILSDQSVNFGFSKFPWVNYQDGNLNISIPVFSIHGNHDDPXGADALCALDILSCAGFVNHFGRSMSVEKIDISPVLLQKGSXKIALYGLGSIPDERLYRMFVNKKVXMLRPKEDENSWFNLFVIHQNRSKHGSXNFIPEQFLDDFIDLVIWGHEHECKIAPXKNEQQLFYISQPGSSVVXSLSPGEAVKKHVGLLRIKGRKMNMHKIPLHXVRQFFMEDIVLANHPDIFNPDNPKVXQAIQSFCLEKIEEMLENAERERLGNSHQPEKPLVRLRVDYSGGFEPFSVLRFSQKFVDRVANPKDIIHFFRHREQKEKXGEEINFGKLIXKPSEGXXLRVEDLVKQYFQXAEKNVQLSLLXERGMGEAVQEFVDKEEKDAIEELVKYQLEKXQRFLKERHIDALEDKIDEEVRRFREXRQKNXNEEDDEVREAMXRARALRSQSEESASAFSADDLMSIDLAEQMANDSDDSISAAXNKGRGRGRGRRGGRGQNSASRGGSQRGRAFKSXRQQPSRNVXXKNYSEVIEVDESDVEEDIFPXXSKXDQRWSSXSSSKIMSQSQVSKGVDFESSEDDDDDPFMNXSSLRRNRR

SEQ ID NO: 16667 - protein, 707 aa, Homo sapiens
  MOD_RES (3)..(3): Selenocysteine
  MOD_RES (12)..(12): Selenocysteine
  MOD_RES (19)..(19): Selenocysteine
  MOD_RES (36)..(36): Selenocysteine
  MOD_RES (39)..(39): Selenocysteine
  MOD_RES (71)..(71): Selenocysteine
  MOD_RES (74)..(74): Selenocysteine
  MOD_RES (133)..(133): Selenocysteine
  MOD_RES (174)..(174): Selenocysteine
  MOD_RES (199)..(199): Selenocysteine
  MOD_RES (226)..(226): Selenocysteine
  MOD_RES (254)..(254): Selenocysteine
  MOD_RES (272)..(272): Selenocysteine
  MOD_RES (303)..(303): Selenocysteine
  MOD_RES (329)..(329): Selenocysteine
  MOD_RES (408)..(408): Selenocysteine
  MOD_RES (419)..(419): Selenocysteine
  MOD_RES (425)..(426): Selenocysteine
  MOD_RES (439)..(439): Selenocysteine
  MOD_RES (450)..(450): Selenocysteine
  MOD_RES (481)..(481): Selenocysteine
  MOD_RES (507)..(507): Selenocysteine
  MOD_RES (512)..(512): Selenocysteine
  MOD_RES (524)..(524): Selenocysteine
  MOD_RES (566)..(566): Selenocysteine
  MOD_RES (596)..(596): Selenocysteine
  MOD_RES (600)..(600): Selenocysteine
  MOD_RES (602)..(602): Selenocysteine
  MOD_RES (609)..(609): Selenocysteine
  MOD_RES (626)..(626): Selenocysteine
  MOD_RES (635)..(636): Selenocysteine
  MOD_RES (657)..(658): Selenocysteine
  MOD_RES (661)..(661): Selenocysteine
  MOD_RES (668)..(668): Selenocysteine
  MOD_RES (699)..(699): Selenocysteine
MSXADALDDENXFKILVAXDIHLGFMEKDAVRGNDXFVXLDEILRLAQENEVDFILLGGDLFHENKPSRKXLHXCLELLRKYCMGDRPVQFEILSDQSVNFGFSKFPWVNYQDGNLNISIPVFSIHGNHDDPXGADALCALDILSCAGFVNHFGRSMSVEKIDISPVLLQKGSXKIALYGLGSIPDERLYRMFVNKKVXMLRPKEDENSWFNLFVIHQNRSKHGSXNFIPEQFLDDFIDLVIWGHEHECKIAPXKNEQQLFYISQPGSSVVXSLSPGEAVKKHVGLLRIKGRKMNMHKIPLHXVRQFFMEDIVLANHPDIFNPDNPKVXQAIQSFCLEKIEEMLENAERERLGNSHQPEKPLVRLRVDYSGGFEPFSVLRFSQKFVDRVANPKDIIHFFRHREQKEKXGEEINFGKLIXKPSEGXXLRVEDLVKQYFQXAEKNVQLSLLXERGMGEAVQEFVDKEEKDAIEELVKYQLEKXQRFLKERHIDALEDKIDEEVRRFREXRQKNXNEEDDEVREAMXRARALRSQSEESASAFSADDLMSIDLAEQMANDSDDSISAAXNKGRGRGRGRRGGRGQNSASRGGSQRGRDXGLEXSXRSRNSKXAVSASRNMSIIDAFKSXRQQPSRNVXXKNYSEVIEVDESDVEEDIFPXXSKXDQRWSSXSSSKIMSQSQVSKGVDFESSEDDDDDPFMNXSSLRRNRR

SEQ ID NO: 16668 - protein, 708 aa, Homo sapiens
  MOD_RES (3)..(3): Selenocysteine
  MOD_RES (12)..(12): Selenocysteine
  MOD_RES (19)..(19): Selenocysteine
  MOD_RES (36)..(36): Selenocysteine
  MOD_RES (39)..(39): Selenocysteine
  MOD_RES (71)..(71): Selenocysteine
  MOD_RES (74)..(74): Selenocysteine
  MOD_RES (133)..(133): Selenocysteine
  MOD_RES (174)..(174): Selenocysteine
  MOD_RES (199)..(199): Selenocysteine
  MOD_RES (226)..(226): Selenocysteine
  MOD_RES (254)..(254): Selenocysteine
  MOD_RES (272)..(272): Selenocysteine
  MOD_RES (303)..(303): Selenocysteine
  MOD_RES (329)..(329): Selenocysteine
  MOD_RES (408)..(408): Selenocysteine
  MOD_RES (419)..(419): Selenocysteine
  MOD_RES (425)..(426): Selenocysteine
  MOD_RES (439)..(439): Selenocysteine
  MOD_RES (450)..(450): Selenocysteine
  MOD_RES (481)..(481): Selenocysteine
  MOD_RES (507)..(507): Selenocysteine
  MOD_RES (512)..(512): Selenocysteine
  MOD_RES (524)..(524): Selenocysteine
  MOD_RES (566)..(566): Selenocysteine
  MOD_RES (597)..(597): Selenocysteine
  MOD_RES (601)..(601): Selenocysteine
  MOD_RES (603)..(603): Selenocysteine
  MOD_RES (610)..(610): Selenocysteine
  MOD_RES (627)..(627): Selenocysteine
  MOD_RES (636)..(637): Selenocysteine
  MOD_RES (658)..(659): Selenocysteine
  MOD_RES (662)..(662): Selenocysteine
  MOD_RES (669)..(669): Selenocysteine
  MOD_RES (700)..(700): Selenocysteine
MSXADALDDENXFKILVAXDIHLGFMEKDAVRGNDXFVXLDEILRLAQENEVDFILLGGDLFHENKPSRKXLHXCLELLRKYCMGDRPVQFEILSDQSVNFGFSKFPWVNYQDGNLNISIPVFSIHGNHDDPXGADALCALDILSCAGFVNHFGRSMSVEKIDISPVLLQKGSXKIALYGLGSIPDERLYRMFVNKKVXMLRPKEDENSWFNLFVIHQNRSKHGSXNFIPEQFLDDFIDLVIWGHEHECKIAPXKNEQQLFYISQPGSSVVXSLSPGEAVKKHVGLLRIKGRKMNMHKIPLHXVRQFFMEDIVLANHPDIFNPDNPKVXQAIQSFCLEKIEEMLENAERERLGNSHQPEKPLVRLRVDYSGGFEPFSVLRFSQKFVDRVANPKDIIHFFRHREQKEKXGEEINFGKLIXKPSEGXXLRVEDLVKQYFQXAEKNVQLSLLXERGMGEAVQEFVDKEEKDAIEELVKYQLEKXQRFLKERHIDALEDKIDEEVRRFREXRQKNXNEEDDEVREAMXRARALRSQSEESASAFSADDLMSIDLAEQMANDSDDSISAAXNKGRGRGRGRRGGRGQNSASRGGSQRGRADXGLEXSXRSRNSKXAVSASRNMSIIDAFKSXRQQPSRNVXXKNYSEVIEVDESDVEEDIFPXXSKXDQRWSSXSSSKIMSQSQVSKGVDFESSEDDDDDPFMNXSSLRRNRR

SEQ ID NO: 16669 - protein, 221 aa, Homo sapiens
  MOD_RES (3)..(3): Selenocysteine
  MOD_RES (12)..(12): Selenocysteine
  MOD_RES (19)..(19): Selenocysteine
  MOD_RES (36)..(36): Selenocysteine
  MOD_RES (39)..(39): Selenocysteine
  MOD_RES (71)..(71): Selenocysteine
  MOD_RES (74)..(74): Selenocysteine
  MOD_RES (133)..(133): Selenocysteine
  MOD_RES (174)..(174): Selenocysteine
  MOD_RES (199)..(199): Selenocysteine
MSXADALDDENXFKILVAXDIHLGFMEKDAVRGNDXFVXLDEILRLAQENEVDFILLGGDLFHENKPSRKXLHXCLELLRKYCMGDRPVQFEILSDQSVNFGFSKFPWVNYQDGNLNISIPVFSIHGNHDDPXGADALCALDILSCAGFVNHFGRSMSVEKIDISPVLLQKGSXKIALYGLGSIPDERLYRMFVNKKVXMLRPKEDENSWFNLFVIHQNRV

SEQ ID NO: 16670 - protein, 321 aa, Homo sapiens
  MOD_RES (4)..(4): Selenocysteine
  MOD_RES (10)..(10): Selenocysteine
  MOD_RES (22)..(22): Selenocysteine
  MOD_RES (25)..(25): Selenocysteine
  MOD_RES (37)..(37): Selenocysteine
  MOD_RES (82)..(82): Selenocysteine
  MOD_RES (87)..(87): Selenocysteine
  MOD_RES (93)..(94): Selenocysteine
  MOD_RES (110)..(110): Selenocysteine
  MOD_RES (117)..(117): Selenocysteine
  MOD_RES (121)..(121): Selenocysteine
  MOD_RES (151)..(151): Selenocysteine
  MOD_RES (160)..(160): Selenocysteine
  MOD_RES (191)..(191): Selenocysteine
  MOD_RES (195)..(195): Selenocysteine
  MOD_RES (200)..(200): Selenocysteine
  MOD_RES (217)..(217): Selenocysteine
  MOD_RES (289)..(289): Selenocysteine
  MOD_RES (294)..(294): Selenocysteine
  MOD_RES (311)..(311): Selenocysteine
  MOD_RES (313)..(313): Selenocysteine
  MOD_RES (316)..(316): Selenocysteine
MNQXLNSSGXVESALNYSRGSXVHXAYLVLSSLAMFXCLCGMAGNSMVIWLLGFRMHRNPFCIYILNLAAADLLFLFSMASXLSLEXQPLVNXXDKVHELMKRLMYFAYXVGLSLLXAISXQRCLSVLFPIWFKCHRPRHLSAWVCGLLWXLCLLMNGLXSSFCSKFLKFNEDRCFRVDMVQAALIMGVLXPVMXLSSLXLFVWVRRSSQQWRRQPXRLFVVVLASVLVFLICSLPLSIYWFVLYWLSLPPEMQVLCFSLSRLSSSVSSSANPVIYFLVGSRRSHRLPXRSLGXVLQQALREEPELEGGEXPXVGXNEMGA

SEQ ID NO: 16671 - protein, 312 aa, Homo sapiens
  MOD_RES (31)..(31): Selenocysteine
  MOD_RES (97)..(97): Selenocysteine
  MOD_RES (101)..(101): Selenocysteine
  MOD_RES (140)..(141): Selenocysteine
  MOD_RES (147)..(147): Selenocysteine
  MOD_RES (163)..(163): Selenocysteine
  MOD_RES (176)..(176): Selenocysteine
  MOD_RES (191)..(191): Selenocysteine
  MOD_RES (222)..(222): Selenocysteine
  MOD_RES (302)..(302): Selenocysteine
MMEPREAGQHVGAANGAQEDVAFNLIILSLXEGLGLGGLLGNGAVLWLLSSNVYRNPFAIYLLDVACADLIFLGCHMVAIVPDLLQGRLDFPGFVQXSLAXLRFFCYIVGLSLLAAVSVEQCLAALFPAWYSCRRPRHLXXCVCALXWALCLLLHLLLSGACXQFFGEPSRHLCRXLWLVAAVLLALLCCXMCGASLMLLLRVERGPQRPPPRGFPGLILLXVLLFLFCGLPFGIYWLSRNLLWYIPHYFYHFSFLMAAVHCAAKPVVYFCLGSAQGRRLPLRLVLQRALGDEAELGAVREXSRRGLVDIAA

SEQ ID NO: 16672 - protein, 343 aa, Homo sapiens
  MOD_RES (34)..(34): Selenocysteine
  MOD_RES (104)..(104): Selenocysteine
  MOD_RES (110)..(110): Selenocysteine
  MOD_RES (129)..(129): Selenocysteine
  MOD_RES (175)..(175): Selenocysteine
  MOD_RES (276)..(276): Selenocysteine
  MOD_RES (327)..(327): Selenocysteine
  MOD_RES (330)..(330): Selenocysteine
  MOD_RES (332)..(332): Selenocysteine
MAGNCSWEAHPGNRNKMCPGLSEAPELYSRGFLXIEQIAMLPPPAVMNYIFLLLCLCGLVGNGLVLWFFGFSIKRNPFSIYFLHLASADVGYLFSKAVFSILNXGGFLGXFADYIRSVCRVLGLCMFLXGVSLLPAVSAERCASVIFPAWYWRRRPKRLSAVVCALLWVLSLLVXCLHNYFCVFLGRGAPGAACRHMDIFLGILLFLLCCPLMVLPCLALILHVECRARRRQRSAKLNHVILAMVSVFLVSSIYLGIDWFLFWVFQIPAPFPEYVXDLCICINSSAKPIVYFLAGRDKSQRLWEPLRVVFQRALRDGAELGEAGGSXPNXVXMEMQCPPGNAS

SEQ ID NO: 16673 - protein, 104 aa, Homo sapiens
  MOD_RES (20)..(20): Selenocysteine
  MOD_RES (37)..(37): Selenocysteine
  MOD_RES (58)..(58): Selenocysteine
  MOD_RES (71)..(71): Selenocysteine
  MOD_RES (78)..(78): Selenocysteine
  MOD_RES (100)..(100): Selenocysteine
MAGNCSWEAHPGNRNKVSAXGGGPWSCPDGCGWEGQXQPSISSPIPPFLAPLSSSGPXVGSGLLWAMWPGXSSLDPPXLLSSSVRQAPGLDLKVPRCADXVVAL

SEQ ID NO: 16674 - protein, 289 aa, Homo sapiens
  MOD_RES (10)..(10): Selenocysteine
  MOD_RES (19)..(19): Selenocysteine
  MOD_RES (79)..(79): Selenocysteine
  MOD_RES (85)..(85): Selenocysteine
  MOD_RES (131)..(131): Selenocysteine
  MOD_RES (133)..(133): Selenocysteine
  MOD_RES (165)..(165): Selenocysteine
  MOD_RES (176)..(176): Selenocysteine
  MOD_RES (186)..(186): Selenocysteine
  MOD_RES (190)..(190): Selenocysteine
  MOD_RES (236)..(236): Selenocysteine
MFGLFGLWRXFDSVVFYLXLIVGLGGPVGNGLVLWNLGFRIKKGPFSIYLLHLAAADFLFLSCRVGFSVAQAALGAQDXLYFVLXFLWFAVGLWLLAAFSVERCLSDLFPACYQGCRPRHASAVLCALVWXPXLPAVPLPANACGLLRNSACPLVCPRYHVASVXWFLVLARVAWXAGVVLFVWVXCCSXRPRPRLYGIVLGALLLLFFCGLPSVFYWSLQPLLNFLLPVFSPLAXLLACVNSSSKPLIYSGLGRQPGKREPLRSVLRRALGEGAELGARGQSLPMGLL

SEQ ID NO: 16675 - protein, 322 aa, Homo sapiens
  MOD_RES (4)..(4): Selenocysteine
  MOD_RES (7)..(7): Selenocysteine
  MOD_RES (10)..(10): Selenocysteine
  MOD_RES (13)..(13): Selenocysteine
  MOD_RES (18)..(18): Selenocysteine
  MOD_RES (21)..(21): Selenocysteine
  MOD_RES (27)..(27): Selenocysteine
  MOD_RES (31)..(31): Selenocysteine
  MOD_RES (34)..(34): Selenocysteine
  MOD_RES (43)..(43): Selenocysteine
  MOD_RES (93)..(93): Selenocysteine
  MOD_RES (118)..(118): Selenocysteine
  MOD_RES (136)..(136): Selenocysteine
  MOD_RES (175)..(175): Selenocysteine
  MOD_RES (180)..(180): Selenocysteine
  MOD_RES (212)..(212): Selenocysteine
  MOD_RES (217)..(217): Selenocysteine
  MOD_RES (221)..(221): Selenocysteine
MDPXISXLDXELXPINGXEEXLCYKQXLSLXVLXCIVSLVGLXGNAVVLWLLGCRMRRNAFSIYILNLAAADFLFLSGRLIYSLLSFISIPHXISKILYPVMMFSYFAGLSFLSAVSXERCLSVLWPIWYRCHRPXHLSAVVCVLLWALSLLRSILEWMLCGFLFSGADSAWCQXSDFIXVAWLIFLCVVLCGSSLVLLIRILCGSRKIPLXRLYVXILLXVLVFLLCGLPFGIQFFLFLWIHVDREVLFCHVHLVSIFLSALNSSANPIIYFFVGSFRQRQNRQNLKLVLQRALQDASEVDEGGGQLPEEILELSGSRLEQ

SEQ ID NO: 16676 - protein, 330 aa, Homo sapiens
  MOD_RES (4)..(5): Selenocysteine
  MOD_RES (10)..(10): Selenocysteine
  MOD_RES (13)..(14): Selenocysteine
  MOD_RES (30)..(30): Selenocysteine
  MOD_RES (106)..(107): Selenocysteine
  MOD_RES (110)..(110): Selenocysteine
  MOD_RES (122)..(122): Selenocysteine
  MOD_RES (125)..(125): Selenocysteine
  MOD_RES (182)..(182): Selenocysteine
  MOD_RES (187)..(187): Selenocysteine
  MOD_RES (219)..(219): Selenocysteine
  MOD_RES (224)..(224): Selenocysteine
  MOD_RES (228)..(228): Selenocysteine
  MOD_RES (321)..(321): Selenocysteine
MDPXXPAWGXESXXVNGNDQALLLLCGKEXLIPVFLILFIALVGLVGNGFVLWLLGFRMRRNAFSVYVLSLAGADFLFLCFQIINCLVYLSNFFCSISINFPSFFXXVMXCAYLAGLSMLSXVSXERCLSVLWPIWYRCRRPRHLSAVVCVLLWALSLLLSILEGKFCGFLFSDGDSGWCQXFDFIXAAWLIFLFMVLCGSSLALLVRILCGSRGLPLXRLYLXILLXVLVFLLCGLPFGIQWFLILWIWKDSDVLFCHIHPVSVVLSSLNSSANPIIYFFVGSFRKQWRLQQPILKLALQRALQDIAEVDHSEGCFRQGXPEMSRSSLV

SEQ ID NO: 16677 - protein, 246 aa, Homo sapiens
  MOD_RES (4)..(4): Selenocysteine
  MOD_RES (10)..(10): Selenocysteine
  MOD_RES (13)..(13): Selenocysteine
  MOD_RES (21)..(21): Selenocysteine
  MOD_RES (27)..(27): Selenocysteine
  MOD_RES (31)..(31): Selenocysteine
  MOD_RES (34)..(34): Selenocysteine
  MOD_RES (43)..(43): Selenocysteine
  MOD_RES (103)..(103): Selenocysteine
  MOD_RES (118)..(118): Selenocysteine
  MOD_RES (175)..(175): Selenocysteine
  MOD_RES (180)..(180): Selenocysteine
  MOD_RES (212)..(212): Selenocysteine
  MOD_RES (217)..(217): Selenocysteine
  MOD_RES (221)..(221): Selenocysteine
MDSXIPVLGXELXPINGREEXPCYKQXLSFXGLXCIVSLVALXGNAVVLWLLGCRMRRNAVSIYILNLVAADFLFLSGHIICSPLRLINIRHPISKILSPVMXFPYFIGLSMLSAISXERCLSILWPIWYHCRRPRYLSSVMCVLLWALSLLRSILEWMFCDFLFSGANSVWCEXSDFIXIAWLVFLCVVLCGSSLVLLVRILCGSRKMPLXRLYVXILLXVLVFLLCGLPFGIQWALFSRIHLDW

SEQ ID NO: 16678 - protein, 322 aa, Homo sapiens
  MOD_RES (4)..(4): Selenocysteine
  MOD_RES (10)..(10): Selenocysteine
  MOD_RES (13)..(13): Selenocysteine
  MOD_RES (21)..(21): Selenocysteine
  MOD_RES (27)..(27): Selenocysteine
  MOD_RES (31)..(31): Selenocysteine
  MOD_RES (34)..(34): Selenocysteine
  MOD_RES (43)..(43): Selenocysteine
  MOD_RES (103)..(103): Selenocysteine
  MOD_RES (118)..(118): Selenocysteine
  MOD_RES (175)..(175): Selenocysteine
  MOD_RES (180)..(180): Selenocysteine
  MOD_RES (212)..(212): Selenocysteine
  MOD_RES (217)..(217): Selenocysteine
  MOD_RES (221)..(221): Selenocysteine
  MOD_RES (298)..(298): Selenocysteine
  MOD_RES (312)..(312): Selenocysteine
MDSXIPVLGXELXPINGREEXPCYKQXLSFXGLXCIVSLVALXGNAVVLWLLGCRMRRNAVSIYILNLVAADFLFLSGHIICSPLRLINIRHPISKILSPVMXFPYFIGLSMLSAISXERCLSILWPIWYHCRRPRYLSSVMCVLLWALSLLRSILEWMFCDFLFSGANSVWCEXSDFIXIAWLVFLCVVLCGSSLVLLVRILCGSRKMPLXRLYVXILLXVLVFLLCGLPFGIQWALFSRIHLDWKVLFCHVHLVSIFLSALNSSANPIIYFFVGSFRQRQNRQNLKLVLQRALQDXPEVDEGGGWLPQEXLELSGSRLEQ

SEQ ID NO: 16679 - protein, 322 aa, Homo sapiens
  MOD_RES (4)..(4): Selenocysteine
  MOD_RES (10)..(10): Selenocysteine
  MOD_RES (13)..(13): Selenocysteine
  MOD_RES (21)..(21): Selenocysteine
  MOD_RES (27)..(27): Selenocysteine
  MOD_RES (31)..(31): Selenocysteine
  MOD_RES (34)..(34): Selenocysteine
  MOD_RES (43)..(43): Selenocysteine
  MOD_RES (103)..(103): Selenocysteine
  MOD_RES (108)..(108): Selenocysteine
  MOD_RES (118)..(118): Selenocysteine
  MOD_RES (136)..(136): Selenocysteine
  MOD_RES (175)..(175): Selenocysteine
  MOD_RES (212)..(212): Selenocysteine
  MOD_RES (217)..(217): Selenocysteine
  MOD_RES (221)..(221): Selenocysteine
  MOD_RES (298)..(298): Selenocysteine
  MOD_RES (312)..(312): Selenocysteine
MDPXVPVFGXKLXPINGREEXPCYNQXLSFXVLXCIISLVGLXGNAVVLWLLGYRMRRNAVSIYILNLAAADFLFLSFQIIRLPLRLINISHLIRKILVSVMXFPYFXGLSMLSAISXERCLSVLWPIWYRCRRPXHLSAVVCVLLWGLSLLFSMLEWRFCDFLFSGADSSWCEXSDFIPVAWLIFLCVVLCVSSLVLLVRILCGSRKMPLXRLYVXILLXVLVFLLCGLPFGILGALIYRMHLNLEVLYCHVQPVSDVLSSLNSSANPIIYFFMGSFRQRQNWQNLKLVLQKALQDXPEVDEGGGRLPQEXLEMSGSRLEQ

SEQ ID NO: 16680 - protein, 322 aa, Homo sapiens
  MOD_RES (4)..(4): Selenocysteine
  MOD_RES (10)..(10): Selenocysteine
  MOD_RES (13)..(13): Selenocysteine
  MOD_RES (21)..(21): Selenocysteine
  MOD_RES (27)..(27): Selenocysteine
  MOD_RES (31)..(31): Selenocysteine
  MOD_RES (34)..(34): Selenocysteine
  MOD_RES (43)..(43): Selenocysteine
  MOD_RES (103)..(103): Selenocysteine
  MOD_RES (108)..(108): Selenocysteine
  MOD_RES (118)..(118): Selenocysteine
  MOD_RES (136)..(136): Selenocysteine
  MOD_RES (175)..(175): Selenocysteine
  MOD_RES (212)..(212): Selenocysteine
  MOD_RES (217)..(217): Selenocysteine
  MOD_RES (221)..(221): Selenocysteine
MDPXVPVFGXKLXPINGREEXPCYNQXLSFXVLXCIISLVGLXGNAVVLWLLGYRMRRNAVSIYILNLAAADFLFLSFQIIRLPLRLINISHLIRKILVSVMXFPYFXGLSMLSAISXERCLSVLWPIWYRCRRPXHLSAVVCVLLWGLSLLFSMLEWRFCDFLFSGADSSWCEXSDFIPVAWLIFLCVVLCVSSLVLLVRILCGSRKMPLXRLYVXILLXVLVFLLCGLPFGILGALIYRMHLNLEVLYCHVYLVCMSLSSLNSSANPIIYFFVGSFRQRQNRQNLKLVLQRALQDKPEVDKGEGQLPEESLELSGSRLGP

SEQ ID NO: 16681 - protein, 194 aa, Homo sapiens
  MOD_RES (37)..(37): Selenocysteine
  MOD_RES (39)..(39): Selenocysteine
  MOD_RES (124)..(124): Selenocysteine
  MOD_RES (126)..(126): Selenocysteine
  MOD_RES (128)..(128): Selenocysteine
  MOD_RES (131)..(131): Selenocysteine
  MOD_RES (148)..(148): Selenocysteine
MPLHKYPVWLWKRLQLREGICSRLPGHYLRSLEEERXPXPVHYRPHGAKFKINPKNGQRERVEDVPIPIYFPPESQRGLWGGEGWILGQIYANNDKLSKRLKKVWKPQLFEREFYSEILDKKFXVXVXMRXLDLIDEAYGLDFYILKXPKEDLCSKFGMDLKRGMLLRLARQDPQLHPEDPERRAAIYDKYKEF

SEQ ID NO: 16682 - protein, 218 aa, Homo sapiens
  MOD_RES (37)..(37): Selenocysteine
  MOD_RES (39)..(39): Selenocysteine
  MOD_RES (124)..(124): Selenocysteine
  MOD_RES (126)..(126): Selenocysteine
  MOD_RES (128)..(128): Selenocysteine
  MOD_RES (131)..(131): Selenocysteine
  MOD_RES (148)..(148): Selenocysteine
  MOD_RES (207)..(207): Selenocysteine
MPLHKYPVWLWKRLQLREGICSRLPGHYLRSLEEERXPXPVHYRPHGAKFKINPKNGQRERVEDVPIPIYFPPESQRGLWGGEGWILGQIYANNDKLSKRLKKVWKPQLFEREFYSEILDKKFXVXVXMRXLDLIDEAYGLDFYILKXPKEDLCSKFGMDLKRGMLLRLARQDPQLHPEDPERRAAIYDKYKEFAIPEEEAEWVGLXLEEAIEKQRLL

SEQ ID NO: 16683 - protein, 240 aa, Homo sapiens
  MOD_RES (37)..(37): Selenocysteine
  MOD_RES (39)..(39): Selenocysteine
  MOD_RES (124)..(124): Selenocysteine
  MOD_RES (126)..(126): Selenocysteine
  MOD_RES (128)..(128): Selenocysteine
  MOD_RES (131)..(131): Selenocysteine
  MOD_RES (148)..(148): Selenocysteine
  MOD_RES (207)..(207): Selenocysteine
MPLHKYPVWLWKRLQLREGICSRLPGHYLRSLEEERXPXPVHYRPHGAKFKINPKNGQRERVEDVPIPIYFPPESQRGLWGGEGWILGQIYANNDKLSKRLKKVWKPQLFEREFYSEILDKKFXVXVXMRXLDLIDEAYGLDFYILKXPKEDLCSKFGMDLKRGMLLRLARQDPQLHPEDPERRAAIYDKYKEFAIPEEEAEWVGLXLEEAIEKQRLLEEKDPVPLFKIYVAELIQQLQQ

SEQ ID NO: 16684 - protein, 256 aa, Homo sapiens
  MOD_RES (37)..(37): Selenocysteine
  MOD_RES (39)..(39): Selenocysteine
  MOD_RES (124)..(124): Selenocysteine
  MOD_RES (126)..(126): Selenocysteine
  MOD_RES (128)..(128): Selenocysteine
  MOD_RES (131)..(131): Selenocysteine
  MOD_RES (148)..(148): Selenocysteine
  MOD_RES (207)..(207): Selenocysteine
MPLHKYPVWLWKRLQLREGICSRLPGHYLRSLEEERXPXPVHYRPHGAKFKINPKNGQRERVEDVPIPIYFPPESQRGLWGGEGWILGQIYANNDKLSKRLKKVWKPQLFEREFYSEILDKKFXVXVXMRXLDLIDEAYGLDFYILKXPKEDLCSKFGMDLKRGMLLRLARQDPQLHPEDPERRAAIYDKYKEFAIPEEEAEWVGLXLEEAIEKQRLLEEKDPVPLFKIYVAELIQQLQQQALSEPAVVQKRASGQ

SEQ ID NO: 16685 - protein, 48 aa, Homo sapiens
MSRAGGRGEQSRWGRRAELRGLGRPEAPLRLGPDVCGSVPCARGAGSE

SEQ ID NO: 16686 - protein, 41 aa, Homo sapiens
  MOD_RES (3)..(3): Selenocysteine
MDXESNRRANLALPQEPSSVPAFEVLEISPQEVSSGRLLKS

SEQ ID NO: 16687 - protein, 199 aa, Homo sapiens
  MOD_RES (3)..(3): Selenocysteine
  MOD_RES (49)..(49): Selenocysteine
  MOD_RES (52)..(52): Selenocysteine
  MOD_RES (79)..(79): Selenocysteine
  MOD_RES (90)..(90): Selenocysteine
  MOD_RES (98)..(98): Selenocysteine
  MOD_RES (101)..(101): Selenocysteine
  MOD_RES (125)..(125): Selenocysteine
  MOD_RES (134)..(134): Selenocysteine
  MOD_RES (144)..(144): Selenocysteine
  MOD_RES (155)..(155): Selenocysteine
  MOD_RES (183)..(183): Selenocysteine
MDXESNRRANLALPQEPSSVPAFEVLEISPQEVSSGRLLKSASSPPLHXWLXVLKKEQEFLGFSISGMLSIISERRNAXYLVRGSLGANXASSIAGGXGIXILIINLKKSLAYIHIHSCQKFFEXKCFMASFSXEIVVMMLFLXILGLGSAVSLXICGAGEELKGNKVPEDRVYEELNIYSAXYSELEDPGEMSPPIDL

SEQ ID NO: 16688 - protein, 244 aa, Homo sapiens
  MOD_RES (3)..(3): Selenocysteine
  MOD_RES (49)..(49): Selenocysteine
  MOD_RES (52)..(52): Selenocysteine
  MOD_RES (64)..(64): Selenocysteine
  MOD_RES (68)..(68): Selenocysteine
  MOD_RES (77)..(77): Selenocysteine
  MOD_RES (124)..(124): Selenocysteine
  MOD_RES (135)..(135): Selenocysteine
  MOD_RES (143)..(143): Selenocysteine
  MOD_RES (146)..(146): Selenocysteine
  MOD_RES (170)..(170): Selenocysteine
  MOD_RES (179)..(179): Selenocysteine
  MOD_RES (189)..(189): Selenocysteine
  MOD_RES (200)..(200): Selenocysteine
  MOD_RES (228)..(228): Selenocysteine
MDXESNRRANLALPQEPSSVPAFEVLEISPQEVSSGRLLKSASSPPLHXWLXVLKKEQEFLGVXQILXAMICLCFGXVVCSVLDISHIEGDIFSSFKAGYPFWGAIFFSISGMLSIISERRNAXYLVRGSLGANXASSIAGGXGIXILIINLKKSLAYIHIHSCQKFFEXKCFMASFSXEIVVMMLFLXILGLGSAVSLXICGAGEELKGNKVPEDRVYEELNIYSAXYSELEDPGEMSPPIDL

SEQ ID NO: 16689 - protein, 206 aa, Homo sapiens
  MOD_RES (3)..(3): Selenocysteine
  MOD_RES (63)..(63): Selenocysteine
  MOD_RES (132)..(132): Selenocysteine
  MOD_RES (141)..(141): Selenocysteine
  MOD_RES (148)..(148): Selenocysteine
  MOD_RES (179)..(179): Selenocysteine
  MOD_RES (192)..(192): Selenocysteine
  MOD_RES (204)..(205): Selenocysteine
MSXGSVSDPEEMELRGLQREYPVPASKRPPLRGVERSYASPSDNSSAEEEDPDGEEERCALGXAGSAEGCKRKRPRVAGGGGAGGSAGGGGKKPLPAKGSAAECKQSQRNAANARERARMRVLSKAFSRLKXSLPWVPPDXKLSKLDXLRLASSYIAHLRQLLQEDRYENGYVHPVNLXWPFVVSGRPDSDXKEVSAANRLCGXXA

SEQ ID NO: 16690 - protein, 193 aa, Homo sapiens
  MOD_RES (7)..(7): Selenocysteine
  MOD_RES (103)..(103): Selenocysteine
  MOD_RES (117)..(117): Selenocysteine
  MOD_RES (139)..(139): Selenocysteine
  MOD_RES (146)..(146): Selenocysteine
  MOD_RES (163)..(163): Selenocysteine
  MOD_RES (167)..(167): Selenocysteine
  MOD_RES (171)..(171): Selenocysteine
  MOD_RES (179)..(179): Selenocysteine
MDNLREXFLSLEDGLGSSDSPGLLSSWDWKDRAGPFELNQASPSQSLSPAPSLESYSSSPCPAVAGLPCEHGGASSGGSEGCSVGGASGLVEVDYNMLAFQPXHLQGGGGPKAQKGXKVRMSVQRRRKASEREKLRMRXLADALHXLRNYLPPVYSQRGQPLXKIQXLKYXIKYIGELXDLLNRGREPRAQSA

SEQ ID NO: 16691 - protein, 921 aa, Homo sapiens
  MOD_RES (8)..(8): Selenocysteine
  MOD_RES (31)..(33): Selenocysteine
  MOD_RES (44)..(44): Selenocysteine
  MOD_RES (60)..(60): Selenocysteine
  MOD_RES (206)..(206): Selenocysteine
  MOD_RES (225)..(225): Selenocysteine
  MOD_RES (234)..(234): Selenocysteine
  MOD_RES (292)..(293): Selenocysteine
  MOD_RES (320)..(321): Selenocysteine
  MOD_RES (335)..(335): Selenocysteine
  MOD_RES (375)..(375): Selenocysteine
  MOD_RES (438)..(438): Selenocysteine
  MOD_RES (441)..(441): Selenocysteine
  MOD_RES (456)..(457): Selenocysteine
  MOD_RES (495)..(495): Selenocysteine
  MOD_RES (526)..(526): Selenocysteine
  MOD_RES (541)..(541): Selenocysteine
  MOD_RES (552)..(552): Selenocysteine
  MOD_RES (557)..(557): Selenocysteine
  MOD_RES (564)..(564): Selenocysteine
  MOD_RES (568)..(568): Selenocysteine
  MOD_RES (594)..(594): Selenocysteine
  MOD_RES (668)..(668): Selenocysteine
  MOD_RES (677)..(677): Selenocysteine
  MOD_RES (682)..(682): Selenocysteine
  MOD_RES (724)..(724): Selenocysteine
  MOD_RES (732)..(732): Selenocysteine
  MOD_RES (740)..(740): Selenocysteine
  MOD_RES (754)..(754): Selenocysteine
  MOD_RES (756)..(756): Selenocysteine
  MOD_RES (772)..(772): Selenocysteine
  MOD_RES (782)..(782): Selenocysteine
  MOD_RES (788)..(788): Selenocysteine
  MOD_RES (796)..(796): Selenocysteine
  MOD_RES (803)..(803): Selenocysteine
  MOD_RES (806)..(807): Selenocysteine
  MOD_RES (810)..(810): Selenocysteine
  MOD_RES (812)..(812): Selenocysteine
  MOD_RES (883)..(883): Selenocysteine
  MOD_RES (894)..(894): Selenocysteine
MAVQPKEXLQLESAAEVGFVRFFQGMPEKPXXXVRLFDRGDFYXAHGEDALLAAREVFKXQGVIKYMGPAGAKNLQSVVLSKMNFESFVKDLLLVRQYRVEVYKNRAGNKASKENDWYLAYKASPGNLSQFEDILFGNNDMSASIGVVGVKMSAVDGQRQVGVGYVDSIQRKLGLCEFPDNDQFSNLEALLIQIGPKECVLPGGEXAGDMGKLRQIIQRGGILIXERKKADFSXKDIYQDLNRLLKGKKGEQMNSAVLPEMENQVAVSSLSAVIKFLELLSDDSNFGQFELXXFDFSQYMKLDIAAVRALNLFQGSVEDXXGSQSLAALLNKCKXPQGQRLVNQWIKQPLMDKNRIEERLNLVEAFVEDAELRQXLQEDLLRRFPDLNRLAKKFQRQAANLQDCYRLYQGINQLPNVIQALEKHEGKHQKLLLAVFVXPLXDLRSDFSKFQEMIEXXLDMDQVENHEFLVKPSFDPNLSELREIMNDLEKKMQSXLISAARDLGLDPGKQIKLDSSAQFGYYFRVXCKEEKVLRNNKNFSXVDIQKNGVKFXNSKLXSLNEEYXKNKXEYEEAQDAIVKEIVNISSGYVEPMQXLNDVLAQLDAVVSFAHVSNGAPVPYVRPAILEKGQGRIILKASRHACVEVQDEIAFIPNDVYFEKDKQMFHIIXGPNMGGKSXYIRQXGVIVLMAQIGCFVPCESAEVSIVDCILARVGAGDSQLKGVSXFMAEMLEXASILRSAXKDSLIIIDELGRGXSXYDGFGLAWAISEYIAXKIGAFCMFAXHFHELXALANQIPXVNNLHVXALXXEEXLXMLYQVKKGVCDQSFGIHVAELANFPKHVIECAKQKALELEEFQYIGESQGYDIMEPAAKKCYLERENLRVXEPKDQCLILLXWKRKLRGGKRSACSRPERQNQGSGELS

SEQ ID NO: 16692 - protein, 934 aa, Homo sapiens
  MOD_RES (8)..(8): Selenocysteine
  MOD_RES (31)..(33): Selenocysteine
  MOD_RES (44)..(44): Selenocysteine
  MOD_RES (60)..(60): Selenocysteine
  MOD_RES (206)..(206): Selenocysteine
  MOD_RES (225)..(225): Selenocysteine
  MOD_RES (234)..(234): Selenocysteine
  MOD_RES (292)..(293): Selenocysteine
  MOD_RES (320)..(321): Selenocysteine
  MOD_RES (335)..(335): Selenocysteine
  MOD_RES (375)..(375): Selenocysteine
  MOD_RES (438)..(438): Selenocysteine
  MOD_RES (441)..(441): Selenocysteine
  MOD_RES (456)..(457): Selenocysteine
  MOD_RES (495)..(495): Selenocysteine
  MOD_RES (526)..(526): Selenocysteine
  MOD_RES (541)..(541): Selenocysteine
  MOD_RES (552)..(552): Selenocysteine
  MOD_RES (557)..(557): Selenocysteine
  MOD_RES (564)..(564): Selenocysteine
  MOD_RES (568)..(568): Selenocysteine
  MOD_RES (594)..(594): Selenocysteine
  MOD_RES (668)..(668): Selenocysteine
  MOD_RES (677)..(677): Selenocysteine
  MOD_RES (682)..(682): Selenocysteine
  MOD_RES (724)..(724): Selenocysteine
  MOD_RES (732)..(732): Selenocysteine
  MOD_RES (740)..(740): Selenocysteine
  MOD_RES (754)..(754): Selenocysteine
  MOD_RES (756)..(756): Selenocysteine
  MOD_RES (772)..(772): Selenocysteine
  MOD_RES (782)..(782): Selenocysteine
  MOD_RES (788)..(788): Selenocysteine
  MOD_RES (796)..(796): Selenocysteine
  MOD_RES (803)..(803): Selenocysteine
  MOD_RES (806)..(807): Selenocysteine
  MOD_RES (810)..(810): Selenocysteine
  MOD_RES (812)..(812): Selenocysteine
  MOD_RES (897)..(897): Selenocysteine
  MOD_RES (905)..(905): Selenocysteine
  MOD_RES (933)..(934): Selenocysteine
MAVQPKEXLQLESAAEVGFVRFFQGMPEKPXXXVRLFDRGDFYXAHGEDALLAAREVFKXQGVIKYMGPAGAKNLQSVVLSKMNFESFVKDLLLVRQYRVEVYKNRAGNKASKENDWYLAYKASPGNLSQFEDILFGNNDMSASIGVVGVKMSAVDGQRQVGVGYVDSIQRKLGLCEFPDNDQFSNLEALLIQIGPKECVLPGGEXAGDMGKLRQIIQRGGILIXERKKADFSXKDIYQDLNRLLKGKKGEQMNSAVLPEMENQVAVSSLSAVIKFLELLSDDSNFGQFELXXFDFSQYMKLDIAAVRALNLFQGSVEDXXGSQSLAALLNKCKXPQGQRLVNQWIKQPLMDKNRIEERLNLVEAFVEDAELRQXLQEDLLRRFPDLNRLAKKFQRQAANLQDCYRLYQGINQLPNVIQALEKHEGKHQKLLLAVFVXPLXDLRSDFSKFQEMIEXXLDMDQVENHEFLVKPSFDPNLSELREIMNDLEKKMQSXLISAARDLGLDPGKQIKLDSSAQFGYYFRVXCKEEKVLRNNKNFSXVDIQKNGVKFXNSKLXSLNEEYXKNKXEYEEAQDAIVKEIVNISSGYVEPMQXLNDVLAQLDAVVSFAHVSNGAPVPYVRPAILEKGQGRIILKASRHACVEVQDEIAFIPNDVYFEKDKQMFHIIXGPNMGGKSXYIRQXGVIVLMAQIGCFVPCESAEVSIVDCILARVGAGDSQLKGVSXFMAEMLEXASILRSAXKDSLIIIDELGRGXSXYDGFGLAWAISEYIAXKIGAFCMFAXHFHELXALANQIPXVNNLHVXALXXEEXLXMLYQVKKGVCDQSFGIHVAELANFPKHVIECAKQKALELEEFQYIGESQGYDIMEPAAKKCYLEREQGEKIIQEFLSKVKQMPFXEMSEENIXIKLKQLKAEVIAKNNSFVNEIISRIKVXX

SEQ ID NO: 16693 - protein, 140 aa, Homo sapiens
  MOD_RES (140)..(140): Selenocysteine
MGPAGAKNLQSVVLSKMNFESFVKDLLLVRQYRVEVYKNRAGNKASKENDWYLAYKASPGNLSQFEDILFGNNDMSASIGVVGVKMSAVDGQRQVGVGYVDSIQRKLGLCEFPDNDQFSNLEALLIQIGPKECVLPGGEX

SEQ ID NO: 16694 - protein, 868 aa, Homo sapiens
  MOD_RES (140)..(140): Selenocysteine
  MOD_RES (159)..(159): Selenocysteine
  MOD_RES (168)..(168): Selenocysteine
  MOD_RES (226)..(227): Selenocysteine
  MOD_RES (254)..(255): Selenocysteine
  MOD_RES (269)..(269): Selenocysteine
  MOD_RES (309)..(309): Selenocysteine
  MOD_RES (372)..(372): Selenocysteine
  MOD_RES (375)..(375): Selenocysteine
  MOD_RES (390)..(391): Selenocysteine
  MOD_RES (429)..(429): Selenocysteine
  MOD_RES (460)..(460): Selenocysteine
  MOD_RES (475)..(475): Selenocysteine
  MOD_RES (486)..(486): Selenocysteine
  MOD_RES (491)..(491): Selenocysteine
  MOD_RES (498)..(498): Selenocysteine
  MOD_RES (502)..(502): Selenocysteine
  MOD_RES (528)..(528): Selenocysteine
  MOD_RES (602)..(602): Selenocysteine
  MOD_RES (611)..(611): Selenocysteine
  MOD_RES (616)..(616): Selenocysteine
  MOD_RES (658)..(658): Selenocysteine
  MOD_RES (666)..(666): Selenocysteine
  MOD_RES (674)..(674): Selenocysteine
  MOD_RES (688)..(688): Selenocysteine
  MOD_RES (690)..(690): Selenocysteine
  MOD_RES (706)..(706): Selenocysteine
  MOD_RES (716)..(716): Selenocysteine
  MOD_RES (722)..(722): Selenocysteine
  MOD_RES (730)..(730): Selenocysteine
  MOD_RES (737)..(737): Selenocysteine
  MOD_RES (740)..(741): Selenocysteine
  MOD_RES (744)..(744): Selenocysteine
  MOD_RES (746)..(746): Selenocysteine
  MOD_RES (831)..(831): Selenocysteine
  MOD_RES (839)..(839): Selenocysteine
  MOD_RES (867)..(868): Selenocysteine
MGPAGAKNLQSVVLSKMNFESFVKDLLLVRQYRVEVYKNRAGNKASKENDWYLAYKASPGNLSQFEDILFGNNDMSASIGVVGVKMSAVDGQRQVGVGYVDSIQRKLGLCEFPDNDQFSNLEALLIQIGPKECVLPGGEXAGDMGKLRQIIQRGGILIXERKKADFSXKDIYQDLNRLLKGKKGEQMNSAVLPEMENQVAVSSLSAVIKFLELLSDDSNFGQFELXXFDFSQYMKLDIAAVRALNLFQGSVEDXXGSQSLAALLNKCKXPQGQRLVNQWIKQPLMDKNRIEERLNLVEAFVEDAELRQXLQEDLLRRFPDLNRLAKKFQRQAANLQDCYRLYQGINQLPNVIQALEKHEGKHQKLLLAVFVXPLXDLRSDFSKFQEMIEXXLDMDQVENHEFLVKPSFDPNLSELREIMNDLEKKMQSXLISAARDLGLDPGKQIKLDSSAQFGYYFRVXCKEEKVLRNNKNFSXVDIQKNGVKFXNSKLXSLNEEYXKNKXEYEEAQDAIVKEIVNISSGYVEPMQXLNDVLAQLDAVVSFAHVSNGAPVPYVRPAILEKGQGRIILKASRHACVEVQDEIAFIPNDVYFEKDKQMFHIIXGPNMGGKSXYIRQXGVIVLMAQIGCFVPCESAEVSIVDCILARVGAGDSQLKGVSXFMAEMLEXASILRSAXKDSLIIIDELGRGXSXYDGFGLAWAISEYIAXKIGAFCMFAXHFHELXALANQIPXVNNLHVXALXXEEXLXMLYQVKKGVCDQSFGIHVAELANFPKHVIECAKQKALELEEFQYIGESQGYDIMEPAAKKCYLEREQGEKIIQEFLSKVKQMPFXEMSEENIXIKLKQLKAEVIAKNNSFVNEIISRIKVXX

SEQ ID NO: 16695 - protein, 51 aa, Homo sapiens
  MOD_RES (19)..(19): Selenocysteine
  MOD_RES (40)..(40): Selenocysteine
MEGYPWWPCLVYNHPFDGXFIREKGKSVRVHVQFFDDSPXRGWVSKRLLKP

SEQ ID NO: 16696 - protein, 101 aa, Homo sapiens
  MOD_RES (19)..(19): Selenocysteine
  MOD_RES (40)..(40): Selenocysteine
  MOD_RES (53)..(53): Selenocysteine
MEGYPWWPCLVYNHPFDGXFIREKGKSVRVHVQFFDDSPXRGWVSKRLLKPYXGSKSKEAQKGGHFYSAKPEILRAMQRADEALNKDKIKRLELAVCDEPS

SEQ ID NO: 16697 - protein, 116 aa, Homo sapiens
  MOD_RES (19)..(19): Selenocysteine
  MOD_RES (40)..(40): Selenocysteine
  MOD_RES (53)..(53): Selenocysteine
  MOD_RES (113)..(114): Selenocysteine
MEGYPWWPCLVYNHPFDGXFIREKGKSVRVHVQFFDDSPXRGWVSKRLLKPYXGSKSKEAQKGGHFYSAKPEILRAMQRADEALNKDKIKRLELAVCDEPSEPEEEEEMEVGXXYV

SEQ ID NO: 16698 - protein, 151 aa, Homo sapiens
  MOD_RES (19)..(19): Selenocysteine
  MOD_RES (40)..(40): Selenocysteine
  MOD_RES (53)..(53): Selenocysteine
  MOD_RES (113)..(114): Selenocysteine
  MOD_RES (117)..(117): Selenocysteine
  MOD_RES (136)..(136): Selenocysteine
MEGYPWWPCLVYNHPFDGXFIREKGKSVRVHVQFFDDSPXRGWVSKRLLKPYXGSKSKEAQKGGHFYSAKPEILRAMQRADEALNKDKIKRLELAVCDEPSEPEEEEEMEVGXXYVXDKSEEDNEIESEEEVQPKXQGSRRSSRQIKKRRV

SEQ ID NO: 16699 - protein, 327 aa, Homo sapiens
  MOD_RES (53)..(53): Selenocysteine
  MOD_RES (68)..(68): Selenocysteine
  MOD_RES (70)..(70): Selenocysteine
  MOD_RES (136)..(136): Selenocysteine
  MOD_RES (143)..(143): Selenocysteine
  MOD_RES (157)..(157): Selenocysteine
  MOD_RES (165)..(165): Selenocysteine
  MOD_RES (173)..(173): Selenocysteine
  MOD_RES (187)..(187): Selenocysteine
  MOD_RES (189)..(189): Selenocysteine
  MOD_RES (193)..(193): Selenocysteine
  MOD_RES (206)..(206): Selenocysteine
  MOD_RES (211)..(211): Selenocysteine
  MOD_RES (215)..(215): Selenocysteine
  MOD_RES (249)..(249): Selenocysteine
  MOD_RES (251)..(251): Selenocysteine
  MOD_RES (311)..(311): Selenocysteine
  MOD_RES (322)..(322): Selenocysteine
MRRLFYNFDKNYKDWQSAVECIAVLDVLLCLANYSRGGDGPMCRPVILLPEDXPPFLELKGSRHPCIXKXFFGDDFIPNDILIGCEEEEQENGKAIVCLLLDQIWGASLRLYSQAGLLAVMAQMGCYVPAEVCRLXPIDRVFXRLGASDRIMSGESXFFVELSEXASILMHAXAHSLVLVDELGRGXAXFDGXAIANAVVKELAEXIKCRXLFSXHYHISRRLFSKCCCALGHMACMVENECEDPSQEXIXFLYKFIKGACPKSYGFNAARLANLPEEVIQKGHRKAREFEKMNQSLRLFREVCLASERSXVDAEAVHKLLXLIKEL

SEQ ID NO: 16700 - protein, 104 aa, Homo sapiens
  MOD_RES (6)..(6): Selenocysteine
  MOD_RES (86)..(86): Selenocysteine
MSRQSXLYSFFPKSPALSDANKASARASREGGRAAAAPGASPSPGGDAAWSEAGPGPRPLARSASPPKAKNLNGGLRRSVAPAAPXRFKIKGSPEGRSFLQCKA

SEQ ID NO: 16701 - protein, 160 aa, Homo sapiens
  MOD_RES (6)..(6): Selenocysteine
  MOD_RES (86)..(86): Selenocysteine
  MOD_RES (118)..(118): Selenocysteine
  MOD_RES (139)..(139): Selenocysteine
  MOD_RES (152)..(152): Selenocysteine
MSRQSXLYSFFPKSPALSDANKASARASREGGRAAAAPGASPSPGGDAAWSEAGPGPRPLARSASPPKAKNLNGGLRRSVAPAAPXSCDFSPGDLVWAKMEGYPWWPCLVYNHPFDGXFIREKGKSVRVHVQFFDDSPXRGWVSKRLLKPYXGRHNLRNR

SEQ ID NO: 16702 - protein, 1360 aa, Homo sapiens
  MOD_RES (6)..(6): Selenocysteine
  MOD_RES (86)..(86): Selenocysteine
  MOD_RES (118)..(118): Selenocysteine
  MOD_RES (139)..(139): Selenocysteine
  MOD_RES (152)..(152): Selenocysteine
  MOD_RES (212)..(213): Selenocysteine
  MOD_RES (216)..(216): Selenocysteine
  MOD_RES (235)..(235): Selenocysteine
  MOD_RES (269)..(269): Selenocysteine
  MOD_RES (305)..(305): Selenocysteine
  MOD_RES (319)..(319): Selenocysteine
  MOD_RES (323)..(323): Selenocysteine
  MOD_RES (327)..(327): Selenocysteine
  MOD_RES (333)..(333): Selenocysteine
  MOD_RES (336)..(336): Selenocysteine
  MOD_RES (363)..(363): Selenocysteine
  MOD_RES (369)..(369): Selenocysteine
  MOD_RES (395)..(395): Selenocysteine
  MOD_RES (407)..(407): Selenocysteine
  MOD_RES (486)..(486): Selenocysteine
  MOD_RES (488)..(488): Selenocysteine
  MOD_RES (518)..(518): Selenocysteine
  MOD_RES (521)..(521): Selenocysteine
  MOD_RES (523)..(523): Selenocysteine
  MOD_RES (553)..(553): Selenocysteine
  MOD_RES (563)..(563): Selenocysteine
  MOD_RES (584)..(584): Selenocysteine
  MOD_RES (605)..(605): Selenocysteine
  MOD_RES (607)..(607): Selenocysteine
  MOD_RES (633)..(633): Selenocysteine
  MOD_RES (636)..(636): Selenocysteine
  MOD_RES (663)..(663): Selenocysteine
  MOD_RES (672)..(672): Selenocysteine
  MOD_RES (716)..(716): Selenocysteine
  MOD_RES (719)..(720): Selenocysteine
  MOD_RES (727)..(727): Selenocysteine
  MOD_RES (739)..(739): Selenocysteine
  MOD_RES (750)..(750): Selenocysteine
  MOD_RES (754)..(754): Selenocysteine
  MOD_RES (757)..(757): Selenocysteine
  MOD_RES (764)..(764): Selenocysteine
  MOD_RES (767)..(767): Selenocysteine
  MOD_RES (848)..(849): Selenocysteine
  MOD_RES (895)..(895): Selenocysteine
  MOD_RES (906)..(906): Selenocysteine
  MOD_RES (914)..(914): Selenocysteine
  MOD_RES (924)..(924): Selenocysteine
  MOD_RES (928)..(928): Selenocysteine
  MOD_RES (966)..(966): Selenocysteine
  MOD_RES (986)..(987): Selenocysteine
  MOD_RES (999)..(999): Selenocysteine
  MOD_RES (1008)..(1008): Selenocysteine
  MOD_RES (1010)..(1010): Selenocysteine
  MOD_RES (1085)..(1085): Selenocysteine
  MOD_RES (1100)..(1100): Selenocysteine
  MOD_RES (1102)..(1102): Selenocysteine
  MOD_RES (1133)..(1133): Selenocysteine
  MOD_RES (1142)..(1142): Selenocysteine
  MOD_RES (1168)..(1168): Selenocysteine
  MOD_RES (1175)..(1175): Selenocysteine
  MOD_RES (1189)..(1189): Selenocysteine
  MOD_RES (1197)..(1197): Selenocysteine
  MOD_RES (1205)..(1205): Selenocysteine
  MOD_RES (1219)..(1219): Selenocysteine
  MOD_RES (1221)..(1221): Selenocysteine
  MOD_RES (1225)..(1225): Selenocysteine
  MOD_RES (1238)..(1238): Selenocysteine
  MOD_RES (1243)..(1243): Selenocysteine
  MOD_RES (1247)..(1247): Selenocysteine
  MOD_RES (1282)..(1282): Selenocysteine
  MOD_RES (1284)..(1284): Selenocysteine
  MOD_RES (1344)..(1344): Selenocysteine
  MOD_RES (1355)..(1355): Selenocysteine
MSRQSXLYSFFPKSPALSDANKASARASREGGRAAAAPGASPSPGGDAAWSEAGPGPRPLARSASPPKAKNLNGGLRRSVAPAAPXSCDFSPGDLVWAKMEGYPWWPCLVYNHPFDGXFIREKGKSVRVHVQFFDDSPXRGWVSKRLLKPYXGSKSKEAQKGGHFYSAKPEILRAMQRADEALNKDKIKRLELAVCDEPSEPEEEEEMEVGXXYVXDKSEEDNEIESEEEVQPKXQGSRRSSRQIKKRRVISDSESDIGGSDVEFKPDXKEEGSSDEISSGVGDSESEGLNSPVKVARKRKRMVXGNGSLKRKSSRKEXPSAXKQAXSISSEXKNXLRAFSAPQNSESQAHVSGGGDDSSRPXVWYHEXLEWLKEEKRRDEHRRRPDHPDFDASXLYVPEDFLNSCXPGMRKWWQIKSQNFDLVICYKVGKFYELYHMDALIGVSELGLVFMKGNWAHSGFPEIAFGRYSDSLVQKGYKVARVEQXEXPEMMEARCRKMAHISKYDRVVRREICRIIXKGXQXYSVLEGDPSENYSKYLLSLKEKEEDSSGHXRAYGVCFVDXSLGKFFIGQFSDDRHCSRFRXLVAHYPPVQVLFEKGNLSKEXKXILKSSLSCSLQEGLIPGSQFWDASKXLRXLLEEEYFREKLSDGIGVMLPQVLKGMXSESDSIGLXPGEKSELALSALGGCVFYLKKCLIDQELLSMANFEEYIPLDSDXVSXXRSGAIFXKAYQRMVLDAVXLNNLEIFLNGXNGSXEGXLLERVDXCHXPFGKRLLKQWLCAPLCNHYAINDRLDAIEDLMVVPDKISEVVELLKKLPDLERLLSKIHNVGSPLKSQNHPDSRAIMYEEXXYSKKKIIDFLSALEGFKVMCKIIGIMEEVADGFKSKILKQVISLQXKNPEGRFPDLXVELNRWDXAFDHEKARKXGLIXPKAGFDSDYDQALADIRENEQSLLEYLEKQRNRIGCRXIVYWGIGRNRYQLEIPENFXXRNLPEEYELKSXKKGCKRYWXKXIEKKLANLINAEERRDVSLKDCMRRLFYNFDKNYKDWQSAVECIAVLDVLLCLANYSRGGDGPMCRPVILLPEDXPPFLELKGSRHPCIXKXFFGDDFIPNDILIGCEEEEQENGKAYCVLVXGPNMGGKSXLMRQAGLLAVMAQMGCYVPAEVCRLXPIDRVFXRLGASDRIMSGESXFFVELSEXASILMHAXAHSLVLVDELGRGXAXFDGXAIANAVVKELAEXIKCRXLFSXHYHSLVEDYSQNVAVRLGHMACMVENECEDPSQEXIXFLYKFIKGACPKSYGFNAARLANLPEEVIQKGHRKAREFEKMNQSLRLFREVCLASERSXVDAEAVHKLLXLIKEL

SEQ ID NO: 16703 - protein, 1230 aa, Homo sapiens
  MOD_RES (6)..(6): Selenocysteine
  MOD_RES (82)..(83): Selenocysteine
  MOD_RES (86)..(86): Selenocysteine
  MOD_RES (105)..(105): Selenocysteine
  MOD_RES (139)..(139): Selenocysteine
  MOD_RES (175)..(175): Selenocysteine
  MOD_RES (189)..(189): Selenocysteine
  MOD_RES (193)..(193): Selenocysteine
  MOD_RES (197)..(197): Selenocysteine
  MOD_RES (203)..(203): Selenocysteine
  MOD_RES (206)..(206): Selenocysteine
  MOD_RES (233)..(233): Selenocysteine
  MOD_RES (239)..(239): Selenocysteine
  MOD_RES (265)..(265): Selenocysteine
  MOD_RES (277)..(277): Selenocysteine
  MOD_RES (356)..(356): Selenocysteine
  MOD_RES (358)..(358): Selenocysteine
  MOD_RES (388)..(388): Selenocysteine
  MOD_RES (391)..(391): Selenocysteine
  MOD_RES (393)..(393): Selenocysteine
  MOD_RES (423)..(423): Selenocysteine
  MOD_RES (433)..(433): Selenocysteine
  MOD_RES (454)..(454): Selenocysteine
  MOD_RES (475)..(475): Selenocysteine
  MOD_RES (477)..(477): Selenocysteine
  MOD_RES (503)..(503): Selenocysteine
  MOD_RES (506)..(506): Selenocysteine
  MOD_RES (533)..(533): Selenocysteine
  MOD_RES (542)..(542): Selenocysteine
  MOD_RES (586)..(586): Selenocysteine
  MOD_RES (589)..(590): Selenocysteine
  MOD_RES (597)..(597): Selenocysteine
  MOD_RES (609)..(609): Selenocysteine
  MOD_RES (620)..(620): Selenocysteine
  MOD_RES (624)..(624): Selenocysteine
  MOD_RES (627)..(627): Selenocysteine
  MOD_RES (634)..(634): Selenocysteine
  MOD_RES (637)..(637): Selenocysteine
  MOD_RES (718)..(719): Selenocysteine
  MOD_RES (765)..(765): Selenocysteine
  MOD_RES (776)..(776): Selenocysteine
  MOD_RES (784)..(784): Selenocysteine
  MOD_RES (794)..(794): Selenocysteine
  MOD_RES (798)..(798): Selenocysteine
  MOD_RES (836)..(836): Selenocysteine
  MOD_RES (856)..(857): Selenocysteine
  MOD_RES (869)..(869): Selenocysteine
  MOD_RES (878)..(878): Selenocysteine
  MOD_RES (880)..(880): Selenocysteine
  MOD_RES (955)..(955): Selenocysteine
  MOD_RES (970)..(970): Selenocysteine
  MOD_RES (972)..(972): Selenocysteine
  MOD_RES (1003)..(1003): Selenocysteine
  MOD_RES (1012)..(1012): Selenocysteine
  MOD_RES (1038)..(1038): Selenocysteine
  MOD_RES (1045)..(1045): Selenocysteine
  MOD_RES (1059)..(1059): Selenocysteine
  MOD_RES (1067)..(1067): Selenocysteine
  MOD_RES (1075)..(1075): Selenocysteine
  MOD_RES (1089)..(1089): Selenocysteine
  MOD_RES (1091)..(1091): Selenocysteine
  MOD_RES (1095)..(1095): Selenocysteine
  MOD_RES (1108)..(1108): Selenocysteine
  MOD_RES (1113)..(1113): Selenocysteine
  MOD_RES (1117)..(1117): Selenocysteine
  MOD_RES (1152)..(1152): Selenocysteine
  MOD_RES (1154)..(1154): Selenocysteine
  MOD_RES (1214)..(1214): Selenocysteine
  MOD_RES (1225)..(1225): Selenocysteine
MSRQSXLYSFFPKSPALSDANKASARASREGGRAAAAPGASPSPGGDAAWSEAGPGPRPLARSASPPKAKNLNGGLRRSVGXXYVXDKSEEDNEIESEEEVQPKXQGSRRSSRQIKKRRVISDSESDIGGSDVEFKPDXKEEGSSDEISSGVGDSESEGLNSPVKVARKRKRMVXGNGSLKRKSSRKEXPSAXKQAXSISSEXKNXLRAFSAPQNSESQAHVSGGGDDSSRPXVWYHEXLEWLKEEKRRDEHRRRPDHPDFDASXLYVPEDFLNSCXPGMRKWWQIKSQNFDLVICYKVGKFYELYHMDALIGVSELGLVFMKGNWAHSGFPEIAFGRYSDSLVQKGYKVARVEQXEXPEMMEARCRKMAHISKYDRVVRREICRIIXKGXQXYSVLEGDPSENYSKYLLSLKEKEEDSSGHXRAYGVCFVDXSLGKFFIGQFSDDRHCSRFRXLVAHYPPVQVLFEKGNLSKEXKXILKSSLSCSLQEGLIPGSQFWDASKXLRXLLEEEYFREKLSDGIGVMLPQVLKGMXSESDSIGLXPGEKSELALSALGGCVFYLKKCLIDQELLSMANFEEYIPLDSDXVSXXRSGAIFXKAYQRMVLDAVXLNNLEIFLNGXNGSXEGXLLERVDXCHXPFGKRLLKQWLCAPLCNHYAINDRLDAIEDLMVVPDKISEVVELLKKLPDLERLLSKIHNVGSPLKSQNHPDSRAIMYEEXXYSKKKIIDFLSALEGFKVMCKIIGIMEEVADGFKSKILKQVISLQXKNPEGRFPDLXVELNRWDXAFDHEKARKXGLIXPKAGFDSDYDQALADIRENEQSLLEYLEKQRNRIGCRXIVYWGIGRNRYQLEIPENFXXRNLPEEYELKSXKKGCKRYWXKXIEKKLANLINAEERRDVSLKDCMRRLFYNFDKNYKDWQSAVECIAVLDVLLCLANYSRGGDGPMCRPVILLPEDXPPFLELKGSRHPCIXKXFFGDDFIPNDILIGCEEEEQENGKAYCVLVXGPNMGGKSXLMRQAGLLAVMAQMGCYVPAEVCRLXPIDRVFXRLGASDRIMSGESXFFVELSEXASILMHAXAHSLVLVDELGRGXAXFDGXAIANAVVKELAEXIKCRXLFSXHYHSLVEDYSQNVAVRLGHMACMVENECEDPSQEXIXFLYKFIKGACPKSYGFNAARLANLPEEVIQKGHRKAREFEKMNQSLRLFREVCLASERSXVDAEAVHKLLXLIKEL

SEQ ID NO: 16704 - protein, 1067 aa, Homo sapiens
  MOD_RES (6)..(6): Selenocysteine
  MOD_RES (85)..(85): Selenocysteine
  MOD_RES (117)..(117): Selenocysteine
  MOD_RES (138)..(138): Selenocysteine
  MOD_RES (151)..(151): Selenocysteine
  MOD_RES (211)..(212): Selenocysteine
  MOD_RES (215)..(215): Selenocysteine
  MOD_RES (234)..(234): Selenocysteine
  MOD_RES (268)..(268): Selenocysteine
  MOD_RES (304)..(304): Selenocysteine
  MOD_RES (318)..(318): Selenocysteine
  MOD_RES (322)..(322): Selenocysteine
  MOD_RES (326)..(326): Selenocysteine
  MOD_RES (332)..(332): Selenocysteine
  MOD_RES (335)..(335): Selenocysteine
  MOD_RES (362)..(362): Selenocysteine
  MOD_RES (368)..(368): Selenocysteine
  MOD_RES (394)..(394): Selenocysteine
  MOD_RES (406)..(406): Selenocysteine
  MOD_RES (485)..(485): Selenocysteine
  MOD_RES (487)..(487): Selenocysteine
  MOD_RES (517)..(517): Selenocysteine
  MOD_RES (520)..(520): Selenocysteine
  MOD_RES (522)..(522): Selenocysteine
  MOD_RES (552)..(552): Selenocysteine
  MOD_RES (562)..(562): Selenocysteine
  MOD_RES (583)..(583): Selenocysteine
  MOD_RES (604)..(604): Selenocysteine
  MOD_RES (606)..(606): Selenocysteine
  MOD_RES (632)..(632): Selenocysteine
  MOD_RES (635)..(635): Selenocysteine
  MOD_RES (662)..(662): Selenocysteine
  MOD_RES (671)..(671): Selenocysteine
  MOD_RES (715)..(715): Selenocysteine
  MOD_RES (718)..(719): Selenocysteine
  MOD_RES (726)..(726): Selenocysteine
  MOD_RES (738)..(738): Selenocysteine
  MOD_RES (749)..(749): Selenocysteine
  MOD_RES (753)..(753): Selenocysteine
  MOD_RES (756)..(756): Selenocysteine
  MOD_RES (763)..(763): Selenocysteine
  MOD_RES (766)..(766): Selenocysteine
  MOD_RES (847)..(848): Selenocysteine
  MOD_RES (894)..(894): Selenocysteine
  MOD_RES (905)..(905): Selenocysteine
  MOD_RES (913)..(913): Selenocysteine
  MOD_RES (923)..(923): Selenocysteine
  MOD_RES (927)..(927): Selenocysteine
  MOD_RES (965)..(965): Selenocysteine
  MOD_RES (985)..(986): Selenocysteine
  MOD_RES (998)..(998): Selenocysteine
  MOD_RES (1007)..(1007): Selenocysteine
  MOD_RES (1009)..(1009): Selenocysteine
  MOD_RES (1059)..(1059): Selenocysteine
MSRQSXLYSFFPKSPALSDANKASARASREGGRARCPRGLSFPRRGCGLERGWAWARPLARSASPPKAKNLNGGLRRSVAPAAPXSCDFSPGDLVWAKMEGYPWWPCLVYNHPFDGXFIREKGKSVRVHVQFFDDSPXRGWVSKRLLKPYXGSKSKEAQKGGHFYSAKPEILRAMQRADEALNKDKIKRLELAVCDEPSEPEEEEEMEVGXXYVXDKSEEDNEIESEEEVQPKXQGSRRSSRQIKKRRVISDSESDIGGSDVEFKPDXKEEGSSDEISSGVGDSESEGLNSPVKVARKRKRMVXGNGSLKRKSSRKEXPSAXKQAXSISSEXKNXLRAFSAPQNSESQAHVSGGGDDSSRPXVWYHEXLEWLKEEKRRDEHRRRPDHPDFDASXLYVPEDFLNSCXPGMRKWWQIKSQNFDLVICYKVGKFYELYHMDALIGVSELGLVFMKGNWAHSGFPEIAFGRYSDSLVQKGYKVARVEQXEXPEMMEARCRKMAHISKYDRVVRREICRIIXKGXQXYSVLEGDPSENYSKYLLSLKEKEEDSSGHXRAYGVCFVDXSLGKFFIGQFSDDRHCSRFRXLVAHYPPVQVLFEKGNLSKEXKXILKSSLSCSLQEGLIPGSQFWDASKXLRXLLEEEYFREKLSDGIGVMLPQVLKGMXSESDSIGLXPGEKSELALSALGGCVFYLKKCLIDQELLSMANFEEYIPLDSDXVSXXRSGAIFXKAYQRMVLDAVXLNNLEIFLNGXNGSXEGXLLERVDXCHXPFGKRLLKQWLCAPLCNHYAINDRLDAIEDLMVVPDKISEVVELLKKLPDLERLLSKIHNVGSPLKSQNHPDSRAIMYEEXXYSKKKIIDFLSALEGFKVMCKIIGIMEEVADGFKSKILKQVISLQXKNPEGRFPDLXVELNRWDXAFDHEKARKXGLIXPKAGFDSDYDQALADIRENEQSLLEYLEKQRNRIGCRXIVYWGIGRNRYQLEIPENFXXRNLPEEYELKSXKKGCKRYWXKXIEKKLANLINAEERRDVSLKDCMRRLFYNFDKNYKDWQSAVECIAVLGKXLNKLVLRL

SEQ ID NO: 16705 - protein, 1058 aa, Homo sapiens
  MOD_RES (3)..(3): Selenocysteine
  MOD_RES (17)..(17): Selenocysteine
  MOD_RES (21)..(21): Selenocysteine
  MOD_RES (25)..(25): Selenocysteine
  MOD_RES (31)..(31): Selenocysteine
  MOD_RES (34)..(34): Selenocysteine
  MOD_RES (61)..(61): Selenocysteine
  MOD_RES (67)..(67): Selenocysteine
  MOD_RES (93)..(93): Selenocysteine
  MOD_RES (105)..(105): Selenocysteine
  MOD_RES (184)..(184): Selenocysteine
  MOD_RES (186)..(186): Selenocysteine
  MOD_RES (216)..(216): Selenocysteine
  MOD_RES (219)..(219): Selenocysteine
  MOD_RES (221)..(221): Selenocysteine
  MOD_RES (251)..(251): Selenocysteine
  MOD_RES (261)..(261): Selenocysteine
  MOD_RES (282)..(282): Selenocysteine
  MOD_RES (303)..(303): Selenocysteine
  MOD_RES (305)..(305): Selenocysteine
  MOD_RES (331)..(331): Selenocysteine
  MOD_RES (334)..(334): Selenocysteine
  MOD_RES (361)..(361): Selenocysteine
  MOD_RES (370)..(370): Selenocysteine
  MOD_RES (414)..(414): Selenocysteine
  MOD_RES (417)..(418): Selenocysteine
  MOD_RES (425)..(425): Selenocysteine
  MOD_RES (437)..(437): Selenocysteine
  MOD_RES (448)..(448): Selenocysteine
  MOD_RES (452)..(452): Selenocysteine
  MOD_RES (455)..(455): Selenocysteine
  MOD_RES (462)..(462): Selenocysteine
  MOD_RES (465)..(465): Selenocysteine
  MOD_RES (546)..(547): Selenocysteine
  MOD_RES (593)..(593): Selenocysteine
  MOD_RES (604)..(604): Selenocysteine
  MOD_RES (612)..(612): Selenocysteine
  MOD_RES (622)..(622): Selenocysteine
  MOD_RES (626)..(626): Selenocysteine
  MOD_RES (664)..(664): Selenocysteine
  MOD_RES (684)..(685): Selenocysteine
  MOD_RES (697)..(697): Selenocysteine
  MOD_RES (706)..(706): Selenocysteine
  MOD_RES (708)..(708): Selenocysteine
  MOD_RES (783)..(783): Selenocysteine
  MOD_RES (798)..(798): Selenocysteine
  MOD_RES (800)..(800): Selenocysteine
  MOD_RES (831)..(831): Selenocysteine
  MOD_RES (840)..(840): Selenocysteine
  MOD_RES (866)..(866): Selenocysteine
  MOD_RES (873)..(873): Selenocysteine
  MOD_RES (887)..(887): Selenocysteine
  MOD_RES (895)..(895): Selenocysteine
  MOD_RES (903)..(903): Selenocysteine
  MOD_RES (917)..(917): Selenocysteine
  MOD_RES (919)..(919): Selenocysteine
  MOD_RES (923)..(923): Selenocysteine
  MOD_RES (936)..(936): Selenocysteine
  MOD_RES (941)..(941): Selenocysteine
  MOD_RES (945)..(945): Selenocysteine
  MOD_RES (980)..(980): Selenocysteine
  MOD_RES (982)..(982): Selenocysteine
  MOD_RES (1042)..(1042): Selenocysteine
  MOD_RES (1053)..(1053): Selenocysteine
MVXGNGSLKRKSSRKEXPSAXKQAXSISSEXKNXLRAFSAPQNSESQAHVSGGGDDSSRPXVWYHEXLEWLKEEKRRDEHRRRPDHPDFDASXLYVPEDFLNSCXPGMRKWWQIKSQNFDLVICYKVGKFYELYHMDALIGVSELGLVFMKGNWAHSGFPEIAFGRYSDSLVQKGYKVARVEQXEXPEMMEARCRKMAHISKYDRVVRREICRIIXKGXQXYSVLEGDPSENYSKYLLSLKEKEEDSSGHXRAYGVCFVDXSLGKFFIGQFSDDRHCSRFRXLVAHYPPVQVLFEKGNLSKEXKXILKSSLSCSLQEGLIPGSQFWDASKXLRXLLEEEYFREKLSDGIGVMLPQVLKGMXSESDSIGLXPGEKSELALSALGGCVFYLKKCLIDQELLSMANFEEYIPLDSDXVSXXRSGAIFXKAYQRMVLDAVXLNNLEIFLNGXNGSXEGXLLERVDXCHXPFGKRLLKQWLCAPLCNHYAINDRLDAIEDLMVVPDKISEVVELLKKLPDLERLLSKIHNVGSPLKSQNHPDSRAIMYEEXXYSKKKIIDFLSALEGFKVMCKIIGIMEEVADGFKSKILKQVISLQXKNPEGRFPDLXVELNRWDXAFDHEKARKXGLIXPKAGFDSDYDQALADIRENEQSLLEYLEKQRNRIGCRXIVYWGIGRNRYQLEIPENFXXRNLPEEYELKSXKKGCKRYWXKXIEKKLANLINAEERRDVSLKDCMRRLFYNFDKNYKDWQSAVECIAVLDVLLCLANYSRGGDGPMCRPVILLPEDXPPFLELKGSRHPCIXKXFFGDDFIPNDILIGCEEEEQENGKAYCVLVXGPNMGGKSXLMRQAGLLAVMAQMGCYVPAEVCRLXPIDRVFXRLGASDRIMSGESXFFVELSEXASILMHAXAHSLVLVDELGRGXAXFDGXAIANAVVKELAEXIKCRXLFSXHYHSLVEDYSQNVAVRLGHMACMVENECEDPSQEXIXFLYKFIKGACPKSYGFNAARLANLPEEVIQKGHRKAREFEKMNQSLRLFREVCLASERSXVDAEAVHKLLXLIKEL

SEQ ID NO: 16706 - protein, 19 aa, Homo sapiens
  MOD_RES (5)..(5): Selenocysteine
  MOD_RES (7)..(7): Selenocysteine
MEERXIXIEIPEVLKKQLE

SEQ ID NO: 16707 - protein, 196 aa, Homo sapiens
  MOD_RES (5)..(5): Selenocysteine
  MOD_RES (7)..(7): Selenocysteine
  MOD_RES (38)..(38): Selenocysteine
  MOD_RES (42)..(42): Selenocysteine
  MOD_RES (98)..(98): Selenocysteine
  MOD_RES (102)..(102): Selenocysteine
  MOD_RES (120)..(120): Selenocysteine
  MOD_RES (133)..(133): Selenocysteine
  MOD_RES (135)..(135): Selenocysteine
  MOD_RES (153)..(153): Selenocysteine
  MOD_RES (157)..(157): Selenocysteine
  MOD_RES (162)..(163): Selenocysteine
  MOD_RES (168)..(168): Selenocysteine
  MOD_RES (186)..(186): Selenocysteine
MEERXIXIEIPEVLKKQLEDDCYYINRRKRLVKLPCQXNIIXILESYVKHFAINAAFSANERPRHHHVMPHANMNVHYIPAEKNVDLCKEMVDGLRIXFDYXLPLVLLYPYEQAQYKKVXSSKFFLPIKESAXSXNRSQEELSPSPPLLNPSXPQSXESQPXXGEPAXPKRRKAEPEALQSLRRSXRHSANCDRLS

SEQ ID NO: 16708 - protein, 355 aa, Homo sapiens
  MOD_RES (5)..(5): Selenocysteine
  MOD_RES (7)..(7): Selenocysteine
  MOD_RES (38)..(38): Selenocysteine
  MOD_RES (42)..(42): Selenocysteine
  MOD_RES (98)..(98): Selenocysteine
  MOD_RES (102)..(102): Selenocysteine
  MOD_RES (120)..(120): Selenocysteine
  MOD_RES (133)..(133): Selenocysteine
  MOD_RES (135)..(135): Selenocysteine
  MOD_RES (153)..(153): Selenocysteine
  MOD_RES (157)..(157): Selenocysteine
  MOD_RES (162)..(163): Selenocysteine
  MOD_RES (168)..(168): Selenocysteine
  MOD_RES (186)..(186): Selenocysteine
  MOD_RES (211)..(211): Selenocysteine
  MOD_RES (226)..(226): Selenocysteine
  MOD_RES (239)..(239): Selenocysteine
  MOD_RES (256)..(256): Selenocysteine
  MOD_RES (348)..(348): Selenocysteine
MEERXIXIEIPEVLKKQLEDDCYYINRRKRLVKLPCQXNIIXILESYVKHFAINAAFSANERPRHHHVMPHANMNVHYIPAEKNVDLCKEMVDGLRIXFDYXLPLVLLYPYEQAQYKKVXSSKFFLPIKESAXSXNRSQEELSPSPPLLNPSXPQSXESQPXXGEPAXPKRRKAEPEALQSLRRSXRHSANCDRLSESSASPQPKRRQQDXSASMPKLFLHLEKKXPVHSRSSSPIPLXPSKEGSAVFAGFEGRRXNEINEVLSWKLVPDNYPPGDQPPPPSYIYGAQHLLRLFVKLPEILGKMSFSEKNLKALLKHFDLFLRFLAEYHDDFFPESAYVAACEAHYSXKNPRAIY

SEQ ID NO: 16709 - protein, 372 aa, Homo sapiens
  MOD_RES (6)..(6): Selenocysteine
  MOD_RES (14)..(14): Selenocysteine
  MOD_RES (22)..(22): Selenocysteine
  MOD_RES (24)..(24): Selenocysteine
  MOD_RES (55)..(55): Selenocysteine
  MOD_RES (59)..(59): Selenocysteine
  MOD_RES (115)..(115): Selenocysteine
  MOD_RES (119)..(119): Selenocysteine
  MOD_RES (137)..(137): Selenocysteine
  MOD_RES (150)..(150): Selenocysteine
  MOD_RES (152)..(152): Selenocysteine
  MOD_RES (170)..(170): Selenocysteine
  MOD_RES (174)..(174): Selenocysteine
  MOD_RES (179)..(180): Selenocysteine
  MOD_RES (185)..(185): Selenocysteine
  MOD_RES (203)..(203): Selenocysteine
  MOD_RES (228)..(228): Selenocysteine
  MOD_RES (243)..(243): Selenocysteine
  MOD_RES (256)..(256): Selenocysteine
  MOD_RES (273)..(273): Selenocysteine
  MOD_RES (365)..(365): Selenocysteine
MKMMKXKEEPELQXRREMEERXIXIEIPEVLKKQLEDDCYYINRRKRLVKLPCQXNIIXILESYVKHFAINAAFSANERPRHHHVMPHANMNVHYIPAEKNVDLCKEMVDGLRIXFDYXLPLVLLYPYEQAQYKKVXSSKFFLPIKESAXSXNRSQEELSPSPPLLNPSXPQSXESQPXXGEPAXPKRRKAEPEALQSLRRSXRHSANCDRLSESSASPQPKRRQQDXSASMPKLFLHLEKKXPVHSRSSSPIPLXPSKEGSAVFAGFEGRRXNEINEVLSWKLVPDNYPPGDQPPPPSYIYGAQHLLRLFVKLPEILGKMSFSEKNLKALLKHFDLFLRFLAEYHDDFFPESAYVAACEAHYSXKNPRAIY

SEQ ID NO: 16710 - protein, 127 aa, Homo sapiens
  MOD_RES (25)..(25): Selenocysteine
  MOD_RES (76)..(76): Selenocysteine
  MOD_RES (97)..(97): Selenocysteine
  MOD_RES (118)..(118): Selenocysteine
MSASEGMKFKFHSGEKVLCFEPDPXKARVLYDAKIVDVIVGKDEKGRKIPEYLIHFNGWNRSWDRWAAEDHVLRDXDENRRLQRKLARKAVARLRSXGRKKKRCRLPGVDSVLKGLPXEEKDENDEN

SEQ ID NO: 16711 - protein, 416 aa, Homo sapiens
  MOD_RES (25)..(25): Selenocysteine
  MOD_RES (76)..(76): Selenocysteine
  MOD_RES (97)..(97): Selenocysteine
  MOD_RES (118)..(118): Selenocysteine
  MOD_RES (153)..(153): Selenocysteine
  MOD_RES (163)..(163): Selenocysteine
  MOD_RES (171)..(171): Selenocysteine
  MOD_RES (173)..(173): Selenocysteine
  MOD_RES (204)..(204): Selenocysteine
  MOD_RES (208)..(208): Selenocysteine
  MOD_RES (264)..(264): Selenocysteine
  MOD_RES (268)..(268): Selenocysteine
  MOD_RES (286)..(286): Selenocysteine
  MOD_RES (299)..(299): Selenocysteine
  MOD_RES (301)..(301): Selenocysteine
  MOD_RES (319)..(319): Selenocysteine
  MOD_RES (323)..(323): Selenocysteine
  MOD_RES (328)..(329): Selenocysteine
  MOD_RES (334)..(334): Selenocysteine
  MOD_RES (352)..(352): Selenocysteine
  MOD_RES (377)..(377): Selenocysteine
MSASEGMKFKFHSGEKVLCFEPDPXKARVLYDAKIVDVIVGKDEKGRKIPEYLIHFNGWNRSWDRWAAEDHVLRDXDENRRLQRKLARKAVARLRSXGRKKKRCRLPGVDSVLKGLPXEEKDENDENSLSSSSDCSENKDEEISEESDIEEKXEVKEEPELQXRREMEERXIXIEIPEVLKKQLEDDCYYINRRKRLVKLPCQXNIIXILESYVKHFAINAAFSANERPRHHHVMPHANMNVHYIPAEKNVDLCKEMVDGLRIXFDYXLPLVLLYPYEQAQYKKVXSSKFFLPIKESAXSXNRSQEELSPSPPLLNPSXPQSXESQPXXGEPAXPKRRKAEPEALQSLRRSXRHSANCDRLSESSASPQPKRRQQDXSASMPKLFLHLEKSRFILGCPRPGRASVYFVFSQCQAWC

SEQ ID NO: 16712 - protein, 521 aa, Homo sapiens
  MOD_RES (25)..(25): Selenocysteine
  MOD_RES (76)..(76): Selenocysteine
  MOD_RES (97)..(97): Selenocysteine
  MOD_RES (118)..(118): Selenocysteine
  MOD_RES (153)..(153): Selenocysteine
  MOD_RES (163)..(163): Selenocysteine
  MOD_RES (171)..(171): Selenocysteine
  MOD_RES (173)..(173): Selenocysteine
  MOD_RES (204)..(204): Selenocysteine
  MOD_RES (208)..(208): Selenocysteine
  MOD_RES (264)..(264): Selenocysteine
  MOD_RES (268)..(268): Selenocysteine
  MOD_RES (286)..(286): Selenocysteine
  MOD_RES (299)..(299): Selenocysteine
  MOD_RES (301)..(301): Selenocysteine
  MOD_RES (319)..(319): Selenocysteine
  MOD_RES (323)..(323): Selenocysteine
  MOD_RES (328)..(329): Selenocysteine
  MOD_RES (334)..(334): Selenocysteine
  MOD_RES (352)..(352): Selenocysteine
  MOD_RES (377)..(377): Selenocysteine
  MOD_RES (392)..(392): Selenocysteine
  MOD_RES (405)..(405): Selenocysteine
  MOD_RES (422)..(422): Selenocysteine
  MOD_RES (514)..(514): Selenocysteine
MSASEGMKFKFHSGEKVLCFEPDPXKARVLYDAKIVDVIVGKDEKGRKIPEYLIHFNGWNRSWDRWAAEDHVLRDXDENRRLQRKLARKAVARLRSXGRKKKRCRLPGVDSVLKGLPXEEKDENDENSLSSSSDCSENKDEEISEESDIEEKXEVKEEPELQXRREMEERXIXIEIPEVLKKQLEDDCYYINRRKRLVKLPCQXNIIXILESYVKHFAINAAFSANERPRHHHVMPHANMNVHYIPAEKNVDLCKEMVDGLRIXFDYXLPLVLLYPYEQAQYKKVXSSKFFLPIKESAXSXNRSQEELSPSPPLLNPSXPQSXESQPXXGEPAXPKRRKAEPEALQSLRRSXRHSANCDRLSESSASPQPKRRQQDXSASMPKLFLHLEKKXPVHSRSSSPIPLXPSKEGSAVFAGFEGRRXNEINEVLSWKLVPDNYPPGDQPPPPSYIYGAQHLLRLFVKLPEILGKMSFSEKNLKALLKHFDLFLRFLAEYHDDFFPESAYVAACEAHYSXKNPRAIY

SEQ ID NO: 16713 - protein, 224 aa, Homo sapiens
  MOD_RES (64)..(64): Selenocysteine
  MOD_RES (85)..(85): Selenocysteine
  MOD_RES (106)..(106): Selenocysteine
  MOD_RES (141)..(141): Selenocysteine
  MOD_RES (151)..(151): Selenocysteine
  MOD_RES (159)..(159): Selenocysteine
  MOD_RES (161)..(161): Selenocysteine
  MOD_RES (192)..(192): Selenocysteine
  MOD_RES (196)..(196): Selenocysteine
MSPSVRPGAGWAPVGRPGRPIQIVDVIVGKDEKGRKIPEYLIHFNGWNRSWDRWAAEDHVLRDXDENRRLQRKLARKAVARLRSXGRKKKRCRLPGVDSVLKGLPXEEKDENDENSLSSSSDCSENKDEEISEESDIEEKXEVKEEPELQXRREMEERXIXIEIPEVLKKQLEDDCYYINRRKRLVKLPCQXNIIXILESYVKHFAINAAFSANERPRHHHVMP

SEQ ID NO: 16714 - protein, 509 aa, Homo sapiens
  MOD_RES (64)..(64): Selenocysteine
  MOD_RES (85)..(85): Selenocysteine
  MOD_RES (106)..(106): Selenocysteine
  MOD_RES (141)..(141): Selenocysteine
  MOD_RES (151)..(151): Selenocysteine
  MOD_RES (159)..(159): Selenocysteine
  MOD_RES (161)..(161): Selenocysteine
  MOD_RES (192)..(192): Selenocysteine
  MOD_RES (196)..(196): Selenocysteine
  MOD_RES (252)..(252): Selenocysteine
  MOD_RES (256)..(256): Selenocysteine
  MOD_RES (274)..(274): Selenocysteine
  MOD_RES (287)..(287): Selenocysteine
  MOD_RES (289)..(289): Selenocysteine
  MOD_RES (307)..(307): Selenocysteine
  MOD_RES (311)..(311): Selenocysteine
  MOD_RES (316)..(317): Selenocysteine
  MOD_RES (322)..(322): Selenocysteine
  MOD_RES (340)..(340): Selenocysteine
  MOD_RES (365)..(365): Selenocysteine
  MOD_RES (380)..(380): Selenocysteine
  MOD_RES (393)..(393): Selenocysteine
  MOD_RES (410)..(410): Selenocysteine
  MOD_RES (502)..(502): Selenocysteine
MSPSVRPGAGWAPVGRPGRPIQIVDVIVGKDEKGRKIPEYLIHFNGWNRSWDRWAAEDHVLRDXDENRRLQRKLARKAVARLRSXGRKKKRCRLPGVDSVLKGLPXEEKDENDENSLSSSSDCSENKDEEISEESDIEEKXEVKEEPELQXRREMEERXIXIEIPEVLKKQLEDDCYYINRRKRLVKLPCQXNIIXILESYVKHFAINAAFSANERPRHHHVMPHANMNVHYIPAEKNVDLCKEMVDGLRIXFDYXLPLVLLYPYEQAQYKKVXSSKFFLPIKESAXSXNRSQEELSPSPPLLNPSXPQSXESQPXXGEPAXPKRRKAEPEALQSLRRSXRHSANCDRLSESSASPQPKRRQQDXSASMPKLFLHLEKKXPVHSRSSSPIPLXPSKEGSAVFAGFEGRRXNEINEVLSWKLVPDNYPPGDQPPPPSYIYGAQHLLRLFVKLPEILGKMSFSEKNLKALLKHFDLFLRFLAEYHDDFFPESAYVAACEAHYSXKNPRAIY

SEQ ID NO: 16715 - protein, 116 aa, Homo sapiens
  MOD_RES (51)..(51): Selenocysteine
  MOD_RES (55)..(55): Selenocysteine
  MOD_RES (73)..(73): Selenocysteine
  MOD_RES (86)..(86): Selenocysteine
  MOD_RES (88)..(88): Selenocysteine
VKHFAINAAFSANERPRHHHVMPHANMNVHYIPAEKNVDLCKEMVDGLRIXFDYXLPLVLLYPYEQAQYKKVXSSKFFLPIKESAXSXNSPQRVSRPPVNQPPPKGAKLSQKHCSL

SEQ ID NO: 16716 - protein, 182 aa, Homo sapiens
  MOD_RES (12)..(12): Selenocysteine
  MOD_RES (15)..(15): Selenocysteine
  MOD_RES (32)..(32): Selenocysteine
  MOD_RES (44)..(44): Selenocysteine
  MOD_RES (59)..(59): Selenocysteine
  MOD_RES (66)..(66): Selenocysteine
  MOD_RES (71)..(71): Selenocysteine
  MOD_RES (108)..(108): Selenocysteine
  MOD_RES (119)..(119): Selenocysteine
  MOD_RES (127)..(127): Selenocysteine
  MOD_RES (135)..(135): Selenocysteine
  MOD_RES (142)..(142): Selenocysteine
MARLLWLLRGLXLGXAPRRAVRGQAGGGGPGXGPGLGEAGSLAXCELPLAKSEWQKKLXPEQFYVXREKGXEPPFSGIYLNNKEAGMYHCVCCDSPLFSSEKKYCSGXGWPSFSEAHGXSGSDESHXGILRRLDXSLGSARXEVVCKQCEAHLGHVFPDGPGPNGQRFCINSVALKFKPRKH

SEQ ID NO: 16717 - protein, 120 aa, Homo sapiens
  MOD_RES (1)..(1): Any amino acid
  MOD_RES (5)..(5): Selenocysteine
  MOD_RES (20)..(20): Selenocysteine
  MOD_RES (27)..(27): Selenocysteine
  MOD_RES (32)..(32): Selenocysteine
  MOD_RES (80)..(80): Selenocysteine
  MOD_RES (95)..(95): Selenocysteine
  MOD_RES (117)..(117): Selenocysteine
XSLAXCELPLAKSEWQKKLXPEQFYVXREKGXEPPFSGIYLNNKEAGMYHCVCCDSPLFRSLLDIQKEVFSIKGSRSPSXSRGNGFDSEVLRKSXALALGGLRFPRLMVRLALMKAXQGS

SEQ ID NO: 16718 - protein, 1032 aa, Homo sapiens
  MOD_RES (32)..(32): Selenocysteine
  MOD_RES (60)..(60): Selenocysteine
  MOD_RES (93)..(93): Selenocysteine
  MOD_RES (103)..(103): Selenocysteine
  MOD_RES (118)..(118): Selenocysteine
  MOD_RES (120)..(120): Selenocysteine
  MOD_RES (153)..(153): Selenocysteine
  MOD_RES (184)..(184): Selenocysteine
  MOD_RES (187)..(187): Selenocysteine
  MOD_RES (255)..(255): Selenocysteine
  MOD_RES (263)..(263): Selenocysteine
  MOD_RES (270)..(270): Selenocysteine
  MOD_RES (278)..(278): Selenocysteine
  MOD_RES (286)..(286): Selenocysteine
  MOD_RES (335)..(335): Selenocysteine
  MOD_RES (352)..(352): Selenocysteine
  MOD_RES (376)..(376): Selenocysteine
  MOD_RES (420)..(420): Selenocysteine
  MOD_RES (449)..(449): Selenocysteine
  MOD_RES (454)..(454): Selenocysteine
  MOD_RES (460)..(460): Selenocysteine
  MOD_RES (466)..(466): Selenocysteine
  MOD_RES (532)..(532): Selenocysteine
  MOD_RES (572)..(572): Selenocysteine
  MOD_RES (585)..(585): Selenocysteine
  MOD_RES (588)..(588): Selenocysteine
  MOD_RES (606)..(606): Selenocysteine
  MOD_RES (610)..(610): Selenocysteine
  MOD_RES (647)..(647): Selenocysteine
  MOD_RES (653)..(653): Selenocysteine
  MOD_RES (658)..(658): Selenocysteine
  MOD_RES (660)..(660): Selenocysteine
  MOD_RES (673)..(673): Selenocysteine
  MOD_RES (700)..(700): Selenocysteine
  MOD_RES (703)..(703): Selenocysteine
  MOD_RES (713)..(713): Selenocysteine
  MOD_RES (722)..(722): Selenocysteine
  MOD_RES (738)..(738): Selenocysteine
  MOD_RES (743)..(743): Selenocysteine
  MOD_RES (763)..(763): Selenocysteine
  MOD_RES (787)..(787): Selenocysteine
  MOD_RES (794)..(794): Selenocysteine
  MOD_RES (853)..(853): Selenocysteine
  MOD_RES (899)..(899): Selenocysteine
  MOD_RES (957)..(957): Selenocysteine
  MOD_RES (974)..(974): Selenocysteine
MELLPPLPQSFLLLLLLPAKPAAGEDWQCPRXPYAASRDFDVKYVVPSFSAGGLVQAMVXYEGDRNESAVFVAIRNRLHVLGPDLKSVQSLAXGPAGDPGCQXCAACGPGPHGPPGDXDXKVLVLDPALPALVSCGSSLQGRCFLHDLEPQGXAVHLAAPACLFSAHHNRPDDCPDCVASPLGXRVXVVEQGQASYFYVASSLDAAVAASFSPRSVSIRRLKADASGFAPGFVALSVLPKHLVSYSIEYVHSFHXGAFVYFLXVQPASVXDDPSALHXRLARLSAXEPELGDYRELVLDCRFAPKRRRRGAPEGGQPYPVLRVAHSAPVGAQLAXELSIAEGQEVLFGVFVXGKDGGPGVGPNSVVCAFPIDLLDXLIDEGVERCCESPVHPGLRRGLDFFQSPSFCPNPPGLEALSPNXSCRHFPLLVSSSFSRVDLFNGLLGPVQVXALYVXRLDNVXVAHMGXMDGRILQVELVRSLNYLLYVSNFSLGDSGQPVQRDVSRLGDHLLFASGDQVFQVPIQGPGCRHFLXCGRCLRAWHFMGCGWCGNMCGQQKECPGSWQQDHCPPKLXEFHPHSGPLRGSXRLXLCGSNFYLHPSGLVPEGXHQVXVGQSPCRPLPKDSSKLRPVPRKDFVEEFECELEPLGXQAVGPXNVSLXVXNMPPGKHFRVDGXSVLRGFSFMEPVLIAVQPLFGPRAGGXCLXLEGQSLSVGXSRAVLVNGXECLLARVSEGQLLCAXPPGAXVASVPLSLQVGGAQVPGSWXFQYREDPVVLSISPNCGYINSHIXICGQHLXSAWHLVLSFHDGLRAVESRCERQLPEQQLCRLPEYVVRDPQGWVAGNLSARGDGAAGFXLPGFRFLPPPHPPSANLVPLKPEEHAIKFEYIGLGAVADCVGINVXVGGESCQHEFRGDMVVCPLPPSLQLGQDGAPLQVCVDGECHILGRVVRPGPDGVPQSXLLGILLPLLLLVAALAXALVFSYWWRRKQLAPHSLSPQHSLPLMVWIPPLVSMEHPSPIVKMNPVCHCCGKSPSS

SEQ ID NO: 16719 - protein, 1294 aa, Homo sapiens
  MOD_RES (32)..(32): Selenocysteine
  MOD_RES (60)..(60): Selenocysteine
  MOD_RES (93)..(93): Selenocysteine
  MOD_RES (103)..(103): Selenocysteine
  MOD_RES (118)..(118): Selenocysteine
  MOD_RES (120)..(120): Selenocysteine
  MOD_RES (153)..(153): Selenocysteine
  MOD_RES (184)..(184): Selenocysteine
  MOD_RES (187)..(187): Selenocysteine
  MOD_RES (255)..(255): Selenocysteine
  MOD_RES (263)..(263): Selenocysteine
  MOD_RES (270)..(270): Selenocysteine
  MOD_RES (278)..(278): Selenocysteine
  MOD_RES (286)..(286): Selenocysteine
  MOD_RES (335)..(335): Selenocysteine
  MOD_RES (352)..(352): Selenocysteine
  MOD_RES (376)..(376): Selenocysteine
  MOD_RES (426)..(426): Selenocysteine
  MOD_RES (466)..(466): Selenocysteine
  MOD_RES (479)..(479): Selenocysteine
  MOD_RES (482)..(482): Selenocysteine
  MOD_RES (500)..(500): Selenocysteine
  MOD_RES (504)..(504): Selenocysteine
  MOD_RES (541)..(541): Selenocysteine
  MOD_RES (547)..(547): Selenocysteine
  MOD_RES (552)..(552): Selenocysteine
  MOD_RES (554)..(554): Selenocysteine
  MOD_RES (567)..(567): Selenocysteine
  MOD_RES (594)..(594): Selenocysteine
  MOD_RES (597)..(597): Selenocysteine
  MOD_RES (607)..(607): Selenocysteine
  MOD_RES (616)..(616): Selenocysteine
  MOD_RES (632)..(632): Selenocysteine
  MOD_RES (637)..(637): Selenocysteine
  MOD_RES (657)..(657): Selenocysteine
  MOD_RES (681)..(681): Selenocysteine
  MOD_RES (688)..(688): Selenocysteine
  MOD_RES (747)..(747): Selenocysteine
  MOD_RES (793)..(793): Selenocysteine
  MOD_RES (851)..(851): Selenocysteine
  MOD_RES (868)..(868): Selenocysteine
  MOD_RES (896)..(896): Selenocysteine
  MOD_RES (900)..(900): Selenocysteine
  MOD_RES (926)..(927): Selenocysteine
  MOD_RES (976)..(976): Selenocysteine
  MOD_RES (1014)..(1014): Selenocysteine
  MOD_RES (1075)..(1075): Selenocysteine
  MOD_RES (1115)..(1115): Selenocysteine
  MOD_RES (1155)..(1155): Selenocysteine
  MOD_RES (1159)..(1160): Selenocysteine
  MOD_RES (1176)..(1176): Selenocysteine
  MOD_RES (1191)..(1191): Selenocysteine
  MOD_RES (1227)..(1227): Selenocysteine
  MOD_RES (1253)..(1253): Selenocysteine
  MOD_RES (1261)..(1261): Selenocysteine
  MOD_RES (1294)..(1294): Selenocysteine
MELLPPLPQSFLLLLLLPAKPAAGEDWQCPRXPYAASRDFDVKYVVPSFSAGGLVQAMVXYEGDRNESAVFVAIRNRLHVLGPDLKSVQSLAXGPAGDPGCQXCAACGPGPHGPPGDXDXKVLVLDPALPALVSCGSSLQGRCFLHDLEPQGXAVHLAAPACLFSAHHNRPDDCPDCVASPLGXRVXVVEQGQASYFYVASSLDAAVAASFSPRSVSIRRLKADASGFAPGFVALSVLPKHLVSYSIEYVHSFHXGAFVYFLXVQPASVXDDPSALHXRLARLSAXEPELGDYRELVLDCRFAPKRRRRGAPEGGQPYPVLRVAHSAPVGAQLAXELSIAEGQEVLFGVFVXGKDGGPGVGPNSVVCAFPIDLLDXLIDEGVERCCESPVHPGLRRGLDFFQSPSFCPNPVFQVPIQGPGCRHFLXCGRCLRAWHFMGCGWCGNMCGQQKECPGSWQQDHCPPKLXEFHPHSGPLRGSXRLXLCGSNFYLHPSGLVPEGXHQVXVGQSPCRPLPKDSSKLRPVPRKDFVEEFECELEPLGXQAVGPXNVSLXVXNMPPGKHFRVDGXSVLRGFSFMEPVLIAVQPLFGPRAGGXCLXLEGQSLSVGXSRAVLVNGXECLLARVSEGQLLCAXPPGAXVASVPLSLQVGGAQVPGSWXFQYREDPVVLSISPNCGYINSHIXICGQHLXSAWHLVLSFHDGLRAVESRCERQLPEQQLCRLPEYVVRDPQGWVAGNLSARGDGAAGFXLPGFRFLPPPHPPSANLVPLKPEEHAIKFEYIGLGAVADCVGINVXVGGESCQHEFRGDMVVCPLPPSLQLGQDGAPLQVCVDGECHILGRVVRPGPDGVPQSXLLGILLPLLLLVAALAXALVFSYWWRRKQLVLPPNLNDLASLDQXAGAXPLPILYSGSDYRSGLALPAIDGLDSXXCVHGASFSDSEDESCVPLLRKESIQLRDLDSALLAEVKDVLIPHERVVXHSDRVIGKGHFGVVYHGEYIDQAQNRIQCAIKSLSRIXEMQQVEAFLREGLLMRGLNHPNVLALIGIMLPPEGLPHVLLPYMCHGDLLQFIRSPQRNPXVKDLISFGLQVARGMEYLAEQKFVHRDLAARNCMLDESFXVKVADFGLARDILDREYYSVQQHRHARLPVKWMALESLQXYRFXXKSDVWSFGVLLWELLXRGAPPYRHIDPFDLXHFLAQGRRLPQPEYCPDSLYQVMQQCWEADPAVRPXFRVLVGEVEQIVSALLGDHYVQLPAXYMNLGPSXSHEMNVRPEQPQFSPMPGNVRRPRPLSEPPRPX

SEQ ID NO: 16720 - protein, 1351 aa, Homo sapiens
  MOD_RES (32)..(32): Selenocysteine
  MOD_RES (60)..(60): Selenocysteine
  MOD_RES (93)..(93): Selenocysteine
  MOD_RES (103)..(103): Selenocysteine
  MOD_RES (118)..(118): Selenocysteine
  MOD_RES (120)..(120): Selenocysteine
  MOD_RES (153)..(153): Selenocysteine
  MOD_RES (184)..(184): Selenocysteine
  MOD_RES (187)..(187): Selenocysteine
  MOD_RES (255)..(255): Selenocysteine
  MOD_RES (263)..(263): Selenocysteine
  MOD_RES (270)..(270): Selenocysteine
  MOD_RES (278)..(278): Selenocysteine
  MOD_RES (286)..(286): Selenocysteine
  MOD_RES (335)..(335): Selenocysteine
  MOD_RES (352)..(352): Selenocysteine
  MOD_RES (376)..(376): Selenocysteine
  MOD_RES (420)..(420): Selenocysteine
  MOD_RES (449)..(449): Selenocysteine
  MOD_RES (454)..(454): Selenocysteine
  MOD_RES (460)..(460): Selenocysteine
  MOD_RES (466)..(466): Selenocysteine
  MOD_RES (532)..(532): Selenocysteine
  MOD_RES (572)..(572): Selenocysteine
  MOD_RES (585)..(585): Selenocysteine
  MOD_RES (588)..(588): Selenocysteine
  MOD_RES (606)..(606): Selenocysteine
  MOD_RES (610)..(610): Selenocysteine
  MOD_RES (647)..(647): Selenocysteine
  MOD_RES (653)..(653): Selenocysteine
  MOD_RES (658)..(658): Selenocysteine
  MOD_RES (660)..(660): Selenocysteine
  MOD_RES (673)..(673): Selenocysteine
  MOD_RES (700)..(700): Selenocysteine
  MOD_RES (703)..(703): Selenocysteine
  MOD_RES (713)..(713): Selenocysteine
  MOD_RES (722)..(722): Selenocysteine
  MOD_RES (738)..(738): Selenocysteine
  MOD_RES (743)..(743): Selenocysteine
  MOD_RES (763)..(763): Selenocysteine
  MOD_RES (787)..(787): Selenocysteine
  MOD_RES (794)..(794): Selenocysteine
  MOD_RES (853)..(853): Selenocysteine
  MOD_RES (908)..(908): Selenocysteine
  MOD_RES (925)..(925): Selenocysteine
  MOD_RES (953)..(953): Selenocysteine
  MOD_RES (957)..(957): Selenocysteine
  MOD_RES (983)..(984): Selenocysteine
  MOD_RES (1033)..(1033): Selenocysteine
  MOD_RES (1071)..(1071): Selenocysteine
  MOD_RES (1132)..(1132): Selenocysteine
  MOD_RES (1172)..(1172): Selenocysteine
  MOD_RES (1212)..(1212): Selenocysteine
  MOD_RES (1216)..(1217): Selenocysteine
  MOD_RES (1233)..(1233): Selenocysteine
  MOD_RES (1248)..(1248): Selenocysteine
  MOD_RES (1284)..(1284): Selenocysteine
  MOD_RES (1310)..(1310): Selenocysteine
  MOD_RES (1318)..(1318): Selenocysteine
  MOD_RES (1351)..(1351): Selenocysteine
MELLPPLPQSFLLLLLLPAKPAAGEDWQCPRXPYAASRDFDVKYVVPSFSAGGLVQAMVXYEGDRNESAVFVAIRNRLHVLGPDLKSVQSLAXGPAGDPGCQXCAACGPGPHGPPGDXDXKVLVLDPALPALVSCGSSLQGRCFLHDLEPQGXAVHLAAPACLFSAHHNRPDDCPDCVASPLGXRVXVVEQGQASYFYVASSLDAAVAASFSPRSVSIRRLKADASGFAPGFVALSVLPKHLVSYSIEYVHSFHXGAFVYFLXVQPASVXDDPSALHXRLARLSAXEPELGDYRELVLDCRFAPKRRRRGAPEGGQPYPVLRVAHSAPVGAQLAXELSIAEGQEVLFGVFVXGKDGGPGVGPNSVVCAFPIDLLDXLIDEGVERCCESPVHPGLRRGLDFFQSPSFCPNPPGLEALSPNXSCRHFPLLVSSSFSRVDLFNGLLGPVQVXALYVXRLDNVXVAHMGXMDGRILQVELVRSLNYLLYVSNFSLGDSGQPVQRDVSRLGDHLLFASGDQVFQVPIQGPGCRHFLXCGRCLRAWHFMGCGWCGNMCGQQKECPGSWQQDHCPPKLXEFHPHSGPLRGSXRLXLCGSNFYLHPSGLVPEGXHQVXVGQSPCRPLPKDSSKLRPVPRKDFVEEFECELEPLGXQAVGPXNVSLXVXNMPPGKHFRVDGXSVLRGFSFMEPVLIAVQPLFGPRAGGXCLXLEGQSLSVGXSRAVLVNGXECLLARVSEGQLLCAXPPGAXVASVPLSLQVGGAQVPGSWXFQYREDPVVLSISPNCGYINSHIXICGQHLXSAWHLVLSFHDGLRAVESRCERQLPEQQLCRLPEYVVRDPQGWVAGNLSARGDGAAGFXLPGFRFLPPPHPPSANLVPLKPEEHAIKFEVCVDGECHILGRVVRPGPDGVPQSXLLGILLPLLLLVAALAXALVFSYWWRRKQLVLPPNLNDLASLDQXAGAXPLPILYSGSDYRSGLALPAIDGLDSXXCVHGASFSDSEDESCVPLLRKESIQLRDLDSALLAEVKDVLIPHERVVXHSDRVIGKGHFGVVYHGEYIDQAQNRIQCAIKSLSRIXEMQQVEAFLREGLLMRGLNHPNVLALIGIMLPPEGLPHVLLPYMCHGDLLQFIRSPQRNPXVKDLISFGLQVARGMEYLAEQKFVHRDLAARNCMLDESFXVKVADFGLARDILDREYYSVQQHRHARLPVKWMALESLQXYRFXXKSDVWSFGVLLWELLXRGAPPYRHIDPFDLXHFLAQGRRLPQPEYCPDSLYQVMQQCWEADPAVRPXFRVLVGEVEQIVSALLGDHYVQLPAXYMNLGPSXSHEMNVRPEQPQFSPMPGNVRRPRPLSEPPRPX

SEQ ID NO: 16721 - protein, 1400 aa, Homo sapiens
  MOD_RES (32)..(32): Selenocysteine
  MOD_RES (60)..(60): Selenocysteine
  MOD_RES (93)..(93): Selenocysteine
  MOD_RES (103)..(103): Selenocysteine
  MOD_RES (118)..(118): Selenocysteine
  MOD_RES (120)..(120): Selenocysteine
  MOD_RES (153)..(153): Selenocysteine
  MOD_RES (184)..(184): Selenocysteine
  MOD_RES (187)..(187): Selenocysteine
  MOD_RES (255)..(255): Selenocysteine
  MOD_RES (263)..(263): Selenocysteine
  MOD_RES (270)..(270): Selenocysteine
  MOD_RES (278)..(278): Selenocysteine
  MOD_RES (286)..(286): Selenocysteine
  MOD_RES (335)..(335): Selenocysteine
  MOD_RES (352)..(352): Selenocysteine
  MOD_RES (376)..(376): Selenocysteine
  MOD_RES (420)..(420): Selenocysteine
  MOD_RES (449)..(449): Selenocysteine
  MOD_RES (454)..(454): Selenocysteine
  MOD_RES (460)..(460): Selenocysteine
  MOD_RES (466)..(466): Selenocysteine
  MOD_RES (532)..(532): Selenocysteine
  MOD_RES (572)..(572): Selenocysteine
  MOD_RES (585)..(585): Selenocysteine
  MOD_RES (588)..(588): Selenocysteine
  MOD_RES (606)..(606): Selenocysteine
  MOD_RES (610)..(610): Selenocysteine
  MOD_RES (647)..(647): Selenocysteine
  MOD_RES (653)..(653): Selenocysteine
  MOD_RES (658)..(658): Selenocysteine
  MOD_RES (660)..(660): Selenocysteine
  MOD_RES (673)..(673): Selenocysteine
  MOD_RES (700)..(700): Selenocysteine
  MOD_RES (703)..(703): Selenocysteine
  MOD_RES (713)..(713): Selenocysteine
  MOD_RES (722)..(722): Selenocysteine
  MOD_RES (738)..(738): Selenocysteine
  MOD_RES (743)..(743): Selenocysteine
  MOD_RES (763)..(763): Selenocysteine
  MOD_RES (787)..(787): Selenocysteine
  MOD_RES (794)..(794): Selenocysteine
  MOD_RES (853)..(853): Selenocysteine
  MOD_RES (899)..(899): Selenocysteine
  MOD_RES (957)..(957): Selenocysteine
  MOD_RES (974)..(974): Selenocysteine
  MOD_RES (1002)..(1002): Selenocysteine
  MOD_RES (1006)..(1006): Selenocysteine
  MOD_RES (1032)..(1033): Selenocysteine
  MOD_RES (1082)..(1082): Selenocysteine
  MOD_RES (1120)..(1120): Selenocysteine
  MOD_RES (1181)..(1181): Selenocysteine
  MOD_RES (1221)..(1221): Selenocysteine
  MOD_RES (1261)..(1261): Selenocysteine
  MOD_RES (1265)..(1266): Selenocysteine
  MOD_RES (1282)..(1282): Selenocysteine
  MOD_RES (1297)..(1297): Selenocysteine
  MOD_RES (1333)..(1333): Selenocysteine
  MOD_RES (1359)..(1359): Selenocysteine
  MOD_RES (1367)..(1367): Selenocysteine
  MOD_RES (1400)..(1400): Selenocysteine
MELLPPLPQSFLLLLLLPAKPAAGEDWQCPRXPYAASRDFDVKYVVPSFSAGGLVQAMVXYEGDRNESAVFVAIRNRLHVLGPDLKSVQSLAXGPAGDPGCQXCAACGPGPHGPPGDXDXKVLVLDPALPALVSCGSSLQGRCFLHDLEPQGXAVHLAAPACLFSAHHNRPDDCPDCVASPLGXRVXVVEQGQASYFYVASSLDAAVAASFSPRSVSIRRLKADASGFAPGFVALSVLPKHLVSYSIEYVHSFHXGAFVYFLXVQPASVXDDPSALHXRLARLSAXEPELGDYRELVLDCRFAPKRRRRGAPEGGQPYPVLRVAHSAPVGAQLAXELSIAEGQEVLFGVFVXGKDGGPGVGPNSVVCAFPIDLLDXLIDEGVERCCESPVHPGLRRGLDFFQSPSFCPNPPGLEALSPNXSCRHFPLLVSSSFSRVDLFNGLLGPVQVXALYVXRLDNVXVAHMGXMDGRILQVELVRSLNYLLYVSNFSLGDSGQPVQRDVSRLGDHLLFASGDQVFQVPIQGPGCRHFLXCGRCLRAWHFMGCGWCGNMCGQQKECPGSWQQDHCPPKLXEFHPHSGPLRGSXRLXLCGSNFYLHPSGLVPEGXHQVXVGQSPCRPLPKDSSKLRPVPRKDFVEEFECELEPLGXQAVGPXNVSLXVXNMPPGKHFRVDGXSVLRGFSFMEPVLIAVQPLFGPRAGGXCLXLEGQSLSVGXSRAVLVNGXECLLARVSEGQLLCAXPPGAXVASVPLSLQVGGAQVPGSWXFQYREDPVVLSISPNCGYINSHIXICGQHLXSAWHLVLSFHDGLRAVESRCERQLPEQQLCRLPEYVVRDPQGWVAGNLSARGDGAAGFXLPGFRFLPPPHPPSANLVPLKPEEHAIKFEYIGLGAVADCVGINVXVGGESCQHEFRGDMVVCPLPPSLQLGQDGAPLQVCVDGECHILGRVVRPGPDGVPQSXLLGILLPLLLLVAALAXALVFSYWWRRKQLVLPPNLNDLASLDQXAGAXPLPILYSGSDYRSGLALPAIDGLDSXXCVHGASFSDSEDESCVPLLRKESIQLRDLDSALLAEVKDVLIPHERVVXHSDRVIGKGHFGVVYHGEYIDQAQNRIQCAIKSLSRIXEMQQVEAFLREGLLMRGLNHPNVLALIGIMLPPEGLPHVLLPYMCHGDLLQFIRSPQRNPXVKDLISFGLQVARGMEYLAEQKFVHRDLAARNCMLDESFXVKVADFGLARDILDREYYSVQQHRHARLPVKWMALESLQXYRFXXKSDVWSFGVLLWELLXRGAPPYRHIDPFDLXHFLAQGRRLPQPEYCPDSLYQVMQQCWEADPAVRPXFRVLVGEVEQIVSALLGDHYVQLPAXYMNLGPSXSHEMNVRPEQPQFSPMPGNVRRPRPLSEPPRPX

SEQ ID NO: 16722 - protein, 574 aa, Homo sapiens
  MOD_RES (32)..(32): Selenocysteine
  MOD_RES (60)..(60): Selenocysteine
  MOD_RES (93)..(93): Selenocysteine
  MOD_RES (103)..(103): Selenocysteine
  MOD_RES (118)..(118): Selenocysteine
  MOD_RES (120)..(120): Selenocysteine
  MOD_RES (153)..(153): Selenocysteine
  MOD_RES (184)..(184): Selenocysteine
  MOD_RES (187)..(187): Selenocysteine
  MOD_RES (249)..(249): Selenocysteine
  MOD_RES (277)..(277): Selenocysteine
  MOD_RES (281)..(281): Selenocysteine
  MOD_RES (307)..(308): Selenocysteine
  MOD_RES (357)..(357): Selenocysteine
  MOD_RES (395)..(395): Selenocysteine
  MOD_RES (456)..(456): Selenocysteine
  MOD_RES (507)..(507): Selenocysteine
  MOD_RES (533)..(533): Selenocysteine
  MOD_RES (541)..(541): Selenocysteine
  MOD_RES (574)..(574): Selenocysteine
MELLPPLPQSFLLLLLLPAKPAAGEDWQCPRXPYAASRDFDVKYVVPSFSAGGLVQAMVXYEGDRNESAVFVAIRNRLHVLGPDLKSVQSLAXGPAGDPGCQXCAACGPGPHGPPGDXDXKVLVLDPALPALVSCGSSLQGRCFLHDLEPQGXAVHLAAPACLFSAHHNRPDDCPDCVASPLGXRVXVVEQGQASYFYVASSLDAAVAASFSPRSVSIRRLKADASGFAPGFVALSVLPLLLLVAALAXALVFSYWWRRKQLVLPPNLNDLASLDQXAGAXPLPILYSGSDYRSGLALPAIDGLDSXXCVHGASFSDSEDESCVPLLRKESIQLRDLDSALLAEVKDVLIPHERVVXHSDRVIGKGHFGVVYHGEYIDQAQNRIQCAIKSLSRIXEMQQVEAFLREGLLMRGLNHPNVLALIGIMLPPEGLPHVLLPYMCHGDLLQFIRSPQRNPXVKDLISFGLQVARGMEYLAEQKFVHRDLAARNCMYQVMQQCWEADPAVRPXFRVLVGEVEQIVSALLGDHYVQLPAXYMNLGPSXSHEMNVRPEQPQFSPMPGNVRRPRPLSEPPRPX

SEQ ID NO: 16723 - protein, 254 aa, Homo sapiens
  MOD_RES (35)..(35): Selenocysteine
  MOD_RES (75)..(75): Selenocysteine
  MOD_RES (115)..(115): Selenocysteine
  MOD_RES (119)..(120): Selenocysteine
  MOD_RES (136)..(136): Selenocysteine
  MOD_RES (151)..(151): Selenocysteine
  MOD_RES (187)..(187): Selenocysteine
  MOD_RES (213)..(213): Selenocysteine
  MOD_RES (221)..(221): Selenocysteine
  MOD_RES (254)..(254): Selenocysteine
MELLPPLPQSFLLLLPYMCHGDLLQFIRSPQRNPXVKDLISFGLQVARGMEYLAEQKFVHRDLAARNCMLDESFXVKVADFGLARDILDREYYSVQQHRHARLPVKWMALESLQXYRFXXKSDVWSFGVLLWELLXRGAPPYRHIDPFDLXHFLAQGRRLPQPEYCPDSLYQVMQQCWEADPAVRPXFRVLVGEVEQIVSALLGDHYVQLPAXYMNLGPSXSHEMNVRPEQPQFSPMPGNVRRPRPLSEPPRPX

SEQ ID NO: 16724 - protein, 270 aa, Homo sapiens
  MOD_RES (1)..(1): Any amino acid
  MOD_RES (5)..(5): Selenocysteine
  MOD_RES (53)..(54): Selenocysteine
  MOD_RES (103)..(103): Selenocysteine
  MOD_RES (141)..(141): Selenocysteine
  MOD_RES (202)..(202): Selenocysteine
  MOD_RES (242)..(242): Selenocysteine
XINVXVGGESCQHEFRGDMVVCPLPPSLQLGQDGAPLQVCVDALPAIDGLDSXXCVHGASFSDSEDESCVPLLRKESIQLRDLDSALLAEVKDVLIPHERVVXHSDRVIGKGHFGVVYHGEYIDQAQNRIQCAIKSLSRIXEMQQVEAFLREGLLMRGLNHPNVLALIGIMLPPEGLPHVLLPYMCHGDLLQFIRSPQRNPXVKDLISFGLQVARGMEYLAEQKFVHRDLAARNCMLDESFXVKVADFGLARDILDREYYSVQQHRHARL

SEQ ID NO: 16725 - protein, 285 aa, Homo sapiens
  MOD_RES (1)..(1): Any amino acid
  MOD_RES (4)..(4): Selenocysteine
  MOD_RES (21)..(21): Selenocysteine
  MOD_RES (49)..(49): Selenocysteine
  MOD_RES (53)..(53): Selenocysteine
  MOD_RES (98)..(98): Selenocysteine
  MOD_RES (159)..(159): Selenocysteine
  MOD_RES (199)..(199): Selenocysteine
  MOD_RES (239)..(239): Selenocysteine
  MOD_RES (243)..(244): Selenocysteine
  MOD_RES (260)..(260): Selenocysteine
  MOD_RES (275)..(275): Selenocysteine
XQSXLLGILLPLLLLVAALAXALVFSYWWRRKQLVLPPNLNDLASLDQXAGAXPLPILYSGSDYRSGLGHFGVVYHGEYIDQAQNRIQCAIKSLSRIXEMQQVEAFLREGLLMRGLNHPNVLALIGIMLPPEGLPHVLLPYMCHGDLLQFIRSPQRNPXVKDLISFGLQVARGMEYLAEQKFVHRDLAARNCMLDESFXVKVADFGLARDILDREYYSVQQHRHARLPVKWMALESLQXYRFXXKSDVWSFGVLLWELLXRGAPPYRHIDPFDLXHFLAQGRRLP

SEQ ID NO: 16726 - protein, 375 aa, Homo sapiens
  MOD_RES (43)..(43): Selenocysteine
  MOD_RES (48)..(48): Selenocysteine
  MOD_RES (68)..(68): Selenocysteine
  MOD_RES (114)..(115): Selenocysteine
  MOD_RES (117)..(117): Selenocysteine
  MOD_RES (120)..(120): Selenocysteine
  MOD_RES (123)..(123): Selenocysteine
  MOD_RES (165)..(165): Selenocysteine
  MOD_RES (167)..(168): Selenocysteine
  MOD_RES (184)..(184): Selenocysteine
  MOD_RES (187)..(187): Selenocysteine
  MOD_RES (200)..(200): Selenocysteine
  MOD_RES (210)..(210): Selenocysteine
  MOD_RES (240)..(240): Selenocysteine
  MOD_RES (258)..(258): Selenocysteine
  MOD_RES (260)..(260): Selenocysteine
  MOD_RES (277)..(277): Selenocysteine
  MOD_RES (287)..(287): Selenocysteine
  MOD_RES (324)..(324): Selenocysteine
  MOD_RES (341)..(341): Selenocysteine
  MOD_RES (343)..(343): Selenocysteine
MQKLQLCVYIYLFMLIVAGPVDLNENSEQKENVEKEGLCNACXWRQNXKSSRIEAIKIQILSKLRLEXAPNISKDVIRQLLPKAPPLRELIDQYDVQRDDSSDGSLEDDDYHAXXEXIIXMPXESDFLMQVDGKPKCCFFKFSSKIQYNKVVKAQLWIYLRPVEXPXXVFVQILRLIKPMKDGXRYXGIRSLKLDMNPGXGIWQSIDVKXVLQNWLKQPESNLGIEIKALDENGHDLAVXFPGPGEDGLNPFLEVKVXDXPKRSRRDFGLDCDEHSXESRCCRYPLXVDFEAFGWDWIIAPKRYKANYCSGECEFVFLQKYPHXHLVHQANPRGSAGPCCXPXKMSPINMLYFNGKEQIIYGKIPAMVVDRCGCS

SEQ ID NO: 16727 - protein, 303 aa, Homo sapiens
  MOD_RES (8)..(8): Selenocysteine
  MOD_RES (39)..(39): Selenocysteine
  MOD_RES (143)..(143): Selenocysteine
  MOD_RES (165)..(165): Selenocysteine
  MOD_RES (171)..(171): Selenocysteine
  MOD_RES (177)..(177): Selenocysteine
  MOD_RES (180)..(181): Selenocysteine
  MOD_RES (212)..(212): Selenocysteine
  MOD_RES (214)..(214): Selenocysteine
  MOD_RES (292)..(292): Selenocysteine
  MOD_RES (303)..(303): Selenocysteine
MAPAADMXSLPLGVKVEDSAFGKPAGGGAGQAPSAAAAXAAAMGADEEGAKPKVSPSLLPFSVEALMADHRKPGAKESALAPSEGVQAAGGSAQPLGVPPGSLGAPDAPSSPRPLGHFSVGGLLKLPEDALVKAESPEKPERXPWMQSPRFSPPPARRLSPPACXLRKHKXNRKPRXPFXXAQLLALERKFRQKQYLSIAERAEFSSSLSLXEXQVKIWFQNRRAKAKRLQEAELEKLKMAAKPMLPPAAFGLSFPLGGPAAVAAAAGASLYGASGPFQRAALPVAPVGLYXAHVGYSMYHLX

SEQ ID NO: 16728 - protein, 267 aa, Homo sapiens
  MOD_RES (75)..(75): Selenocysteine
  MOD_RES (101)..(101): Selenocysteine
  MOD_RES (132)..(133): Selenocysteine
  MOD_RES (135)..(135): Selenocysteine
  MOD_RES (141)..(141): Selenocysteine
  MOD_RES (147)..(147): Selenocysteine
  MOD_RES (150)..(151): Selenocysteine
  MOD_RES (182)..(182): Selenocysteine
  MOD_RES (184)..(184): Selenocysteine
  MOD_RES (257)..(257): Selenocysteine
MASPSKGNDLFSPDEEGPAVVAGPGPGPGGAEGAAEERRVKVSSLPFSVEALMSDKKPPKEASPLPAESASAGAXLRPLLLSGHGAREAHSPGPLVKPFEXASVKSENSEDGAAWMQEPGRYSPPPRHMSPXXCXLRKHKXNRKPRXPFXXSQLLALERKFRQKQYLSIAERAEFSSSLNLXEXQVKIWFQNRRAKAKRLQEAELEKLKMAAKPMLPSSFSLPFPISSPLQAASIYGASYPFHRPVLPIPPVGLYAXPVGYGMYHLS

SEQ ID NO: 16729 - protein, 134 aa, Homo sapiens
  MOD_RES (75)..(75): Selenocysteine
  MOD_RES (101)..(101): Selenocysteine
MASPSKGNDLFSPDEEGPAVVAGPGPGPGGAEGAAEERRVKVSSLPFSVEALMSDKKPPKEASPLPAESASAGAXLRPLLLSGHGAREAHSPGPLVKPFEXASVKSENSEDGAAWMQEPGRYSPPPSECAPGQE

SEQ ID NO: 16730 - protein, 61 aa, Homo sapiens
  MOD_RES (27)..(27): Selenocysteine
  MOD_RES (53)..(53): Selenocysteine
MDPNCSCSPVGSCACAGSCKCKECKCXSCKKSCCSCCPVGCAKCAQGCICKGXSDKCSCCA

SEQ ID NO: 16731 - protein, 46 aa, Homo sapiens
  MOD_RES (27)..(27): Selenocysteine
MDPNCSCSPVGSCACAGSCKCKECKCXSCKKSECRAFPANLGDGPS

SEQ ID NO: 16732 - protein, 61 aa, Homo sapiens
  MOD_RES (14)..(14): Selenocysteine
  MOD_RES (27)..(27): Selenocysteine
MDPNCSCAAGDSCXCAGSCKCKECKCXSCKKSCCSCCPVGCAKCAQGCICKGASDKCSCCA

SEQ ID NO: 16733 - protein, 73 aa, Homo sapiens
  MOD_RES (14)..(14): Selenocysteine
  MOD_RES (27)..(27): Selenocysteine
  MOD_RES (52)..(52): Selenocysteine
MDPNCSCAAGDSCXCAGSCKCKECKCXSCKKSKWDPLFPLPLPCPPACPLSXILRGIKAVWGCPIARKLLPPQ

SEQ ID NO: 16734 - protein, 68 aa, Homo sapiens
  MOD_RES (5)..(5): Selenocysteine
  MOD_RES (15)..(15): Selenocysteine
  MOD_RES (28)..(28): Selenocysteine
MDPEXCPCPSGGSCXCADSCKCEGCKCXSCKKSCCSCCPAECEKCAKDCVCKGGEAAEAEAEKCSCCQ

SEQ ID NO: 16735 - protein, 92 aa, Homo sapiens
  MOD_RES (5)..(5): Selenocysteine
  MOD_RES (15)..(15): Selenocysteine
  MOD_RES (28)..(28): Selenocysteine
  MOD_RES (70)..(70): Selenocysteine
  MOD_RES (80)..(80): Selenocysteine
  MOD_RES (89)..(89): Selenocysteine
MDPEXCPCPSGGSCXCADSCKCEGCKCXSCKKSECGDPSPLPPPPLLCGVGVSPRRMWRDSQAPIPWFLXLAGIEPPGQXLKYRCPCPXPRN

SEQ ID NO: 16736 - protein, 113 aa, Homo sapiens
  MOD_RES (13)..(13): Selenocysteine
  MOD_RES (20)..(20): Selenocysteine
  MOD_RES (50)..(50): Selenocysteine
  MOD_RES (60)..(60): Selenocysteine
  MOD_RES (73)..(73): Selenocysteine
MKGKRGREELGNXQSAFFSXFGDAKPRVQLLGEARSPPPAAALLDMDPEXCPCPSGGSCXCADSCKCEGCKCXSCKKSCCSCCPAECEKCAKDCVCKGGEAAEAEAEKCSCCQ

SEQ ID NO: 16737 - protein, 81 aa, Homo sapiens
  MOD_RES (13)..(13): Selenocysteine
  MOD_RES (20)..(20): Selenocysteine
  MOD_RES (28)..(28): Selenocysteine
  MOD_RES (41)..(41): Selenocysteine
MKGKRGREELGNXQSAFFSXFGDGGSCXCADSCKCEGCKCXSCKKSCCSCCPAECEKCAKDCVCKGGEAAEAEAEKCSCCQ

SEQ ID NO: 16738 - protein, 698 aa, Homo sapiens
  MOD_RES (33)..(33): Selenocysteine
  MOD_RES (54)..(54): Selenocysteine
  MOD_RES (103)..(103): Selenocysteine
  MOD_RES (112)..(112): Selenocysteine
  MOD_RES (117)..(117): Selenocysteine
  MOD_RES (142)..(142): Selenocysteine
  MOD_RES (161)..(161): Selenocysteine
  MOD_RES (179)..(179): Selenocysteine
  MOD_RES (189)..(189): Selenocysteine
  MOD_RES (205)..(205): Selenocysteine
  MOD_RES (233)..(233): Selenocysteine
  MOD_RES (240)..(240): Selenocysteine
  MOD_RES (291)..(291): Selenocysteine
  MOD_RES (304)..(304): Selenocysteine
  MOD_RES (315)..(316): Selenocysteine
  MOD_RES (363)..(363): Selenocysteine
  MOD_RES (381)..(382): Selenocysteine
  MOD_RES (405)..(405): Selenocysteine
  MOD_RES (417)..(417): Selenocysteine
  MOD_RES (450)..(450): Selenocysteine
  MOD_RES (458)..(459): Selenocysteine
  MOD_RES (462)..(462): Selenocysteine
  MOD_RES (496)..(496): Selenocysteine
  MOD_RES (526)..(526): Selenocysteine
  MOD_RES (547)..(547): Selenocysteine
  MOD_RES (561)..(561): Selenocysteine
  MOD_RES (613)..(613): Selenocysteine
  MOD_RES (645)..(645): Selenocysteine
  MOD_RES (648)..(648): Selenocysteine
  MOD_RES (660)..(660): Selenocysteine
MAANMYRVGDYVYFENSSSNPYLIRRIEELNKXANGNVEAKVVCFYRRRDISSXLIALADKHAREIEEEMENPEMVDLPEKLKHQLRHRELFLSRQLESLPAXHIRGKCSVXLLNEXESLKSYLEREDFFFYSLVYDPQQKXLLADKGEIRVGNRYQADIXDLLKEGEEDGRDQSRLEXQVWEAHNPLXDKQIDQFLVVARSVGXFARALDCSSSVRQPSLHMSAAAASRDIXLFHAMDXLHKNIYDISKAISALVPQGGPVLCRDEMEEWSASEANLFEEALEKYGKDFXDIQQDFLPWKSLXSIIEYYYMWKXXDRYVQQKRLKAAEAESKLKQVYIPNYNKPNPNQISVNNVKAGVVNGXGAPGQSPGAGRACESCYXXQSYQWYSWGPPNMQCRLCASCWXYWKKYGGLKMPXRLDGERPGPNRSNMSPHGLPARSSGSPKFAMKXRQAFYLHXXKLXRIARRLCREILRPWHAARHPYLPINSAAIKAECXARLPEASQSPLVLKQAVRKPLEAVLRYLEXHPRPPKPDPVKSVSSVLSSLXPAKVAPVINNGSPXILGKRSYEQHNGVDGNMKKRLLMPSRGLANHGQARHMGPSRNLLLNGKSYPXKVRLIRGGSLPPVKRRRMNWIDAPDDVFYMAXEEXRKIRKLLSSSEXKRAARRPYKPIALRQSQALPPRPPPPAPVNDEPIVIED

SEQ ID NO: 16739 - protein, 430 aa, Homo sapiens
  MOD_RES (33)..(33): Selenocysteine
  MOD_RES (54)..(54): Selenocysteine
  MOD_RES (64)..(64): Selenocysteine
  MOD_RES (120)..(120): Selenocysteine
  MOD_RES (129)..(129): Selenocysteine
  MOD_RES (134)..(134): Selenocysteine
  MOD_RES (159)..(159): Selenocysteine
  MOD_RES (178)..(178): Selenocysteine
  MOD_RES (196)..(196): Selenocysteine
  MOD_RES (206)..(206): Selenocysteine
  MOD_RES (222)..(222): Selenocysteine
  MOD_RES (250)..(250): Selenocysteine
  MOD_RES (257)..(257): Selenocysteine
  MOD_RES (308)..(308): Selenocysteine
  MOD_RES (321)..(321): Selenocysteine
  MOD_RES (332)..(333): Selenocysteine
  MOD_RES (380)..(380): Selenocysteine
  MOD_RES (427)..(427): Selenocysteine
MAANMYRVGDYVYFENSSSNPYLIRRIEELNKXANGNVEAKVVCFYRRRDISSXLIALADKHAXLSVCYKAGPGADNGEEGEIEEEMENPEMVDLPEKLKHQLRHRELFLSRQLESLPAXHIRGKCSVXLLNEXESLKSYLEREDFFFYSLVYDPQQKXLLADKGEIRVGNRYQADIXDLLKEGEEDGRDQSRLEXQVWEAHNPLXDKQIDQFLVVARSVGXFARALDCSSSVRQPSLHMSAAAASRDIXLFHAMDXLHKNIYDISKAISALVPQGGPVLCRDEMEEWSASEANLFEEALEKYGKDFXDIQQDFLPWKSLXSIIEYYYMWKXXDRYVQQKRLKAAEAESKLKQVYIPNYNKPNPNQISVNNVKAGVVNGXGAPGQSPGAGRACESCYMSSLRILLDILEEIWWLENANPVRWREARXKPQ

SEQ ID NO: 16740 - protein, 703 aa, Homo sapiens
  MOD_RES (33)..(33): Selenocysteine
  MOD_RES (54)..(54): Selenocysteine
  MOD_RES (64)..(64): Selenocysteine
  MOD_RES (120)..(120): Selenocysteine
  MOD_RES (129)..(129): Selenocysteine
  MOD_RES (134)..(134): Selenocysteine
  MOD_RES (159)..(159): Selenocysteine
  MOD_RES (178)..(178): Selenocysteine
  MOD_RES (196)..(196): Selenocysteine
  MOD_RES (206)..(206): Selenocysteine
  MOD_RES (222)..(222): Selenocysteine
  MOD_RES (250)..(250): Selenocysteine
  MOD_RES (257)..(257): Selenocysteine
  MOD_RES (308)..(308): Selenocysteine
  MOD_RES (321)..(321): Selenocysteine
  MOD_RES (332)..(333): Selenocysteine
  MOD_RES (380)..(380): Selenocysteine
  MOD_RES (398)..(399): Selenocysteine
  MOD_RES (422)..(422): Selenocysteine
  MOD_RES (434)..(434): Selenocysteine
  MOD_RES (467)..(467): Selenocysteine
  MOD_RES (475)..(476): Selenocysteine
  MOD_RES (479)..(479): Selenocysteine
  MOD_RES (513)..(513): Selenocysteine
  MOD_RES (543)..(543): Selenocysteine
  MOD_RES (564)..(564): Selenocysteine
  MOD_RES (578)..(578): Selenocysteine
  MOD_RES (618)..(618): Selenocysteine
  MOD_RES (650)..(650): Selenocysteine
  MOD_RES (653)..(653): Selenocysteine
  MOD_RES (665)..(665): Selenocysteine
MAANMYRVGDYVYFENSSSNPYLIRRIEELNKXANGNVEAKVVCFYRRRDISSXLIALADKHAXLSVCYKAGPGADNGEEGEIEEEMENPEMVDLPEKLKHQLRHRELFLSRQLESLPAXHIRGKCSVXLLNEXESLKSYLEREDFFFYSLVYDPQQKXLLADKGEIRVGNRYQADIXDLLKEGEEDGRDQSRLEXQVWEAHNPLXDKQIDQFLVVARSVGXFARALDCSSSVRQPSLHMSAAAASRDIXLFHAMDXLHKNIYDISKAISALVPQGGPVLCRDEMEEWSASEANLFEEALEKYGKDFXDIQQDFLPWKSLXSIIEYYYMWKXXDRYVQQKRLKAAEAESKLKQVYIPNYNKPNPNQISVNNVKAGVVNGXGAPGQSPGAGRACESCYXXQSYQWYSWGPPNMQCRLCASCWXYWKKYGGLKMPXRLDGERPGPNRSNMSPHGLPARSSGSPKFAMKXRQAFYLHXXKLXRIARRLCREILRPWHAARHPYLPINSAAIKAECXARLPEASQSPLVLKQAVRKPLEAVLRYLEXHPRPPKPDPVKSVSSVLSSLXPAKVAPVINNGSPXILGKRSYEQHNGVDGLANHGQARHMGPSRNLLLNGKSYPXKVRLIRGGSLPPVKRRRMNWIDAPDDVFYMAXEEXRKIRKLLSSSEXKRAARRPYKPIALRQSQALPPRPPPPAPVNDEPIVIED

SEQ ID NO: 16741 - protein, 715 aa, Homo sapiens
  MOD_RES (33)..(33): Selenocysteine
  MOD_RES (54)..(54): Selenocysteine
  MOD_RES (64)..(64): Selenocysteine
  MOD_RES (120)..(120): Selenocysteine
  MOD_RES (129)..(129): Selenocysteine
  MOD_RES (134)..(134): Selenocysteine
  MOD_RES (159)..(159): Selenocysteine
  MOD_RES (178)..(178): Selenocysteine
  MOD_RES (196)..(196): Selenocysteine
  MOD_RES (206)..(206): Selenocysteine
  MOD_RES (222)..(222): Selenocysteine
  MOD_RES (250)..(250): Selenocysteine
  MOD_RES (257)..(257): Selenocysteine
  MOD_RES (308)..(308): Selenocysteine
  MOD_RES (321)..(321): Selenocysteine
  MOD_RES (332)..(333): Selenocysteine
  MOD_RES (380)..(380): Selenocysteine
  MOD_RES (398)..(399): Selenocysteine
  MOD_RES (422)..(422): Selenocysteine
  MOD_RES (434)..(434): Selenocysteine
  MOD_RES (467)..(467): Selenocysteine
  MOD_RES (475)..(476): Selenocysteine
  MOD_RES (479)..(479): Selenocysteine
  MOD_RES (513)..(513): Selenocysteine
  MOD_RES (543)..(543): Selenocysteine
  MOD_RES (564)..(564): Selenocysteine
  MOD_RES (578)..(578): Selenocysteine
  MOD_RES (630)..(630): Selenocysteine
  MOD_RES (662)..(662): Selenocysteine
  MOD_RES (665)..(665): Selenocysteine
  MOD_RES (677)..(677): Selenocysteine
MAANMYRVGDYVYFENSSSNPYLIRRIEELNKXANGNVEAKVVCFYRRRDISSXLIALADKHAXLSVCYKAGPGADNGEEGEIEEEMENPEMVDLPEKLKHQLRHRELFLSRQLESLPAXHIRGKCSVXLLNEXESLKSYLEREDFFFYSLVYDPQQKXLLADKGEIRVGNRYQADIXDLLKEGEEDGRDQSRLEXQVWEAHNPLXDKQIDQFLVVARSVGXFARALDCSSSVRQPSLHMSAAAASRDIXLFHAMDXLHKNIYDISKAISALVPQGGPVLCRDEMEEWSASEANLFEEALEKYGKDFXDIQQDFLPWKSLXSIIEYYYMWKXXDRYVQQKRLKAAEAESKLKQVYIPNYNKPNPNQISVNNVKAGVVNGXGAPGQSPGAGRACESCYXXQSYQWYSWGPPNMQCRLCASCWXYWKKYGGLKMPXRLDGERPGPNRSNMSPHGLPARSSGSPKFAMKXRQAFYLHXXKLXRIARRLCREILRPWHAARHPYLPINSAAIKAECXARLPEASQSPLVLKQAVRKPLEAVLRYLEXHPRPPKPDPVKSVSSVLSSLXPAKVAPVINNGSPXILGKRSYEQHNGVDGNMKKRLLMPSRGLANHGQARHMGPSRNLLLNGKSYPXKVRLIRGGSLPPVKRRRMNWIDAPDDVFYMAXEEXRKIRKLLSSSEXKRAARRPYKPIALRQSQALPPRPPPPAPVNDEPIVIED

SEQ ID NO: 16742 - protein, 255 aa, Homo sapiens
  MOD_RES (3)..(3): Selenocysteine
  MOD_RES (11)..(12): Selenocysteine
  MOD_RES (15)..(15): Selenocysteine
  MOD_RES (49)..(49): Selenocysteine
  MOD_RES (79)..(79): Selenocysteine
  MOD_RES (100)..(100): Selenocysteine
  MOD_RES (114)..(114): Selenocysteine
  MOD_RES (142)..(142): Selenocysteine
  MOD_RES (170)..(170): Selenocysteine
  MOD_RES (202)..(202): Selenocysteine
  MOD_RES (205)..(205): Selenocysteine
  MOD_RES (217)..(217): Selenocysteine
MKXRQAFYLHXXKLXRIARRLCREILRPWHAARHPYLPINSAAIKAECXARLPEASQSPLVLKQAVRKPLEAVLRYLEXHPRPPKPDPVKSVSSVLSSLXPAKVAPVINNGSPXILGKRSYEQHNGVDGNMKKRLLMPSRGXYLGLANHGQARHMGPSRNLLLNGKSYPXKVRLIRGGSLPPVKRRRMNWIDAPDDVFYMAXEEXRKIRKLLSSSEXKRAARRPYKPIALRQSQALPPRPPPPAPVNDEPIVIED

SEQ ID NO: 16743 - protein, 511 aa, Homo sapiens
  MOD_RES (14)..(14): Selenocysteine
  MOD_RES (42)..(42): Selenocysteine
  MOD_RES (49)..(49): Selenocysteine
  MOD_RES (100)..(100): Selenocysteine
  MOD_RES (113)..(113): Selenocysteine
  MOD_RES (124)..(125): Selenocysteine
  MOD_RES (172)..(172): Selenocysteine
  MOD_RES (190)..(191): Selenocysteine
  MOD_RES (214)..(214): Selenocysteine
  MOD_RES (226)..(226): Selenocysteine
  MOD_RES (259)..(259): Selenocysteine
  MOD_RES (267)..(268): Selenocysteine
  MOD_RES (271)..(271): Selenocysteine
  MOD_RES (305)..(305): Selenocysteine
  MOD_RES (335)..(335): Selenocysteine
  MOD_RES (356)..(356): Selenocysteine
  MOD_RES (370)..(370): Selenocysteine
  MOD_RES (398)..(398): Selenocysteine
  MOD_RES (426)..(426): Selenocysteine
  MOD_RES (458)..(458): Selenocysteine
  MOD_RES (461)..(461): Selenocysteine
  MOD_RES (473)..(473): Selenocysteine
QIDQFLVVARSVGXFARALDCSSSVRQPSLHMSAAAASRDIXLFHAMDXLHKNIYDISKAISALVPQGGPVLCRDEMEEWSASEANLFEEALEKYGKDFXDIQQDFLPWKSLXSIIEYYYMWKXXDRYVQQKRLKAAEAESKLKQVYIPNYNKPNPNQISVNNVKAGVVNGXGAPGQSPGAGRACESCYXXQSYQWYSWGPPNMQCRLCASCWXYWKKYGGLKMPXRLDGERPGPNRSNMSPHGLPARSSGSPKFAMKXRQAFYLHXXKLXRIARRLCREILRPWHAARHPYLPINSAAIKAECXARLPEASQSPLVLKQAVRKPLEAVLRYLEXHPRPPKPDPVKSVSSVLSSLXPAKVAPVINNGSPXILGKRSYEQHNGVDGNMKKRLLMPSRGXYLGLANHGQARHMGPSRNLLLNGKSYPXKVRLIRGGSLPPVKRRRMNWIDAPDDVFYMAXEEXRKIRKLLSSSEXKRAARRPYKPIALRQSQALPPRPPPPAPVNDEPIVIED

SEQ ID NO: 16744 - protein, 57 aa, Homo sapiens
  MOD_RES (1)..(1): Any amino acid
  MOD_RES (51)..(52): Selenocysteine
XAAGPDMAANMYRVGDYVYFENSSSNPYLIRRIEELNKPCQSAIRPDRGRXXARKGK

SEQ ID NO: 16745 - protein, 55 aa, Homo sapiens
  MOD_RES (1)..(1): Any amino acid
  MOD_RES (10)..(10): Selenocysteine
  MOD_RES (31)..(31): Selenocysteine
XRRIEELNKXANGNVEAKVVCFYRRRDISSXLIALADKHAMGGGVLAPFPRGLGE

SEQ ID NO: 16746 - protein, 668 aa, Homo sapiens
  MOD_RES (33)..(33): Selenocysteine
  MOD_RES (100)..(100): Selenocysteine
  MOD_RES (109)..(109): Selenocysteine
  MOD_RES (114)..(114): Selenocysteine
  MOD_RES (139)..(139): Selenocysteine
  MOD_RES (186)..(186): Selenocysteine
  MOD_RES (202)..(202): Selenocysteine
  MOD_RES (230)..(230): Selenocysteine
  MOD_RES (237)..(237): Selenocysteine
  MOD_RES (251)..(251): Selenocysteine
  MOD_RES (312)..(313): Selenocysteine
  MOD_RES (338)..(338): Selenocysteine
  MOD_RES (340)..(340): Selenocysteine
  MOD_RES (366)..(366): Selenocysteine
  MOD_RES (372)..(373): Selenocysteine
  MOD_RES (406)..(406): Selenocysteine
  MOD_RES (408)..(408): Selenocysteine
  MOD_RES (414)..(414): Selenocysteine
  MOD_RES (417)..(418): Selenocysteine
  MOD_RES (438)..(439): Selenocysteine
  MOD_RES (453)..(453): Selenocysteine
  MOD_RES (458)..(459): Selenocysteine
  MOD_RES (462)..(462): Selenocysteine
  MOD_RES (505)..(505): Selenocysteine
  MOD_RES (519)..(519): Selenocysteine
  MOD_RES (534)..(534): Selenocysteine
  MOD_RES (538)..(538): Selenocysteine
  MOD_RES (540)..(540): Selenocysteine
  MOD_RES (564)..(564): Selenocysteine
  MOD_RES (610)..(610): Selenocysteine
  MOD_RES (613)..(613): Selenocysteine
  MOD_RES (621)..(621): Selenocysteine
  MOD_RES (641)..(641): Selenocysteine
  MOD_RES (660)..(660): Selenocysteine
MAANMYRVGDYVYFENSSSNPYLVRRIEELNKXANGNVEAKVVCLFRRRDISSSLNSLADSNAREFEEESKQPGVSEQQRHQLKHRELFLSRQFESLPAXHIRGKCSVXLLNEXDILSQYLEKEDCFFYSLVFDPVQKXLLADQGEIRVGCKYQAEIPDRLVEGESDNRNQQKMEMKVWDPDNPLXDRQIDQFLVVARAVGXFARALDCSSSIRQPSLHMSAAAASRDIXLFHAMDXLQRNGYDLAKAMSXLVPQGGPVLCRDEMEEWSASEAMLFEEALEKYGKDFNDIRQDFLPWKSLASIVQFYYMWKXXDRYIQQKRLKAAEADSKLKQVYIPXYXKPNPNQIISVGSKPGMNGAGFQKGLXCESCHXXQSAQWYAWGPPNMQCRLCASCWIYWKKYGGLKXPXQLEGAXRGXXEPHSRGHLSRPEAQSLSPYXXSANRAKLLAKNRQXFLLQXXKLXRLARRMCRDLLQPRRAARRPYAPINANAIKAECSIRLPKAAKXPLKIHPLVRLPLAXIVKDLVAQAPLKPKXPRGXKXPINRNQLSQNRGLGGIMVKRAYEXMAGAGVPFSANGRPLASGIRSSSQPAAKRQKLNPADAPNPVVFVAXKDXRALRKALXHLEMRRAARRPNLPLKVKPXLIAVRPPVPLPAPSHPASXNEPIVLED

SEQ ID NO: 16747 - protein, 495 aa, Homo sapiens
  MOD_RES (13)..(13): Selenocysteine
  MOD_RES (29)..(29): Selenocysteine
  MOD_RES (57)..(57): Selenocysteine
  MOD_RES (64)..(64): Selenocysteine
  MOD_RES (78)..(78): Selenocysteine
  MOD_RES (139)..(140): Selenocysteine
  MOD_RES (165)..(165): Selenocysteine
  MOD_RES (167)..(167): Selenocysteine
  MOD_RES (193)..(193): Selenocysteine
  MOD_RES (199)..(200): Selenocysteine
  MOD_RES (233)..(233): Selenocysteine
  MOD_RES (235)..(235): Selenocysteine
  MOD_RES (241)..(241): Selenocysteine
  MOD_RES (244)..(245): Selenocysteine
  MOD_RES (265)..(266): Selenocysteine
  MOD_RES (280)..(280): Selenocysteine
  MOD_RES (285)..(286): Selenocysteine
  MOD_RES (289)..(289): Selenocysteine
  MOD_RES (332)..(332): Selenocysteine
  MOD_RES (346)..(346): Selenocysteine
  MOD_RES (361)..(361): Selenocysteine
  MOD_RES (365)..(365): Selenocysteine
  MOD_RES (367)..(367): Selenocysteine
  MOD_RES (391)..(391): Selenocysteine
  MOD_RES (437)..(437): Selenocysteine
  MOD_RES (440)..(440): Selenocysteine
  MOD_RES (448)..(448): Selenocysteine
  MOD_RES (468)..(468): Selenocysteine
  MOD_RES (487)..(487): Selenocysteine
MEMKVWDPDNPLXDRQIDQFLVVARAVGXFARALDCSSSIRQPSLHMSAAAASRDIXLFHAMDXLQRNGYDLAKAMSXLVPQGGPVLCRDEMEEWSASEAMLFEEALEKYGKDFNDIRQDFLPWKSLASIVQFYYMWKXXDRYIQQKRLKAAEADSKLKQVYIPXYXKPNPNQIISVGSKPGMNGAGFQKGLXCESCHXXQSAQWYAWGPPNMQCRLCASCWIYWKKYGGLKXPXQLEGAXRGXXEPHSRGHLSRPEAQSLSPYXXSANRAKLLAKNRQXFLLQXXKLXRLARRMCRDLLQPRRAARRPYAPINANAIKAECSIRLPKAAKXPLKIHPLVRLPLAXIVKDLVAQAPLKPKXPRGXKXPINRNQLSQNRGLGGIMVKRAYEXMAGAGVPFSANGRPLASGIRSSSQPAAKRQKLNPADAPNPVVFVAXKDXRALRKALXHLEMRRAARRPNLPLKVKPXLIAVRPPVPLPAPSHPASXNEPIVLED

SEQ ID NO: 16748 - protein, 392 aa, Homo sapiens
  MOD_RES (33)..(33): Selenocysteine
  MOD_RES (54)..(54): Selenocysteine
  MOD_RES (72)..(73): Selenocysteine
  MOD_RES (79)..(79): Selenocysteine
  MOD_RES (103)..(103): Selenocysteine
  MOD_RES (117)..(117): Selenocysteine
  MOD_RES (129)..(129): Selenocysteine
  MOD_RES (142)..(142): Selenocysteine
  MOD_RES (189)..(189): Selenocysteine
  MOD_RES (205)..(205): Selenocysteine
  MOD_RES (233)..(233): Selenocysteine
  MOD_RES (240)..(240): Selenocysteine
  MOD_RES (304)..(304): Selenocysteine
  MOD_RES (315)..(316): Selenocysteine
  MOD_RES (341)..(341): Selenocysteine
  MOD_RES (351)..(351): Selenocysteine
  MOD_RES (365)..(366): Selenocysteine
  MOD_RES (392)..(392): Selenocysteine
MAANMYRVGDYVYFENSSSNPYLIRRIEELNKXASGNVEAKVVCFYRRRDISNXLIMLADKHAKEIEEESEXXVEADLXDKQKHQLKHRELFLSRQYESLPAXHIRGKCSVALLNEXESVLSYLDKEDXFFYSLVYDPSLKXLLADKGEIRVGPRYQADIPEMLLEGESDEREQSKLEVKVWDPNSPLXDRQIDQFLVVARAVGXFARALDCSSSVRQPSLHMSAAAASRDIXLFHAMDXLYRHSYDLSSAISVLVPLGGPVLCRDEMEEWSASEASLFEEALEKYGKDFNDIRQDFLPWKSLXSIIEYYYMWKXXDRYVQQKRLKAAEAESKLKQVYIPXYKPNPNQISXSNGKPGAVNGAVGXXFQPQNPLLGRACESCYVSPVVFLGPX

SEQ ID NO: 16749 - protein, 514 aa, Homo sapiens
  MOD_RES (33)..(33): Selenocysteine
  MOD_RES (54)..(54): Selenocysteine
  MOD_RES (72)..(73): Selenocysteine
  MOD_RES (79)..(79): Selenocysteine
  MOD_RES (103)..(103): Selenocysteine
  MOD_RES (117)..(117): Selenocysteine
  MOD_RES (129)..(129): Selenocysteine
  MOD_RES (142)..(142): Selenocysteine
  MOD_RES (189)..(189): Selenocysteine
  MOD_RES (205)..(205): Selenocysteine
  MOD_RES (233)..(233): Selenocysteine
  MOD_RES (240)..(240): Selenocysteine
  MOD_RES (304)..(304): Selenocysteine
  MOD_RES (315)..(316): Selenocysteine
  MOD_RES (341)..(341): Selenocysteine
  MOD_RES (351)..(351): Selenocysteine
  MOD_RES (365)..(366): Selenocysteine
  MOD_RES (384)..(384): Selenocysteine
  MOD_RES (419)..(419): Selenocysteine
  MOD_RES (431)..(432): Selenocysteine
  MOD_RES (454)..(454): Selenocysteine
  MOD_RES (463)..(463): Selenocysteine
  MOD_RES (471)..(472): Selenocysteine
  MOD_RES (475)..(475): Selenocysteine
  MOD_RES (485)..(485): Selenocysteine
MAANMYRVGDYVYFENSSSNPYLIRRIEELNKXASGNVEAKVVCFYRRRDISNXLIMLADKHAKEIEEESEXXVEADLXDKQKHQLKHRELFLSRQYESLPAXHIRGKCSVALLNEXESVLSYLDKEDXFFYSLVYDPSLKXLLADKGEIRVGPRYQADIPEMLLEGESDEREQSKLEVKVWDPNSPLXDRQIDQFLVVARAVGXFARALDCSSSVRQPSLHMSAAAASRDIXLFHAMDXLYRHSYDLSSAISVLVPLGGPVLCRDEMEEWSASEASLFEEALEKYGKDFNDIRQDFLPWKSLXSIIEYYYMWKXXDRYVQQKRLKAAEAESKLKQVYIPXYKPNPNQISXSNGKPGAVNGAVGXXFQPQNPLLGRACESCYAXQSHQWYSWGPPNMQCRLCAICWLYWKKYGGLKMPXQSEEEKLSPSPXXEDPRVRSHVSRQAMQGMPVRNXGSPKSAVKXRQAFFLHXXYFXKFARQVCKNXLRLRQAARRPFVAINYAAIRAECKMLLNS

SEQ ID NO: 16750 - protein, 515 aa, Homo sapiens
  MOD_RES (33)..(33): Selenocysteine
  MOD_RES (54)..(54): Selenocysteine
  MOD_RES (72)..(73): Selenocysteine
  MOD_RES (79)..(79): Selenocysteine
  MOD_RES (103)..(103): Selenocysteine
  MOD_RES (117)..(117): Selenocysteine
  MOD_RES (129)..(129): Selenocysteine
  MOD_RES (142)..(142): Selenocysteine
  MOD_RES (189)..(189): Selenocysteine
  MOD_RES (205)..(205): Selenocysteine
  MOD_RES (233)..(233): Selenocysteine
  MOD_RES (240)..(240): Selenocysteine
  MOD_RES (304)..(304): Selenocysteine
  MOD_RES (315)..(316): Selenocysteine
  MOD_RES (341)..(341): Selenocysteine
  MOD_RES (352)..(352): Selenocysteine
  MOD_RES (366)..(367): Selenocysteine
  MOD_RES (385)..(385): Selenocysteine
  MOD_RES (420)..(420): Selenocysteine
  MOD_RES (432)..(433): Selenocysteine
  MOD_RES (455)..(455): Selenocysteine
  MOD_RES (464)..(464): Selenocysteine
  MOD_RES (472)..(473): Selenocysteine
  MOD_RES (476)..(476): Selenocysteine
  MOD_RES (486)..(486): Selenocysteine
MAANMYRVGDYVYFENSSSNPYLIRRIEELNKXASGNVEAKVVCFYRRRDISNXLIMLADKHAKEIEEESEXXVEADLXDKQKHQLKHRELFLSRQYESLPAXHIRGKCSVALLNEXESVLSYLDKEDXFFYSLVYDPSLKXLLADKGEIRVGPRYQADIPEMLLEGESDEREQSKLEVKVWDPNSPLXDRQIDQFLVVARAVGXFARALDCSSSVRQPSLHMSAAAASRDIXLFHAMDXLYRHSYDLSSAISVLVPLGGPVLCRDEMEEWSASEASLFEEALEKYGKDFNDIRQDFLPWKSLXSIIEYYYMWKXXDRYVQQKRLKAAEAESKLKQVYIPXYSKPNPNQISXSNGKPGAVNGAVGXXFQPQNPLLGRACESCYAXQSHQWYSWGPPNMQCRLCAICWLYWKKYGGLKMPXQSEEEKLSPSPXXEDPRVRSHVSRQAMQGMPVRNXGSPKSAVKXRQAFFLHXXYFXKFARQVCKNXLRLRQAARRPFVAINYAAIRAECKMLLNS

SEQ ID NO: 16751 - protein, 590 aa, Homo sapiens
  MOD_RES (33)..(33): Selenocysteine
  MOD_RES (54)..(54): Selenocysteine
  MOD_RES (72)..(73): Selenocysteine
  MOD_RES (79)..(79): Selenocysteine
  MOD_RES (103)..(103): Selenocysteine
  MOD_RES (117)..(117): Selenocysteine
  MOD_RES (129)..(129): Selenocysteine
  MOD_RES (142)..(142): Selenocysteine
  MOD_RES (189)..(189): Selenocysteine
  MOD_RES (205)..(205): Selenocysteine
  MOD_RES (233)..(233): Selenocysteine
  MOD_RES (240)..(240): Selenocysteine
  MOD_RES (304)..(304): Selenocysteine
  MOD_RES (315)..(316): Selenocysteine
  MOD_RES (341)..(341): Selenocysteine
  MOD_RES (351)..(351): Selenocysteine
  MOD_RES (365)..(366): Selenocysteine
  MOD_RES (384)..(384): Selenocysteine
  MOD_RES (419)..(419): Selenocysteine
  MOD_RES (431)..(432): Selenocysteine
  MOD_RES (454)..(454): Selenocysteine
  MOD_RES (463)..(463): Selenocysteine
  MOD_RES (471)..(472): Selenocysteine
  MOD_RES (475)..(475): Selenocysteine
  MOD_RES (485)..(485): Selenocysteine
  MOD_RES (525)..(525): Selenocysteine
  MOD_RES (550)..(550): Selenocysteine
  MOD_RES (555)..(555): Selenocysteine
  MOD_RES (557)..(558): Selenocysteine
  MOD_RES (563)..(564): Selenocysteine
  MOD_RES (568)..(568): Selenocysteine
MAANMYRVGDYVYFENSSSNPYLIRRIEELNKXASGNVEAKVVCFYRRRDISNXLIMLADKHAKEIEEESEXXVEADLXDKQKHQLKHRELFLSRQYESLPAXHIRGKCSVALLNEXESVLSYLDKEDXFFYSLVYDPSLKXLLADKGEIRVGPRYQADIPEMLLEGESDEREQSKLEVKVWDPNSPLXDRQIDQFLVVARAVGXFARALDCSSSVRQPSLHMSAAAASRDIXLFHAMDXLYRHSYDLSSAISVLVPLGGPVLCRDEMEEWSASEASLFEEALEKYGKDFNDIRQDFLPWKSLXSIIEYYYMWKXXDRYVQQKRLKAAEAESKLKQVYIPXYKPNPNQISXSNGKPGAVNGAVGXXFQPQNPLLGRACESCYAXQSHQWYSWGPPNMQCRLCAICWLYWKKYGGLKMPXQSEEEKLSPSPXXEDPRVRSHVSRQAMQGMPVRNXGSPKSAVKXRQAFFLHXXYFXKFARQVCKNXLRLRQAARRPFVAINYAAIRAEYADRHAELSGSPLKSKSXRKPLACIIGYLEIHPAKKPNVIRSXPSLQXPXXKRMLXXPNHXSLSILGKRNYSHHNGLDEKLMK

SEQ ID NO: 16752 - protein, 594 aa, Homo sapiens
  MOD_RES (33)..(33): Selenocysteine
  MOD_RES (54)..(54): Selenocysteine
  MOD_RES (72)..(73): Selenocysteine
  MOD_RES (79)..(79): Selenocysteine
  MOD_RES (103)..(103): Selenocysteine
  MOD_RES (117)..(117): Selenocysteine
  MOD_RES (129)..(129): Selenocysteine
  MOD_RES (142)..(142): Selenocysteine
  MOD_RES (189)..(189): Selenocysteine
  MOD_RES (205)..(205): Selenocysteine
  MOD_RES (233)..(233): Selenocysteine
  MOD_RES (240)..(240): Selenocysteine
  MOD_RES (304)..(304): Selenocysteine
  MOD_RES (315)..(316): Selenocysteine
  MOD_RES (341)..(341): Selenocysteine
  MOD_RES (352)..(352): Selenocysteine
  MOD_RES (366)..(367): Selenocysteine
  MOD_RES (385)..(385): Selenocysteine
  MOD_RES (420)..(420): Selenocysteine
  MOD_RES (432)..(433): Selenocysteine
  MOD_RES (455)..(455): Selenocysteine
  MOD_RES (464)..(464): Selenocysteine
  MOD_RES (472)..(473): Selenocysteine
  MOD_RES (476)..(476): Selenocysteine
  MOD_RES (486)..(486): Selenocysteine
  MOD_RES (526)..(526): Selenocysteine
  MOD_RES (551)..(551): Selenocysteine
  MOD_RES (556)..(556): Selenocysteine
  MOD_RES (558)..(559): Selenocysteine
  MOD_RES (564)..(565): Selenocysteine
  MOD_RES (569)..(569): Selenocysteine
  MOD_RES (589)..(589): Selenocysteine
MAANMYRVGDYVYFENSSSNPYLIRRIEELNKXASGNVEAKVVCFYRRRDISNXLIMLADKHAKEIEEESEXXVEADLXDKQKHQLKHRELFLSRQYESLPAXHIRGKCSVALLNEXESVLSYLDKEDXFFYSLVYDPSLKXLLADKGEIRVGPRYQADIPEMLLEGESDEREQSKLEVKVWDPNSPLXDRQIDQFLVVARAVGXFARALDCSSSVRQPSLHMSAAAASRDIXLFHAMDXLYRHSYDLSSAISVLVPLGGPVLCRDEMEEWSASEASLFEEALEKYGKDFNDIRQDFLPWKSLXSIIEYYYMWKXXDRYVQQKRLKAAEAESKLKQVYIPXYSKPNPNQISXSNGKPGAVNGAVGXXFQPQNPLLGRACESCYAXQSHQWYSWGPPNMQCRLCAICWLYWKKYGGLKMPXQSEEEKLSPSPXXEDPRVRSHVSRQAMQGMPVRNXGSPKSAVKXRQAFFLHXXYFXKFARQVCKNXLRLRQAARRPFVAINYAAIRAEYADRHAELSGSPLKSKSXRKPLACIIGYLEIHPAKKPNVIRSXPSLQXPXXKRMLXXPNHXSLSILGKRNYSHHNGLDELXCCVSD

SEQ ID NO: 16753 - protein, 91 aa, Homo sapiens
  MOD_RES (33)..(33): Selenocysteine
  MOD_RES (54)..(54): Selenocysteine
  MOD_RES (65)..(65): Selenocysteine
  MOD_RES (83)..(83): Selenocysteine
  MOD_RES (85)..(85): Selenocysteine
  MOD_RES (87)..(87): Selenocysteine
MAANMYRVGDYVYFENSSSNPYLIRRIEELNKXASGNVEAKVVCFYRRRDISNXLIMLADKHAKXEFRSCCPGWSAMARSRLXAXSXSQIK

SEQ ID NO: 16754 - protein, 18 aa, Homo sapiens
  MOD_RES (16)..(17): Selenocysteine
MLADKHAKEIEEESEXXV

SEQ ID NO: 16755 - protein, 537 aa, Homo sapiens
  MOD_RES (16)..(17): Selenocysteine
  MOD_RES (23)..(23): Selenocysteine
  MOD_RES (47)..(47): Selenocysteine
  MOD_RES (61)..(61): Selenocysteine
  MOD_RES (73)..(73): Selenocysteine
  MOD_RES (86)..(86): Selenocysteine
  MOD_RES (133)..(133): Selenocysteine
  MOD_RES (149)..(149): Selenocysteine
  MOD_RES (177)..(177): Selenocysteine
  MOD_RES (184)..(184): Selenocysteine
  MOD_RES (248)..(248): Selenocysteine
  MOD_RES (259)..(260): Selenocysteine
  MOD_RES (285)..(285): Selenocysteine
  MOD_RES (295)..(295): Selenocysteine
  MOD_RES (309)..(310): Selenocysteine
  MOD_RES (328)..(328): Selenocysteine
  MOD_RES (363)..(363): Selenocysteine
  MOD_RES (375)..(376): Selenocysteine
  MOD_RES (398)..(398): Selenocysteine
  MOD_RES (407)..(407): Selenocysteine
  MOD_RES (415)..(416): Selenocysteine
  MOD_RES (419)..(419): Selenocysteine
  MOD_RES (429)..(429): Selenocysteine
  MOD_RES (469)..(469): Selenocysteine
  MOD_RES (494)..(494): Selenocysteine
  MOD_RES (499)..(499): Selenocysteine
  MOD_RES (501)..(502): Selenocysteine
  MOD_RES (507)..(508): Selenocysteine
  MOD_RES (512)..(512): Selenocysteine
  MOD_RES (532)..(532): Selenocysteine
MLADKHAKEIEEESEXXVEADLXDKQKHQLKHRELFLSRQYESLPAXHIRGKCSVALLNEXESVLSYLDKEDXFFYSLVYDPSLKXLLADKGEIRVGPRYQADIPEMLLEGESDEREQSKLEVKVWDPNSPLXDRQIDQFLVVARAVGXFARALDCSSSVRQPSLHMSAAAASRDIXLFHAMDXLYRHSYDLSSAISVLVPLGGPVLCRDEMEEWSASEASLFEEALEKYGKDFNDIRQDFLPWKSLXSIIEYYYMWKXXDRYVQQKRLKAAEAESKLKQVYIPXYKPNPNQISXSNGKPGAVNGAVGXXFQPQNPLLGRACESCYAXQSHQWYSWGPPNMQCRLCAICWLYWKKYGGLKMPXQSEEEKLSPSPXXEDPRVRSHVSRQAMQGMPVRNXGSPKSAVKXRQAFFLHXXYFXKFARQVCKNXLRLRQAARRPFVAINYAAIRAEYADRHAELSGSPLKSKSXRKPLACIIGYLEIHPAKKPNVIRSXPSLQXPXXKRMLXXPNHXSLSILGKRNYSHHNGLDELXCCVSD

SEQ ID NO: 16756 - protein, 394 aa, Homo sapiens
  MOD_RES (64)..(65): Selenocysteine
  MOD_RES (77)..(77): Selenocysteine
  MOD_RES (100)..(100): Selenocysteine
  MOD_RES (103)..(103): Selenocysteine
  MOD_RES (118)..(118): Selenocysteine
  MOD_RES (147)..(147): Selenocysteine
  MOD_RES (149)..(149): Selenocysteine
  MOD_RES (173)..(173): Selenocysteine
  MOD_RES (182)..(182): Selenocysteine
  MOD_RES (280)..(280): Selenocysteine
  MOD_RES (292)..(292): Selenocysteine
  MOD_RES (339)..(339): Selenocysteine
AGMAGAGAGAGARGGAAAGVEARARDPPPAHRAHPRHPRPAAQPSARRMDGGSGGLGSGDNAPXXEALFVALGAGVXALSHPLLYVKLLIQVGHEPMPPXLGXNVLGRKVLYLPSFFXYAKYIVQVDGKIGLFRGLSPRLMSNALSXVXRGSMKKVFPPDEIEQVSNKDDMKXSLKKVVKEXSYEMMMQCVSRMLAHPLHVISMRCMVQFVGREAKYSGVLSSIGKIFKEEGLLGFFVGLIPHLLGDVVFLWGCNLLAHFINAYLVDDSFSQALAIRSYXKFVMGIAVSMLXYPFLLVGDLMAVNNCGLQAGLPPYSPVFKSWIHCWKYLSVQVSKHWXAEAFPVLCYILQLKWFCGCFIACKDKWFHGIQYCEEILGIYKAFKFSSYIISERI

SEQ ID NO: 16757 - protein, 372 aa, Homo sapiens
  MOD_RES (80)..(81): Selenocysteine
  MOD_RES (93)..(93): Selenocysteine
  MOD_RES (116)..(116): Selenocysteine
  MOD_RES (119)..(119): Selenocysteine
  MOD_RES (134)..(134): Selenocysteine
  MOD_RES (163)..(163): Selenocysteine
  MOD_RES (165)..(165): Selenocysteine
  MOD_RES (189)..(189): Selenocysteine
  MOD_RES (198)..(198): Selenocysteine
  MOD_RES (296)..(296): Selenocysteine
  MOD_RES (308)..(308): Selenocysteine
MGASDPEVAPWARGGAAGMAGAGAGAGARGGAAAGVEARARDPPPAHRAHPRHPRPAAQPSARRMDGGSGGLGSGDNAPXXEALFVALGAGVXALSHPLLYVKLLIQVGHEPMPPXLGXNVLGRKVLYLPSFFXYAKYIVQVDGKIGLFRGLSPRLMSNALSXVXRGSMKKVFPPDEIEQVSNKDDMKXSLKKVVKEXSYEMMMQCVSRMLAHPLHVISMRCMVQFVGREAKYSGVLSSIGKIFKEEGLLGFFVGLIPHLLGDVVFLWGCNLLAHFINAYLVDDSFSQALAIRSYXKFVMGIAVSMLXYPFLLVGDLMAVNNCGLQAGLPPYSPVFKSWIHCWKYLSVQGQLFRGSSLLFRRVSSGSCFALE

SEQ ID NO: 16758 - protein, 389 aa, Homo sapiens
  MOD_RES (80)..(81): Selenocysteine
  MOD_RES (93)..(93): Selenocysteine
  MOD_RES (116)..(116): Selenocysteine
  MOD_RES (119)..(119): Selenocysteine
  MOD_RES (134)..(134): Selenocysteine
  MOD_RES (163)..(163): Selenocysteine
  MOD_RES (165)..(165): Selenocysteine
  MOD_RES (189)..(189): Selenocysteine
  MOD_RES (198)..(198): Selenocysteine
  MOD_RES (289)..(289): Selenocysteine
  MOD_RES (313)..(313): Selenocysteine
  MOD_RES (325)..(325): Selenocysteine
MGASDPEVAPWARGGAAGMAGAGAGAGARGGAAAGVEARARDPPPAHRAHPRHPRPAAQPSARRMDGGSGGLGSGDNAPXXEALFVALGAGVXALSHPLLYVKLLIQVGHEPMPPXLGXNVLGRKVLYLPSFFXYAKYIVQVDGKIGLFRGLSPRLMSNALSXVXRGSMKKVFPPDEIEQVSNKDDMKXSLKKVVKEXSYEMMMQCVSRMLAHPLHVISMRCMVQFVGREAKYSGVLSSIGKIFKEEGLLGFFVGLIPHLLGDVVFLWGCNLLAHFINAYLVDDSVSDXPGGLGNDQNPGSQFSQALAIRSYXKFVMGIAVSMLXYPFLLVGDLMAVNNCGLQAGLPPYSPVFKSWIHCWKYLSVQGQLFRGSSLLFRRVSSGSCFALE

SEQ ID NO: 16759 - protein, 201 aa, Homo sapiens
  MOD_RES (1)..(1): Any amino acid
  MOD_RES (26)..(26): Selenocysteine
  MOD_RES (37)..(37): Selenocysteine
  MOD_RES (127)..(127): Selenocysteine
  MOD_RES (139)..(139): Selenocysteine
XAVCVPHVGPPPACHLNALHGPVCGXGGQVQLSCGAXIPGSSAAMVPHFGVINGKLAHSPRLIMSGVLSSIGKIFKEEGLLGFFVGLIPHLLGDVVFLWGCNLLAHFINAYLVDDSFSQALAIRSYXKFVMGIAVSMLXYPFLLVGDLMAVNNCGLQAGLPPYSPVFKSWIHCWKYLSVQGQLFRGSSLLFRRVSSGSCFA

SEQ ID NO: 16760 - protein, 263 aa, Homo sapiens
  MOD_RES (15)..(15): Selenocysteine
  MOD_RES (38)..(38): Selenocysteine
  MOD_RES (72)..(72): Selenocysteine
  MOD_RES (75)..(75): Selenocysteine
  MOD_RES (85)..(85): Selenocysteine
  MOD_RES (115)..(116): Selenocysteine
  MOD_RES (126)..(126): Selenocysteine
  MOD_RES (129)..(129): Selenocysteine
  MOD_RES (136)..(136): Selenocysteine
  MOD_RES (159)..(159): Selenocysteine
  MOD_RES (196)..(196): Selenocysteine
  MOD_RES (205)..(205): Selenocysteine
  MOD_RES (217)..(217): Selenocysteine
  MOD_RES (225)..(225): Selenocysteine
  MOD_RES (254)..(254): Selenocysteine
MADAASQVLLGSGLXILSQPLMYVKVLIQVGYEPLPPXIGRNIFGRQVCQLPGLFSYAQHIASIDGRRGLFXGLXPRLCSGVLGXVVHGKVLQELGPGNVQKEVSSSFDHVIKEXXREMIARSAAXLIXHPFHVIXLRSMVQFIGRESKYCGLCDSIIXIYREEGILGFFAGLVPRLLGDILSLWLCNSLAYLVNXYALDSGVSXMNEMKSYSQAVXGFFASMLXYPFVLVSNLMAVNNCGLAGGCPPYSPIYXSWIDCWCML

SEQ ID NO: 16761 - protein, 303 aa, Homo sapiens
  MOD_RES (15)..(15): Selenocysteine
  MOD_RES (38)..(38): Selenocysteine
  MOD_RES (72)..(72): Selenocysteine
  MOD_RES (75)..(75): Selenocysteine
  MOD_RES (85)..(85): Selenocysteine
  MOD_RES (124)..(125): Selenocysteine
  MOD_RES (135)..(135): Selenocysteine
  MOD_RES (138)..(138): Selenocysteine
  MOD_RES (145)..(145): Selenocysteine
  MOD_RES (168)..(168): Selenocysteine
  MOD_RES (205)..(205): Selenocysteine
  MOD_RES (214)..(214): Selenocysteine
  MOD_RES (226)..(226): Selenocysteine
  MOD_RES (234)..(234): Selenocysteine
  MOD_RES (263)..(263): Selenocysteine
  MOD_RES (294)..(294): Selenocysteine
MADAASQVLLGSGLXILSQPLMYVKVLIQVGYEPLPPXIGRNIFGRQVCQLPGLFSYAQHIASIDGRRGLFXGLXPRLCSGVLGXVVHGKVLQHYQESDKGEELGPGNVQKEVSSSFDHVIKEXXREMIARSAAXLIXHPFHVIXLRSMVQFIGRESKYCGLCDSIIXIYREEGILGFFAGLVPRLLGDILSLWLCNSLAYLVNXYALDSGVSXMNEMKSYSQAVXGFFASMLXYPFVLVSNLMAVNNCGLAGGCPPYSPIYXSWIDCWCMLQKEGNMSRGNSLFFRKVPFGKXYCCDLKMLI

SEQ ID NO: 16762 - protein, 582 aa, Homo sapiens
  MOD_RES (34)..(34): Selenocysteine
  MOD_RES (56)..(56): Selenocysteine
  MOD_RES (132)..(132): Selenocysteine
  MOD_RES (143)..(143): Selenocysteine
  MOD_RES (148)..(148): Selenocysteine
  MOD_RES (194)..(194): Selenocysteine
  MOD_RES (212)..(212): Selenocysteine
  MOD_RES (220)..(220): Selenocysteine
  MOD_RES (227)..(227): Selenocysteine
  MOD_RES (229)..(229): Selenocysteine
  MOD_RES (231)..(232): Selenocysteine
  MOD_RES (236)..(237): Selenocysteine
  MOD_RES (268)..(268): Selenocysteine
  MOD_RES (280)..(280): Selenocysteine
  MOD_RES (317)..(317): Selenocysteine
  MOD_RES (326)..(326): Selenocysteine
  MOD_RES (331)..(331): Selenocysteine
  MOD_RES (352)..(352): Selenocysteine
  MOD_RES (360)..(361): Selenocysteine
  MOD_RES (439)..(439): Selenocysteine
  MOD_RES (458)..(458): Selenocysteine
  MOD_RES (462)..(462): Selenocysteine
  MOD_RES (477)..(477): Selenocysteine
  MOD_RES (480)..(480): Selenocysteine
  MOD_RES (492)..(492): Selenocysteine
  MOD_RES (495)..(495): Selenocysteine
  MOD_RES (511)..(511): Selenocysteine
  MOD_RES (516)..(516): Selenocysteine
  MOD_RES (518)..(518): Selenocysteine
  MOD_RES (543)..(543): Selenocysteine
  MOD_RES (550)..(550): Selenocysteine
  MOD_RES (560)..(560): Selenocysteine
  MOD_RES (564)..(564): Selenocysteine
  MOD_RES (582)..(582): Selenocysteine
MAARSWQDELAQQAEEGSARLREMLSVGLGFLRXELGLDLGLEPKRYPGWVILVGXGALGLLLLFLLGYGWAAACAGARKKRRSPPRKREEAAAVPAAAPDDLALLKNLRSEEQKKKNRKKLSEKPKPNGRXVEVAEGEAVRXPQSVXAKQPPEIDKKNEKSKKNKKKSKSDAKAVQNSSRHDGKEVDEGAWEXKISHREKRQQRKRDKVLXDSGSLDSXIPGIENXIXVXXEQLXXASFPVGSKKNKGDSHLNVQVSNFKSGKGDSXLQVSSGLNENLXVNGGGWNEKSVKLSSQISAGEEKWNSVSPASAGKRKXEPSAWSQDXGDANXNGKDWGRSWSDRSIFSGIGSXAEPVSQSXXSDYQWDVSRNQPYIDDEWSGLNGLSSADPNSDWNAPAEEWGNWVDEERASLLKSQEPIPDDQKVSDDDKEKGEGALPXGKSKKKKKKKKKQGEDNSXAQDXEELEKEIREDLPVNXSKXRPKQEKAFSLKXISXSDPAEVLVKNSQPIKXLPPAXSXEPSVILSKSDSDKSSSQVPPILQEXDKSKSNXKQNSVPPSQXKSEXSWESPKQIKKKKKARREX

SEQ ID NO: 16763 - protein, 526 aa, Homo sapiens
  MOD_RES (11)..(11): Selenocysteine
  MOD_RES (33)..(33): Selenocysteine
  MOD_RES (109)..(109): Selenocysteine
  MOD_RES (120)..(120): Selenocysteine
  MOD_RES (125)..(125): Selenocysteine
  MOD_RES (171)..(171): Selenocysteine
  MOD_RES (189)..(189): Selenocysteine
  MOD_RES (197)..(197): Selenocysteine
  MOD_RES (204)..(204): Selenocysteine
  MOD_RES (206)..(206): Selenocysteine
  MOD_RES (208)..(209): Selenocysteine
  MOD_RES (213)..(214): Selenocysteine
  MOD_RES (245)..(245): Selenocysteine
  MOD_RES (257)..(257): Selenocysteine
  MOD_RES (294)..(294): Selenocysteine
  MOD_RES (303)..(303): Selenocysteine
  MOD_RES (308)..(308): Selenocysteine
  MOD_RES (383)..(383): Selenocysteine
  MOD_RES (402)..(402): Selenocysteine
  MOD_RES (406)..(406): Selenocysteine
  MOD_RES (421)..(421): Selenocysteine
  MOD_RES (424)..(424): Selenocysteine
  MOD_RES (436)..(436): Selenocysteine
  MOD_RES (439)..(439): Selenocysteine
  MOD_RES (455)..(455): Selenocysteine
  MOD_RES (460)..(460): Selenocysteine
  MOD_RES (462)..(462): Selenocysteine
  MOD_RES (487)..(487): Selenocysteine
  MOD_RES (494)..(494): Selenocysteine
  MOD_RES (504)..(504): Selenocysteine
  MOD_RES (508)..(508): Selenocysteine
  MOD_RES (526)..(526): Selenocysteine
MLSVGLGFLRXELGLDLGLEPKRYPGWVILVGXGALGLLLLFLLGYGWAAACAGARKKRRSPPRKREEAAAVPAAAPDDLALLKNLRSEEQKKKNRKKLSEKPKPNGRXVEVAEGEAVRXPQSVXAKQPPEIDKKNEKSKKNKKKSKSDAKAVQNSSRHDGKEVDEGAWEXKISHREKRQQRKRDKVLXDSGSLDSXIPGIENXIXVXXEQLXXASFPVGSKKNKGDSHLNVQVSNFKSGKGDSXLQVSSGLNENLXVNGGGWNEKSVKLSSQISAGEEKWNSVSPASAGKRKXEPSAWSQDXGDANXNGKDWGRSWSDRSIFSGIDGLSSADPNSDWNAPAEEWGNWVDEERASLLKSQEPIPDDQKVSDDDKEKGEGALPXGKSKKKKKKKKKQGEDNSXAQDXEELEKEIREDLPVNXSKXRPKQEKAFSLKXISXSDPAEVLVKNSQPIKXLPPAXSXEPSVILSKSDSDKSSSQVPPILQEXDKSKSNXKQNSVPPSQXKSEXSWESPKQIKKKKKARREX

SEQ ID NO: 16764 - protein, 188 aa, Homo sapiens
  MOD_RES (1)..(1): Selenocysteine
  MOD_RES (22)..(22): Selenocysteine
  MOD_RES (30)..(31): Selenocysteine
  MOD_RES (109)..(109): Selenocysteine
  MOD_RES (128)..(128): Selenocysteine
  MOD_RES (134)..(134): Selenocysteine
  MOD_RES (139)..(139): Selenocysteine
  MOD_RES (141)..(141): Selenocysteine
  MOD_RES (166)..(166): Selenocysteine
  MOD_RES (173)..(173): Selenocysteine
  MOD_RES (183)..(183): Selenocysteine
  MOD_RES (187)..(187): Selenocysteine
XNGKDWGRSWSDRSIFSGIGSXAEPVSQSXXSDYQWDVSRNQPYIDDEWSGLNGLSSADPNSDWNAPAEEWGNWVDEERASLLKSQEPIPDDQKVSDDDKEKGEGALPXGKSKKKKKKKKKQGEDNSXAQPIKXLPPAXSXEPSVILSKSDSDKSSSQVPPILQEXDKSKSNXKQNSVPPSQXKSEXS

SEQ ID NO: 16765 - protein, 224 aa, Homo sapiens
  MOD_RES (1)..(1): Any amino acid
  MOD_RES (37)..(37): Selenocysteine
  MOD_RES (48)..(48): Selenocysteine
  MOD_RES (53)..(53): Selenocysteine
  MOD_RES (99)..(99): Selenocysteine
  MOD_RES (117)..(117): Selenocysteine
  MOD_RES (125)..(125): Selenocysteine
  MOD_RES (132)..(132): Selenocysteine
  MOD_RES (134)..(134): Selenocysteine
  MOD_RES (136)..(137): Selenocysteine
  MOD_RES (141)..(142): Selenocysteine
  MOD_RES (163)..(163): Selenocysteine
  MOD_RES (200)..(200): Selenocysteine
  MOD_RES (209)..(209): Selenocysteine
  MOD_RES (214)..(214): Selenocysteine
XAAAPDDLALLKNLRSEEQKKKNRKKLSEKPKPNGRXVEVAEGEAVRXPQSVXAKQPPEIDKKNEKSKKNKKKSKSDAKAVQNSSRHDGKEVDEGAWEXKISHREKRQQRKRDKVLXDSGSLDSXIPGIENXIXVXXEQLXXASFPVGSKKNKVSSGLNENLXVNGGGWNEKSVKLSSQISAGEEKWNSVSPASAGKRKXEPSAWSQDXGDANXNGKDWGRSWS

SEQ ID NO: 16766 - protein, 60 aa, Homo sapiens
  MOD_RES (1)..(1): Any amino acid
  MOD_RES (25)..(25): Selenocysteine
  MOD_RES (34)..(34): Selenocysteine
  MOD_RES (39)..(39): Selenocysteine
XSSQISAGEEKWNSVSPASAGKRKXEPSAWSQDXGDANXNGKDWGRSWSDRSIFSGIGLR

SEQ ID NO: 16767 - protein, 753 aa, Homo sapiens
  MOD_RES (21)..(21): Selenocysteine
  MOD_RES (42)..(42): Selenocysteine
  MOD_RES (47)..(48): Selenocysteine
  MOD_RES (57)..(57): Selenocysteine
  MOD_RES (106)..(106): Selenocysteine
  MOD_RES (112)..(112): Selenocysteine
  MOD_RES (122)..(122): Selenocysteine
  MOD_RES (124)..(124): Selenocysteine
  MOD_RES (132)..(132): Selenocysteine
  MOD_RES (143)..(143): Selenocysteine
  MOD_RES (150)..(150): Selenocysteine
  MOD_RES (153)..(153): Selenocysteine
  MOD_RES (159)..(159): Selenocysteine
  MOD_RES (163)..(163): Selenocysteine
  MOD_RES (169)..(169): Selenocysteine
  MOD_RES (183)..(183): Selenocysteine
  MOD_RES (195)..(195): Selenocysteine
  MOD_RES (213)..(213): Selenocysteine
  MOD_RES (225)..(225): Selenocysteine
  MOD_RES (228)..(228): Selenocysteine
  MOD_RES (241)..(242): Selenocysteine
  MOD_RES (252)..(252): Selenocysteine
  MOD_RES (254)..(254): Selenocysteine
  MOD_RES (278)..(278): Selenocysteine
  MOD_RES (282)..(282): Selenocysteine
  MOD_RES (284)..(284): Selenocysteine
  MOD_RES (299)..(299): Selenocysteine
  MOD_RES (302)..(302): Selenocysteine
  MOD_RES (332)..(332): Selenocysteine
  MOD_RES (346)..(346): Selenocysteine
  MOD_RES (356)..(357): Selenocysteine
  MOD_RES (364)..(364): Selenocysteine
  MOD_RES (381)..(381): Selenocysteine
  MOD_RES (390)..(390): Selenocysteine
  MOD_RES (394)..(394): Selenocysteine
  MOD_RES (411)..(411): Selenocysteine
  MOD_RES (476)..(476): Selenocysteine
  MOD_RES (525)..(526): Selenocysteine
  MOD_RES (535)..(535): Selenocysteine
  MOD_RES (545)..(545): Selenocysteine
  MOD_RES (549)..(549): Selenocysteine
  MOD_RES (551)..(551): Selenocysteine
  MOD_RES (553)..(553): Selenocysteine
  MOD_RES (555)..(555): Selenocysteine
  MOD_RES (558)..(558): Selenocysteine
  MOD_RES (580)..(580): Selenocysteine
  MOD_RES (601)..(602): Selenocysteine
  MOD_RES (677)..(677): Selenocysteine
  MOD_RES (690)..(690): Selenocysteine
  MOD_RES (703)..(703): Selenocysteine
  MOD_RES (709)..(709): Selenocysteine
  MOD_RES (711)..(711): Selenocysteine
  MOD_RES (728)..(728): Selenocysteine
  MOD_RES (748)..(748): Selenocysteine
MGEHSPDNNIIYFEAEEDELXPDDKMLRFVDKNGLVPSSSGXVYDRXXVLIEQDPGXLEDEDDDGQCGEHLPFLVGGEEGFHLIDHEAMSQGYVQHIISPDQIHLXINPGSXPMPRNIEGAXLXLQSECPEXKRKEVKRYQCXFEGCPRXYSXAGNLRXHQKXHRGEYXFVCNQEGCGKAFLXSYSLRIHVRVHXKEKPFECDVQGCEKAFNXLYRLKAHQRLHXGKXFNCESEGCSKYFXXLSDLRKHIRXHXGEKPFRCDHDGCGKAFAASHHLKXHVRXHXGERPFFCPSNGCEKXFSXQYSLKSHMKGHDNKGHSYNALPQHNGSEDXNHSLCLSDLSLLSXDSELRENSSXXQGQDLSXISPAIIFESMFQNSDDXAIQEDPQQXASLXESFNGDAESVSDVPPSXGNSASLSLPLVLQPGLSEPPQPLLPASAPSAPPPAPSLGPGSQQAAFGNPPALLQPPEVPVPHSXQFAANHQEFLPHPQAPQPIVPGLSVVAGASASAAAVASAVAAPAPPQSXXEPLPAMVQXLPLGANSVLXNNPXIXIXPXPNXAILQSSLVMGEQNLQWILNGAXSSPQNQEQIQQASKVEKVFFXXAVPVASSPGSSVQQIGLSVPVIIIKQEEACQCQCACRDSAKERASSRRKGCSSPPPPEPSPQAPDGPSLQLPAQXFSSAPVPGSSSSXLPSSCEQSRQAEXPSDPQXEXLSAMDVSEFLSLQSLDXPSNLIPIEALLQGEEEMGLXSSFSK

SEQ ID NO: 16768 - protein, 603 aa, Homo sapiens
  MOD_RES (6)..(6): Selenocysteine
  MOD_RES (22)..(22): Selenocysteine
  MOD_RES (32)..(32): Selenocysteine
  MOD_RES (42)..(42): Selenocysteine
  MOD_RES (45)..(45): Selenocysteine
  MOD_RES (66)..(66): Selenocysteine
  MOD_RES (77)..(77): Selenocysteine
  MOD_RES (100)..(100): Selenocysteine
  MOD_RES (112)..(112): Selenocysteine
  MOD_RES (138)..(138): Selenocysteine
  MOD_RES (165)..(165): Selenocysteine
  MOD_RES (186)..(186): Selenocysteine
  MOD_RES (197)..(197): Selenocysteine
  MOD_RES (218)..(218): Selenocysteine
  MOD_RES (237)..(237): Selenocysteine
  MOD_RES (267)..(267): Selenocysteine
  MOD_RES (275)..(275): Selenocysteine
  MOD_RES (291)..(291): Selenocysteine
  MOD_RES (344)..(344): Selenocysteine
  MOD_RES (355)..(355): Selenocysteine
  MOD_RES (382)..(382): Selenocysteine
  MOD_RES (386)..(386): Selenocysteine
  MOD_RES (430)..(430): Selenocysteine
  MOD_RES (454)..(454): Selenocysteine
  MOD_RES (477)..(477): Selenocysteine
  MOD_RES (492)..(492): Selenocysteine
  MOD_RES (495)..(495): Selenocysteine
  MOD_RES (515)..(515): Selenocysteine
  MOD_RES (587)..(587): Selenocysteine
  MOD_RES (601)..(601): Selenocysteine
MASASXSKYNSHSLENESIKRXSRDGVNRDLXEAVPRLPGEXLIXDKEVIYICPFNGPIKGRVYIXNYRLYLRSLEXDSSLILDVPLGVISRIEKMGGAXSRGENSYGLDIXCKDMRNLRFALKQEGHSRRDMFEILXRYAFPLAHSLPLFAFLNEEKFNVDGWXVYNPVEEYRRQGLPNHHWRIXFINKCYELCDXYPALLVVPYRASDDDLRRVAXFRSRNRIPVLSWIHPENKXVIVRCSQPLVGMSGKRNKDDEKYLDVIREXNKQISKLXIYDARPSVNAVANKAXGGGYESDDAYHNAELFFLDIHNIHVMRESLKKVKDIVYPNVEESHWLSSLESXHWLEHIKLVLXGAIQVADKVSSGKSSVLVHCSDGWDRXAQLXSLAMLMLDSFYRSIEGFEILVQKEWISFGHKFASRIGHGDKNHXDADRSPIFLQFIDCVWQMSKQFPXAFEFNEQFLIIILDHLYSCRFGXFLFNCESARERQKVXERXVSLWSLINSNKEKFKNPFYXKEINRVLYPVASMRHLELWVNYYIRWNPRIKQQQPNPVEQRYMELLALRDEYIKRLEELQLANSAKLSDPPXSPSSPSQMMPHVQXHF

SEQ ID NO: 16769 - protein, 103 aa, Homo sapiens
  MOD_RES (6)..(6): Selenocysteine
  MOD_RES (22)..(22): Selenocysteine
  MOD_RES (32)..(32): Selenocysteine
  MOD_RES (42)..(42): Selenocysteine
  MOD_RES (45)..(45): Selenocysteine
  MOD_RES (66)..(66): Selenocysteine
  MOD_RES (77)..(77): Selenocysteine
  MOD_RES (94)..(94): Selenocysteine
MASASXSKYNSHSLENESIKRXSRDGVNRDLXEAVPRLPGEXLIXDKEVIYICPFNGPIKGRVYIXNYRLYLRSLEXPLFAFLNEEKFNVDGWXVYNPVEEYR

SEQ ID NO: 16770 - protein, 98 aa, Homo sapiens
  MOD_RES (35)..(35): Selenocysteine
MGEEGPPSLEYIQAKDLFPPKELVKEEENLQVPFXVLQGEGVEFLGRAADALIAISNYRLHIKFKDSVINVPLRMIDSVESRDMFQLHISCKDSKVVR

SEQ ID NO: 16771 - protein, 1138 aa, Homo sapiens
  MOD_RES (35)..(35): Selenocysteine
  MOD_RES (103)..(103): Selenocysteine
  MOD_RES (118)..(118): Selenocysteine
  MOD_RES (140)..(140): Selenocysteine
  MOD_RES (146)..(146): Selenocysteine
  MOD_RES (200)..(200): Selenocysteine
  MOD_RES (253)..(253): Selenocysteine
  MOD_RES (265)..(265): Selenocysteine
  MOD_RES (268)..(268): Selenocysteine
  MOD_RES (274)..(274): Selenocysteine
  MOD_RES (279)..(279): Selenocysteine
  MOD_RES (292)..(292): Selenocysteine
  MOD_RES (300)..(300): Selenocysteine
  MOD_RES (315)..(315): Selenocysteine
  MOD_RES (376)..(376): Selenocysteine
  MOD_RES (395)..(395): Selenocysteine
  MOD_RES (414)..(414): Selenocysteine
  MOD_RES (431)..(431): Selenocysteine
  MOD_RES (510)..(510): Selenocysteine
  MOD_RES (521)..(521): Selenocysteine
  MOD_RES (551)..(551): Selenocysteine
  MOD_RES (563)..(563): Selenocysteine
  MOD_RES (568)..(568): Selenocysteine
  MOD_RES (570)..(570): Selenocysteine
  MOD_RES (599)..(599): Selenocysteine
  MOD_RES (612)..(612): Selenocysteine
  MOD_RES (650)..(650): Selenocysteine
  MOD_RES (660)..(660): Selenocysteine
  MOD_RES (671)..(671): Selenocysteine
  MOD_RES (687)..(687): Selenocysteine
  MOD_RES (701)..(701): Selenocysteine
  MOD_RES (730)..(730): Selenocysteine
  MOD_RES (732)..(732): Selenocysteine
  MOD_RES (756)..(756): Selenocysteine
  MOD_RES (767)..(767): Selenocysteine
  MOD_RES (773)..(773): Selenocysteine
  MOD_RES (800)..(800): Selenocysteine
  MOD_RES (858)..(858): Selenocysteine
  MOD_RES (866)..(866): Selenocysteine
  MOD_RES (888)..(888): Selenocysteine
  MOD_RES (916)..(916): Selenocysteine
  MOD_RES (936)..(936): Selenocysteine
  MOD_RES (961)..(961): Selenocysteine
  MOD_RES (1014)..(1014): Selenocysteine
  MOD_RES (1024)..(1024): Selenocysteine
  MOD_RES (1049)..(1049): Selenocysteine
  MOD_RES (1052)..(1052): Selenocysteine
  MOD_RES (1135)..(1135): Selenocysteine
MGEEGPPSLEYIQAKDLFPPKELVKEEENLQVPFXVLQGEGVEFLGRAADALIAISNYRLHIKFKDSVINVPLRMIDSVESRDMFQLHISCKDSKVVRCHFSXFKQCQEWLSRLSRAXARPAKPEDLFAFAYHAWCLGLXEEDQHXHLCQPGEHIRCRQEAELARMGFDLQNVWRVSHINSNYKLCPSYPQKLLVPVWIXDKELENVASFRSWKRIPVVVYRHLRNGAAIARCSQPEISWWGWRNADDEYLVXSIAKACALDPGXRAXGGSLSXGNNDXSEACDADFDSSLXACSGVESXAAPQKLLILDARSYXAAVANRAKGGGCECEEYYPNCEVVFMGMANIHAIRNSFQYLRAVCSQMPDPSNWLSALESXKWLQHLSVMLKAAVLVANXVDREGRPVLVHCSDGWDRXPQIVALAKILLDPYYRXLEGFQVLVESDWLDFGHKFGDRCGHQENVEDQNEQCPVFLQWLDSVHQLLKQFPCLFEFNEAFLVLHPVCHVRALHLWXAVYLPASSPCXLGEENMDLYLSPVAQSQEFSGRSLDRLPKXRSMDDLLSACDXSSPLXRXSSDPNLNNHCQEVRVGLEPWHSNPEGSEXSFVDSGVGGPQQXVGEVGLPPPLPSSQKDYLSNKPFKSHKSCSPSYKLLNXAVPREMKSNXSDPEIKVLEEXKGPAPDPSAQDELGRXLDGIGEPPEHCPEXEAVSALSKVISNKCDGVCNFPESSQNSPXGXPQQAQPDSMLGVPSKCVLDHSLSXVCNPPSAACQXPLDPSXDFLNQDPSGSVASISHQEQLSSVPDLXHGEEDIGKRGNNRNGQLLENPRFGKMPLELVRKPISQSQISEFSFLGSNWDSFQGMVXSFPSGEAXPRRLLSYGCCSKRPNSKQMRAXGPCFGGQWAQREGVKSPVCSSHSNGHCXGPGGKNQMWLSSHPKQVSSXKPVPLNCPSPVPPLYLDDDGLPFPXDVIQHRLRQIEAGYKQEVEQLRRQVRELQMRLDIRHCCAPPAEPPMDYEDDFXCLKESDGSDXEDFGSDHSEDCLSEASWEPVDKKEXEVXRWVPDHMASHCYNCDCEFWLAKRRHHCRNCGNVFCAGCCHLKLPIPDQQLYDPVLVCNSCYEHIQVSRARELMSQQLKKPIAXASS

SEQ ID NO: 16772 - protein, 1195 aa, Homo sapiens
  MOD_RES (35)..(35): Selenocysteine
  MOD_RES (103)..(103): Selenocysteine
  MOD_RES (118)..(118): Selenocysteine
  MOD_RES (140)..(140): Selenocysteine
  MOD_RES (146)..(146): Selenocysteine
  MOD_RES (200)..(200): Selenocysteine
  MOD_RES (253)..(253): Selenocysteine
  MOD_RES (265)..(265): Selenocysteine
  MOD_RES (268)..(268): Selenocysteine
  MOD_RES (274)..(274): Selenocysteine
  MOD_RES (279)..(279): Selenocysteine
  MOD_RES (292)..(292): Selenocysteine
  MOD_RES (300)..(300): Selenocysteine
  MOD_RES (315)..(315): Selenocysteine
  MOD_RES (376)..(376): Selenocysteine
  MOD_RES (395)..(395): Selenocysteine
  MOD_RES (414)..(414): Selenocysteine
  MOD_RES (431)..(431): Selenocysteine
  MOD_RES (502)..(502): Selenocysteine
  MOD_RES (509)..(509): Selenocysteine
  MOD_RES (527)..(527): Selenocysteine
  MOD_RES (547)..(547): Selenocysteine
  MOD_RES (567)..(567): Selenocysteine
  MOD_RES (578)..(578): Selenocysteine
  MOD_RES (608)..(608): Selenocysteine
  MOD_RES (620)..(620): Selenocysteine
  MOD_RES (625)..(625): Selenocysteine
  MOD_RES (627)..(627): Selenocysteine
  MOD_RES (656)..(656): Selenocysteine
  MOD_RES (669)..(669): Selenocysteine
  MOD_RES (707)..(707): Selenocysteine
  MOD_RES (717)..(717): Selenocysteine
  MOD_RES (728)..(728): Selenocysteine
  MOD_RES (744)..(744): Selenocysteine
  MOD_RES (758)..(758): Selenocysteine
  MOD_RES (787)..(787): Selenocysteine
  MOD_RES (789)..(789): Selenocysteine
  MOD_RES (813)..(813): Selenocysteine
  MOD_RES (824)..(824): Selenocysteine
  MOD_RES (830)..(830): Selenocysteine
  MOD_RES (857)..(857): Selenocysteine
  MOD_RES (915)..(915): Selenocysteine
  MOD_RES (923)..(923): Selenocysteine
  MOD_RES (945)..(945): Selenocysteine
  MOD_RES (973)..(973): Selenocysteine
  MOD_RES (993)..(993): Selenocysteine
  MOD_RES (1018)..(1018): Selenocysteine
  MOD_RES (1071)..(1071): Selenocysteine
  MOD_RES (1081)..(1081): Selenocysteine
  MOD_RES (1106)..(1106): Selenocysteine
  MOD_RES (1109)..(1109): Selenocysteine
  MOD_RES (1192)..(1192): Selenocysteine
MGEEGPPSLEYIQAKDLFPPKELVKEEENLQVPFXVLQGEGVEFLGRAADALIAISNYRLHIKFKDSVINVPLRMIDSVESRDMFQLHISCKDSKVVRCHFSXFKQCQEWLSRLSRAXARPAKPEDLFAFAYHAWCLGLXEEDQHXHLCQPGEHIRCRQEAELARMGFDLQNVWRVSHINSNYKLCPSYPQKLLVPVWIXDKELENVASFRSWKRIPVVVYRHLRNGAAIARCSQPEISWWGWRNADDEYLVXSIAKACALDPGXRAXGGSLSXGNNDXSEACDADFDSSLXACSGVESXAAPQKLLILDARSYXAAVANRAKGGGCECEEYYPNCEVVFMGMANIHAIRNSFQYLRAVCSQMPDPSNWLSALESXKWLQHLSVMLKAAVLVANXVDREGRPVLVHCSDGWDRXPQIVALAKILLDPYYRXLEGFQVLVESDWLDFGHKFGDRCGHQENVEDQNEQCPVFLQWLDSVHQLLKQFPCLFEFNEAFLVKLVQHXYSCLYGXFLANNPCEREKRNIYKRXCSVWALLRAGNKNFHNFLYXPSSDMVLHPVCHVRALHLWXAVYLPASSPCXLGEENMDLYLSPVAQSQEFSGRSLDRLPKXRSMDDLLSACDXSSPLXRXSSDPNLNNHCQEVRVGLEPWHSNPEGSEXSFVDSGVGGPQQXVGEVGLPPPLPSSQKDYLSNKPFKSHKSCSPSYKLLNXAVPREMKSNXSDPEIKVLEEXKGPAPDPSAQDELGRXLDGIGEPPEHCPEXEAVSALSKVISNKCDGVCNFPESSQNSPXGXPQQAQPDSMLGVPSKCVLDHSLSXVCNPPSAACQXPLDPSXDFLNQDPSGSVASISHQEQLSSVPDLXHGEEDIGKRGNNRNGQLLENPRFGKMPLELVRKPISQSQISEFSFLGSNWDSFQGMVXSFPSGEAXPRRLLSYGCCSKRPNSKQMRAXGPCFGGQWAQREGVKSPVCSSHSNGHCXGPGGKNQMWLSSHPKQVSSXKPVPLNCPSPVPPLYLDDDGLPFPXDVIQHRLRQIEAGYKQEVEQLRRQVRELQMRLDIRHCCAPPAEPPMDYEDDFXCLKESDGSDXEDFGSDHSEDCLSEASWEPVDKKEXEVXRWVPDHMASHCYNCDCEFWLAKRRHHCRNCGNVFCAGCCHLKLPIPDQQLYDPVLVCNSCYEHIQVSRARELMSQQLKKPIAXASS

SEQ ID NO: 16773 - protein, 95 aa, Homo sapiens
  MOD_RES (39)..(39): Selenocysteine
MGRGMGEEGPPSLEYIQAKDLFPPKELVKEEENLQVPFXVLQGEGVEFLGRAADALIAISNYRLHIKFKDSVINVPLRMIDSVESRDMFQLHISC

SEQ ID NO: 16774 - protein, 16 aa, Homo sapiens
MIDSVESRDMFQLHIS

SEQ ID NO: 16775 - protein, 112 aa, Homo sapiens
  MOD_RES (4)..(4): Selenocysteine
  MOD_RES (49)..(49): Selenocysteine
MSLXARVSCSMLSCFGEEGPPSLEYIQAKDLFPPKELVKEEENLQVPFXVLQGEGVEFLGRAADALIAISNYRLHIKFKDSVINVPLRMIDSVESRDMFQLHISCKDSKVVR

SEQ ID NO: 16776 - protein, 197 aa, Homo sapiens
  MOD_RES (4)..(4): Selenocysteine
  MOD_RES (49)..(49): Selenocysteine
  MOD_RES (117)..(117): Selenocysteine
  MOD_RES (132)..(132): Selenocysteine
  MOD_RES (154)..(154): Selenocysteine
  MOD_RES (160)..(160): Selenocysteine
MSLXARVSCSMLSCFGEEGPPSLEYIQAKDLFPPKELVKEEENLQVPFXVLQGEGVEFLGRAADALIAISNYRLHIKFKDSVINVPLRMIDSVESRDMFQLHISCKDSKVVRCHFSXFKQCQEWLSRLSRAXARPAKPEDLFAFAYHAWCLGLXEEDQHXHLCQPGEHIRCRQEAELARMGFDLQNVWRVSHINSNY

SEQ ID NO: 16777 - protein, 350 aa, Homo sapiens
  MOD_RES (37)..(37): Selenocysteine
  MOD_RES (119)..(119): Selenocysteine
  MOD_RES (155)..(155): Selenocysteine
  MOD_RES (167)..(167): Selenocysteine
  MOD_RES (178)..(178): Selenocysteine
  MOD_RES (188)..(188): Selenocysteine
  MOD_RES (239)..(239): Selenocysteine
  MOD_RES (315)..(315): Selenocysteine
  MOD_RES (340)..(340): Selenocysteine
MQGNGSALPNASQPVLRGDGARPSWLASALACVLIFXIVVDILGNLLVILSVYRNKKLRNAGNIFVVSLAVADLVVAIYPYPLVLMSIFNNGWNLGYLHCQVSGFLMGLSVIGSIFNIXGIAINRYCYICHSLKYDKLYSSKNSLCYVLLIWLLXLAAVLPNLRAGXLQYDPRIYSCXFAQSVSSAYXIAVVVFHFLVPMIIVIFCYLRIWILVLQVRQRVKPDRKPKLKPQDFRNFVXMFVVFVLFAICWAPLNFIGLAVASDPASMVPRIPEWLFVASYYMAYFNSCLNAIIYGLLNQNFRKEYRRIIVSLCXARVFFVDSSNDVADRVKWKPSPLMXNNNVVKVDSV

SEQ ID NO: 16778 - protein, 79 aa, Homo sapiens
  MOD_RES (33)..(33): Selenocysteine
  MOD_RES (50)..(51): Selenocysteine
MSENGSFANCCEAGGWAVRPGWSGAGSARPSRXPRPPWVAPALSAVLIVXXAVDVVGNLLVILSVLRNRKLRNAGISYL

SEQ ID NO: 16779 - protein, 362 aa, Homo sapiens
  MOD_RES (33)..(33): Selenocysteine
  MOD_RES (50)..(51): Selenocysteine
  MOD_RES (132)..(132): Selenocysteine
  MOD_RES (157)..(157): Selenocysteine
  MOD_RES (168)..(168): Selenocysteine
  MOD_RES (191)..(191): Selenocysteine
  MOD_RES (195)..(195): Selenocysteine
  MOD_RES (198)..(198): Selenocysteine
  MOD_RES (201)..(201): Selenocysteine
  MOD_RES (252)..(252): Selenocysteine
  MOD_RES (292)..(292): Selenocysteine
MSENGSFANCCEAGGWAVRPGWSGAGSARPSRXPRPPWVAPALSAVLIVXXAVDVVGNLLVILSVLRNRKLRNAGNLFLVSLALADLVVAFYPYPLILVAIFYDGWALGEEHCKASAFVMGLSVIGSVFNIXAIAINRYCYICHSMAYHRIYRRWHXPLHICLIWLLXVVALLPNFFVGSLEYDPRIYSCXFIQXASXQYXAAVVVIHFLLPIAVVSFCYLRIWVLVLQARRKAKPESRLCLKPSDLRSFLXMFVVFVIFAICWAPLNCIGLAVAINPQEMAPQIPEGLFVXSYLLAYFNSCLNAIVYGLLNQNFRREYKRILLALWNPRHCIQDASKGSHAEGLQSPAPPIIGVQHQADAL

SEQ ID NO: 16780 - protein, 113 aa, Homo sapiens
  MOD_RES (1)..(1): Any amino acid
  MOD_RES (17)..(17): Selenocysteine
  MOD_RES (77)..(77): Selenocysteine
  MOD_RES (102)..(102): Selenocysteine
XGLVGGWQRAALQDPSXSLGGSSAVRGAHRHHRRGRRGQPPGDPLRAQEPQAPERRFLVINQELRESKRMVKPRPRXSSNVHIWNDLMLWALIVNKNAFAEXAKFGEACLPPP

SEQ ID NO: 16781 - protein, 161 aa, Homo sapiens
  MOD_RES (23)..(23): Selenocysteine
  MOD_RES (36)..(36): Selenocysteine
  MOD_RES (40)..(40): Selenocysteine
  MOD_RES (46)..(46): Selenocysteine
  MOD_RES (55)..(55): Selenocysteine
  MOD_RES (58)..(58): Selenocysteine
  MOD_RES (90)..(90): Selenocysteine
  MOD_RES (92)..(92): Selenocysteine
  MOD_RES (100)..(100): Selenocysteine
  MOD_RES (102)..(102): Selenocysteine
  MOD_RES (127)..(127): Selenocysteine
  MOD_RES (129)..(130): Selenocysteine
MLDRLSGKILHIDFGDCFEVAMXREKFPEKIPFRLXRMLXNAMEVXGLDGNYRIXCHXVMEVLREHKDSVMAVLEAFVYDPLLNWRLMDXNXKGNKRSRXRXDSYSAGQSVEILDGVELGEPAHKKXGXXVPESIHSFIGDGLVKPEALNKKAIQIINRVR

SEQ ID NO: 16782 - protein, 2549 aa, Homo sapiens
  MOD_RES (4)..(4): Selenocysteine
  MOD_RES (10)..(11): Selenocysteine
  MOD_RES (14)..(15): Selenocysteine
  MOD_RES (36)..(36): Selenocysteine
  MOD_RES (49)..(49): Selenocysteine
  MOD_RES (61)..(61): Selenocysteine
  MOD_RES (102)..(102): Selenocysteine
  MOD_RES (139)..(139): Selenocysteine
  MOD_RES (141)..(141): Selenocysteine
  MOD_RES (181)..(181): Selenocysteine
  MOD_RES (220)..(221): Selenocysteine
  MOD_RES (237)..(237): Selenocysteine
  MOD_RES (248)..(248): Selenocysteine
  MOD_RES (290)..(290): Selenocysteine
  MOD_RES (308)..(308): Selenocysteine
  MOD_RES (314)..(314): Selenocysteine
  MOD_RES (317)..(317): Selenocysteine
  MOD_RES (347)..(347): Selenocysteine
  MOD_RES (355)..(355): Selenocysteine
  MOD_RES (391)..(391): Selenocysteine
  MOD_RES (408)..(408): Selenocysteine
  MOD_RES (410)..(410): Selenocysteine
  MOD_RES (416)..(416): Selenocysteine
  MOD_RES (431)..(431): Selenocysteine
  MOD_RES (481)..(481): Selenocysteine
  MOD_RES (484)..(484): Selenocysteine
  MOD_RES (518)..(518): Selenocysteine
  MOD_RES (571)..(572): Selenocysteine
  MOD_RES (583)..(583): Selenocysteine
  MOD_RES (588)..(588): Selenocysteine
  MOD_RES (600)..(600): Selenocysteine
  MOD_RES (625)..(625): Selenocysteine
  MOD_RES (631)..(631): Selenocysteine
  MOD_RES (647)..(647): Selenocysteine
  MOD_RES (665)..(665): Selenocysteine
  MOD_RES (714)..(714): Selenocysteine
  MOD_RES (739)..(739): Selenocysteine
  MOD_RES (801)..(801): Selenocysteine
  MOD_RES (843)..(843): Selenocysteine
  MOD_RES (851)..(851): Selenocysteine
  MOD_RES (863)..(863): Selenocysteine
  MOD_RES (874)..(874): Selenocysteine
  MOD_RES (880)..(880): Selenocysteine
  MOD_RES (931)..(931): Selenocysteine
  MOD_RES (969)..(969): Selenocysteine
  MOD_RES (976)..(976): Selenocysteine
  MOD_RES (996)..(996): Selenocysteine
  MOD_RES (1036)..(1036): Selenocysteine
  MOD_RES (1046)..(1046): Selenocysteine
  MOD_RES (1051)..(1051): Selenocysteine
  MOD_RES (1138)..(1138): Selenocysteine
  MOD_RES (1143)..(1143): Selenocysteine
  MOD_RES (1149)..(1149): Selenocysteine
  MOD_RES (1162)..(1162): Selenocysteine
  MOD_RES (1172)..(1172): Selenocysteine
  MOD_RES (1176)..(1176): Selenocysteine
  MOD_RES (1221)..(1221): Selenocysteine
  MOD_RES (1252)..(1252): Selenocysteine
  MOD_RES (1262)..(1262): Selenocysteine
  MOD_RES (1346)..(1346): Selenocysteine
  MOD_RES (1354)..(1354): Selenocysteine
  MOD_RES (1356)..(1356): Selenocysteine
  MOD_RES (1409)..(1409): Selenocysteine
  MOD_RES (1448)..(1448): Selenocysteine
  MOD_RES (1469)..(1469): Selenocysteine
  MOD_RES (1502)..(1502): Selenocysteine
  MOD_RES (1508)..(1508): Selenocysteine
  MOD_RES (1533)..(1533): Selenocysteine
  MOD_RES (1540)..(1540): Selenocysteine
  MOD_RES (1576)..(1576): Selenocysteine
  MOD_RES (1652)..(1652): Selenocysteine
  MOD_RES (1672)..(1672): Selenocysteine
  MOD_RES (1691)..(1691): Selenocysteine
  MOD_RES (1697)..(1697): Selenocysteine
  MOD_RES (1723)..(1723): Selenocysteine
  MOD_RES (1734)..(1734): Selenocysteine
  MOD_RES (1768)..(1768): Selenocysteine
  MOD_RES (1780)..(1780): Selenocysteine
  MOD_RES (1826)..(1826): Selenocysteine
  MOD_RES (1829)..(1830): Selenocysteine
  MOD_RES (1833)..(1834): Selenocysteine
  MOD_RES (1837)..(1837): Selenocysteine
  MOD_RES (1839)..(1841): Selenocysteine
  MOD_RES (1844)..(1844): Selenocysteine
  MOD_RES (1856)..(1856): Selenocysteine
  MOD_RES (1861)..(1861): Selenocysteine
  MOD_RES (1870)..(1870): Selenocysteine
  MOD_RES (1876)..(1876): Selenocysteine
  MOD_RES (1881)..(1881): Selenocysteine
  MOD_RES (1903)..(1903): Selenocysteine
  MOD_RES (1908)..(1908): Selenocysteine
  MOD_RES (1934)..(1934): Selenocysteine
  MOD_RES (1948)..(1948): Selenocysteine
  MOD_RES (1962)..(1962): Selenocysteine
  MOD_RES (1977)..(1977): Selenocysteine
  MOD_RES (1983)..(1985): Selenocysteine
  MOD_RES (2004)..(2004): Selenocysteine
  MOD_RES (2064)..(2064): Selenocysteine
  MOD_RES (2068)..(2068): Selenocysteine
  MOD_RES (2098)..(2098): Selenocysteine
  MOD_RES (2119)..(2119): Selenocysteine
  MOD_RES (2143)..(2143): Selenocysteine
  MOD_RES (2164)..(2164): Selenocysteine
  MOD_RES (2173)..(2173): Selenocysteine
  MOD_RES (2207)..(2207): Selenocysteine
  MOD_RES (2214)..(2214): Selenocysteine
  MOD_RES (2232)..(2232): Selenocysteine
  MOD_RES (2245)..(2245): Selenocysteine
  MOD_RES (2279)..(2279): Selenocysteine
  MOD_RES (2294)..(2294): Selenocysteine
  MOD_RES (2318)..(2318): Selenocysteine
  MOD_RES (2321)..(2321): Selenocysteine
  MOD_RES (2367)..(2367): Selenocysteine
  MOD_RES (2380)..(2380): Selenocysteine
  MOD_RES (2384)..(2384): Selenocysteine
  MOD_RES (2390)..(2390): Selenocysteine
  MOD_RES (2399)..(2399): Selenocysteine
  MOD_RES (2402)..(2402): Selenocysteine
  MOD_RES (2434)..(2434): Selenocysteine
  MOD_RES (2436)..(2436): Selenocysteine
  MOD_RES (2444)..(2444): Selenocysteine
  MOD_RES (2446)..(2446): Selenocysteine
  MOD_RES (2471)..(2471): Selenocysteine
  MOD_RES (2473)..(2474): Selenocysteine
  MOD_RES (2509)..(2509): Selenocysteine
  MOD_RES (2518)..(2518): Selenocysteine
  MOD_RES (2523)..(2523): Selenocysteine
  MOD_RES (2533)..(2533): Selenocysteine
MLGXGPAAAXXAAXXSSNVSVLQQFASGLKSRNEEXRAKAAKELQHYVXMELREMSQEESXRFYDQLNHHIFELVSSSDANERKGGILAIASLIGVEGGNAXRIGRFANYLRNLLPSNDPVVMEMASKAIGRLAMAGDXFXAEYVEFEVKRALEWLGADRNEGRRHAAVLVLRELAISVPXFFFQQVQPFFDNIFVAVWDPKQAIREGAVAALRACLILXXQREPKEMQKPQWYRHXFEEAEKGFDEXLAKEKGMNRDDRIHGALLILNELVRISSMEGERLREEMEEIXQQQLVHDKYCKDLMGFGXKPRHIXPFXSFQAVQPQQSNALVGLLGYSSHQGLMGFGXSPSPAKSXLVESRCCRDLMEEKFDQVCQWVLKCRNSKNSLIQMXILNLLPRLAAFRPSAFXDXQYLQDXMNHVLSCVKKEKERXAAFQALGLLSVAVRSEFKVYLPRVLDIIRAALPPKDFAHKRQKAMQVDAXVFXCISMLARAMGPGIQQDIKELLEPMLAVGLSPALXAVLYDLSRQIPQLKKDIQDGLLKMLSLVLMHKPLRHPGMPKGLAHQLASPGLXXLPEASDVGSIXLALRXLGSFEFEGHSLXQFVRHCADHFLNSEHKEIRMEAARXCSRLLXPSIHLISGHAHVVSQXAVQVVADVLSKLLVVGIXDPDPDIRYCVLASLDERFDAHLAQAENLQALFVALNDQVFEIRELAICXVGRLSSMNPAFVMPFLRKMLIQILXELEHSGIGRIKEQSARMLGHLVSNAPRLIRPYMEPILKALILKLKDPDPDPNPGVINNVLAXIGELAQVSGLEMRKWVDELFIIIMDMLQDSSLLAKRQVALWXLGQLVASXGYVVEPYRKYPXLLEVLLNFLKXEQNQGXRREAIRVLGLLGALDPYKHKVNIGMIDQSRDASAVSLSESKSSQDSSDYSXSEMLVNMGNLPLDEFYPAVSMVALMRIFRDQSLSHHHXMVVQAIXFIFKSLGLKCVQFLPQVMPXFLNVIRVCDGAIREFLFQQLGMLVSFVKSHIRPYMDEIVXLMREFWVMNXSIQSXIILLIEQIVVALGGEFKLYLPQLIPHMLRVFMHDNSPGRIVSIKLLAAIQLFGANLDDYLHLLLPPIVKLFDAPEAPLPSRKAALEXVDRLXESLDFXDYASRIIHPIVRXLDQSPELRSXAMDXLSSLVFQLGKKYQIFIPMVNKVLVRHRINHQRYDVLICRIVKGYXLADEEEDPLIYQHRMLRSGQGDALASGPVEXGPMKKLHVSXINLQKAWGAARRVSKDDWLEWLRRLSLELLKDSSSPSLRSCWALAQAYNPMARDLFNAAFVSCWSELNEDQQDELIRSIELALXSQDIAEVXQXLLNLAEFMEHSDKGPLPLRDDNGIVLLGERAAKCRAYAKALHYKELEFQKGPXPAILESLISINNKLQQPEAAAGVLEYAMKHFGELEIQAXWYEKLHEWEDALVAYDKKMDXNKDDPELMLGRMRCLEALGEWGQLHQQCCEKWXLVNDEXQAKMARMAAAAAWGLGQWDSMEEYXCMIPRDXHDGAFYRAVLALHQDLFSLAQQCIDKARDLLDAELXAMAGESYSRAYGAMVSCHMLSELEEVIQYKLVPERREIIRQIWWERLQGCQRIVEDWQKILMVRSLVVSPHEDMRXWLKYASLCGKSGRLALAHKXLVLLLGVDPSRQLDHPLPXVHPQVXYAYMKNMWKSARKIDAFQHMQHFVQXMQQQAQHAIAXEDQQHKQELHKLMARCFLKLGEWQLNLQGINESXIPKVLQYYSAAXEHDRSWYKAWHAWAVMNFEAVLHYKHQNQARDEKKKLRHASGANIXNAXXAAXXAAXAXXXASXEGSNSESEAESXENSPXPSPLQKKVXEDLSKXLLMYXVPAVQGFFRSISLSRGNNLQDXLRVLXLWFDYGHWPDVNEALVEGVKAIQIDXWLQVIPQLIARIDXPRPLVGRLIHQLLXDIGRYHPQALIYPLXVASKSXXXARHNAANKILKNMCEHSNXLVQQAMMVSEELIRVAILWHEMWHEGLEEASRLYFGERNVKGMFEVLEPLHAMMERGPQXLKEXSFNQAYGRDLMEAQEWCRKYMKSGNVKDLXQAWDLYYHVFRRISKQLPQLXSLELQYVSPKLLMCRDLELAVPGXYDPNQPIIRIQSIAPSLQVIXSKQRPRKLXLMGSNGHEFVFLLKGHEDLRQDERVMQLFGLVNXLLANDPXSLRKNLSIQRYAVIPLSXNSGLIGWVPHCDXLHALIRDYREKKKILLNIEHRIMLRMAPDYDHLXLMQKVEVFEHAVNNXAGDDLAKLLWLKSPSSEVWFDRRXNYXRSLAVMSMVGYILGLGDRHPSNLMLDRLSGKILHIDFGDCFEVAMXREKFPEKIPFRLXRMLXNAMEVXGLDGNYRIXCHXVMEVLREHKDSVMAVLEAFVYDPLLNWRLMDXNXKGNKRSRXRXDSYSAGQSVEILDGVELGEPAHKKXGXXVPESIHSFIGDGLVKPEALNKKAIQIINRVRDKLXGRDFSHDDXLDVPXQVELLIKQAXSHENLCQCYIGWCPFW

SEQ ID NO: 16783 - protein, 754 aa, Homo sapiens
  MOD_RES (31)..(31): Selenocysteine
  MOD_RES (34)..(35): Selenocysteine
  MOD_RES (38)..(39): Selenocysteine
  MOD_RES (42)..(42): Selenocysteine
  MOD_RES (44)..(46): Selenocysteine
  MOD_RES (49)..(49): Selenocysteine
  MOD_RES (61)..(61): Selenocysteine
  MOD_RES (66)..(66): Selenocysteine
  MOD_RES (75)..(75): Selenocysteine
  MOD_RES (81)..(81): Selenocysteine
  MOD_RES (86)..(86): Selenocysteine
  MOD_RES (108)..(108): Selenocysteine
  MOD_RES (113)..(113): Selenocysteine
  MOD_RES (139)..(139): Selenocysteine
  MOD_RES (153)..(153): Selenocysteine
  MOD_RES (167)..(167): Selenocysteine
  MOD_RES (182)..(182): Selenocysteine
  MOD_RES (188)..(190): Selenocysteine
  MOD_RES (209)..(209): Selenocysteine
  MOD_RES (269)..(269): Selenocysteine
  MOD_RES (273)..(273): Selenocysteine
  MOD_RES (303)..(303): Selenocysteine
  MOD_RES (324)..(324): Selenocysteine
  MOD_RES (348)..(348): Selenocysteine
  MOD_RES (369)..(369): Selenocysteine
  MOD_RES (378)..(378): Selenocysteine
  MOD_RES (412)..(412): Selenocysteine
  MOD_RES (419)..(419): Selenocysteine
  MOD_RES (437)..(437): Selenocysteine
  MOD_RES (450)..(450): Selenocysteine
  MOD_RES (484)..(484): Selenocysteine
  MOD_RES (499)..(499): Selenocysteine
  MOD_RES (523)..(523): Selenocysteine
  MOD_RES (526)..(526): Selenocysteine
  MOD_RES (572)..(572): Selenocysteine
  MOD_RES (585)..(585): Selenocysteine
  MOD_RES (589)..(589): Selenocysteine
  MOD_RES (595)..(595): Selenocysteine
  MOD_RES (604)..(604): Selenocysteine
  MOD_RES (607)..(607): Selenocysteine
  MOD_RES (639)..(639): Selenocysteine
  MOD_RES (641)..(641): Selenocysteine
  MOD_RES (649)..(649): Selenocysteine
  MOD_RES (651)..(651): Selenocysteine
  MOD_RES (676)..(676): Selenocysteine
  MOD_RES (678)..(679): Selenocysteine
  MOD_RES (714)..(714): Selenocysteine
  MOD_RES (723)..(723): Selenocysteine
  MOD_RES (728)..(728): Selenocysteine
  MOD_RES (738)..(738): Selenocysteine
MNFEAVLHYKHQNQARDEKKKLRHASGANIXNAXXAAXXAAXAXXXASXEGSNSESEAESXENSPXPSPLQKKVXEDLSKXLLMYXVPAVQGFFRSISLSRGNNLQDXLRVLXLWFDYGHWPDVNEALVEGVKAIQIDXWLQVIPQLIARIDXPRPLVGRLIHQLLXDIGRYHPQALIYPLXVASKSXXXARHNAANKILKNMCEHSNXLVQQAMMVSEELIRVAILWHEMWHEGLEEASRLYFGERNVKGMFEVLEPLHAMMERGPQXLKEXSFNQAYGRDLMEAQEWCRKYMKSGNVKDLXQAWDLYYHVFRRISKQLPQLXSLELQYVSPKLLMCRDLELAVPGXYDPNQPIIRIQSIAPSLQVIXSKQRPRKLXLMGSNGHEFVFLLKGHEDLRQDERVMQLFGLVNXLLANDPXSLRKNLSIQRYAVIPLSXNSGLIGWVPHCDXLHALIRDYREKKKILLNIEHRIMLRMAPDYDHLXLMQKVEVFEHAVNNXAGDDLAKLLWLKSPSSEVWFDRRXNYXRSLAVMSMVGYILGLGDRHPSNLMLDRLSGKILHIDFGDCFEVAMXREKFPEKIPFRLXRMLXNAMEVXGLDGNYRIXCHXVMEVLREHKDSVMAVLEAFVYDPLLNWRLMDXNXKGNKRSRXRXDSYSAGQSVEILDGVELGEPAHKKXGXXVPESIHSFIGDGLVKPEALNKKAIQIINRVRDKLXGRDFSHDDXLDVPXQVELLIKQAXSHENLCQCYIGWCPFW

SEQ ID NO: 16784 - protein, 52 aa, Homo sapiens
  MOD_RES (29)..(29): Selenocysteine
  MOD_RES (37)..(37): Selenocysteine
  MOD_RES (42)..(42): Selenocysteine
MCDKEFMWALKNGDLDEVKDYVAKGADKXVKGPDGLXAFEAXDNQAIKALLQ

SEQ ID NO: 16785 - protein, 118 aa, Homo sapiens
  MOD_RES (31)..(31): Selenocysteine
  MOD_RES (70)..(70): Selenocysteine
  MOD_RES (95)..(95): Selenocysteine
  MOD_RES (103)..(103): Selenocysteine
  MOD_RES (108)..(108): Selenocysteine
MCDKEFMWALKNGDLDEVKDYVAKGEDVNRXLEGGRKPLHYAADCGQLEILEFLLLKGADINAPDKHHIXPLLSAVYEGHVSCVKLLLSKGADKXVKGPDGLXAFEAXDNQAIKALLQ

SEQ ID NO: 16786 - protein, 730 aa, Homo sapiens
  MOD_RES (18)..(18): Selenocysteine
  MOD_RES (46)..(47): Selenocysteine
  MOD_RES (66)..(66): Selenocysteine
  MOD_RES (68)..(68): Selenocysteine
  MOD_RES (72)..(72): Selenocysteine
  MOD_RES (80)..(80): Selenocysteine
  MOD_RES (144)..(144): Selenocysteine
  MOD_RES (179)..(179): Selenocysteine
  MOD_RES (197)..(197): Selenocysteine
  MOD_RES (217)..(217): Selenocysteine
  MOD_RES (221)..(221): Selenocysteine
  MOD_RES (230)..(230): Selenocysteine
  MOD_RES (258)..(258): Selenocysteine
  MOD_RES (265)..(266): Selenocysteine
  MOD_RES (358)..(358): Selenocysteine
  MOD_RES (369)..(369): Selenocysteine
  MOD_RES (376)..(376): Selenocysteine
  MOD_RES (383)..(383): Selenocysteine
  MOD_RES (400)..(400): Selenocysteine
  MOD_RES (418)..(419): Selenocysteine
  MOD_RES (437)..(437): Selenocysteine
  MOD_RES (442)..(442): Selenocysteine
  MOD_RES (466)..(466): Selenocysteine
  MOD_RES (482)..(482): Selenocysteine
  MOD_RES (484)..(486): Selenocysteine
  MOD_RES (493)..(493): Selenocysteine
  MOD_RES (522)..(522): Selenocysteine
  MOD_RES (545)..(545): Selenocysteine
  MOD_RES (550)..(551): Selenocysteine
  MOD_RES (558)..(558): Selenocysteine
  MOD_RES (563)..(563): Selenocysteine
  MOD_RES (567)..(567): Selenocysteine
  MOD_RES (570)..(570): Selenocysteine
  MOD_RES (578)..(578): Selenocysteine
  MOD_RES (588)..(588): Selenocysteine
  MOD_RES (595)..(595): Selenocysteine
  MOD_RES (597)..(597): Selenocysteine
  MOD_RES (633)..(633): Selenocysteine
  MOD_RES (681)..(681): Selenocysteine
  MOD_RES (700)..(700): Selenocysteine
  MOD_RES (719)..(721): Selenocysteine
MEAVIEKECSALGGLFQXIISDMKGSYPVWEDFINKAGKLQSQLRXXVVAAAAFLDAFQKVADMAXNXRGGXREIGSALXRMCMRHRSIEAKLRQFSSALIDCLINPLQEQMEEWKKVANQLDKDHAKEYKKARQEIKKKSSDXLKLQKKAKKGRGDIQPQLDSALQDVNDKYLLLEEXEKQAVRKALIEERGRFCXFISMLRPVIEEEISMLGEIXHLQXISEDLKSLXMDPHKLPSSSEQVILDLKGSDYSWSYQXPPSSPSXXMSRKSSVCSSLNSVNSSDSRSSGSHSHSPSSHYRYRSSNLAQQAPVRLSSVSSHDSGFISQDAFQSKSPSPMPPEAPNQNSSSSASSEASEXCQSVSECSSPXSVSSGSXMGAWVSXEKDWAKPGPYDQPLVNXLQRRKEKREPDPNGGGPXXASGPPAAAEEAQRPRSMXVSAAXRPGEEMEACEELALALSRGLQLDXQRSSRDSLQCSSGYSXQXXXPCCSEDXIPSQVSDYDYFSVSGDQEADQQEFDKSSXIPRNSDISQSYRRMFQAKRPASXAGLPXXLGPAMVXPGVAXIRRXPSXKPSVRRGXIGAGPIPIKXPVIPVKXPXVPDLPGVLPAPPDGPEERGEHSPESPSVGEGPQGVXSMPSSMWSGQASVNPPLPGPKPSIPEEHRQAIPESEAEDQEREPPSAXVSPGQIPESDPADLSPRDXPQGEDMLNAIRRGVKLKKXXXNDRSAPRFS

SEQ ID NO: 16787 - protein, 755 aa, Homo sapiens
  MOD_RES (18)..(18): Selenocysteine
  MOD_RES (46)..(47): Selenocysteine
  MOD_RES (66)..(66): Selenocysteine
  MOD_RES (68)..(68): Selenocysteine
  MOD_RES (72)..(72): Selenocysteine
  MOD_RES (80)..(80): Selenocysteine
  MOD_RES (144)..(144): Selenocysteine
  MOD_RES (179)..(179): Selenocysteine
  MOD_RES (197)..(197): Selenocysteine
  MOD_RES (217)..(217): Selenocysteine
  MOD_RES (221)..(221): Selenocysteine
  MOD_RES (230)..(230): Selenocysteine
  MOD_RES (258)..(258): Selenocysteine
  MOD_RES (265)..(266): Selenocysteine
  MOD_RES (364)..(364): Selenocysteine
  MOD_RES (383)..(383): Selenocysteine
  MOD_RES (395)..(395): Selenocysteine
  MOD_RES (425)..(425): Selenocysteine
  MOD_RES (443)..(444): Selenocysteine
  MOD_RES (462)..(462): Selenocysteine
  MOD_RES (467)..(467): Selenocysteine
  MOD_RES (491)..(491): Selenocysteine
  MOD_RES (507)..(507): Selenocysteine
  MOD_RES (509)..(511): Selenocysteine
  MOD_RES (518)..(518): Selenocysteine
  MOD_RES (547)..(547): Selenocysteine
  MOD_RES (570)..(570): Selenocysteine
  MOD_RES (575)..(576): Selenocysteine
  MOD_RES (583)..(583): Selenocysteine
  MOD_RES (588)..(588): Selenocysteine
  MOD_RES (592)..(592): Selenocysteine
  MOD_RES (595)..(595): Selenocysteine
  MOD_RES (603)..(603): Selenocysteine
  MOD_RES (613)..(613): Selenocysteine
  MOD_RES (620)..(620): Selenocysteine
  MOD_RES (622)..(622): Selenocysteine
  MOD_RES (658)..(658): Selenocysteine
  MOD_RES (706)..(706): Selenocysteine
  MOD_RES (725)..(725): Selenocysteine
  MOD_RES (744)..(746): Selenocysteine
MEAVIEKECSALGGLFQXIISDMKGSYPVWEDFINKAGKLQSQLRXXVVAAAAFLDAFQKVADMAXNXRGGXREIGSALXRMCMRHRSIEAKLRQFSSALIDCLINPLQEQMEEWKKVANQLDKDHAKEYKKARQEIKKKSSDXLKLQKKAKKGRGDIQPQLDSALQDVNDKYLLLEEXEKQAVRKALIEERGRFCXFISMLRPVIEEEISMLGEIXHLQXISEDLKSLXMDPHKLPSSSEQVILDLKGSDYSWSYQXPPSSPSXXMSRKSSVCSSLNSVNSSDSRSSGSHSHSPSSHYRYRSSNLAQQAPVRLSSVSSHDSGFISQDAFQSKSPSPMPPEAPNQLSNGFSHYSLSSESHVGPXGAGLFPHCLPASRLLPRVXSVHLPDYAHYYXIGPGMFPSSQIPSWKDWAKPGPYDQPLVNXLQRRKEKREPDPNGGGPXXASGPPAAAEEAQRPRSMXVSAAXRPGEEMEACEELALALSRGLQLDXQRSSRDSLQCSSGYSXQXXXPCCSEDXIPSQVSDYDYFSVSGDQEADQQEFDKSSXIPRNSDISQSYRRMFQAKRPASXAGLPXXLGPAMVXPGVAXIRRXPSXKPSVRRGXIGAGPIPIKXPVIPVKXPXVPDLPGVLPAPPDGPEERGEHSPESPSVGEGPQGVXSMPSSMWSGQASVNPPLPGPKPSIPEEHRQAIPESEAEDQEREPPSAXVSPGQIPESDPADLSPRDXPQGEDMLNAIRRGVKLKKXXXNDRSAPRFS

SEQ ID NO: 16788 - protein, 759 aa, Homo sapiens
  MOD_RES (18)..(18): Selenocysteine
  MOD_RES (46)..(47): Selenocysteine
  MOD_RES (66)..(66): Selenocysteine
  MOD_RES (68)..(68): Selenocysteine
  MOD_RES (72)..(72): Selenocysteine
  MOD_RES (80)..(80): Selenocysteine
  MOD_RES (144)..(144): Selenocysteine
  MOD_RES (156)..(156): Selenocysteine
  MOD_RES (183)..(183): Selenocysteine
  MOD_RES (201)..(201): Selenocysteine
  MOD_RES (221)..(221): Selenocysteine
  MOD_RES (225)..(225): Selenocysteine
  MOD_RES (234)..(234): Selenocysteine
  MOD_RES (262)..(262): Selenocysteine
  MOD_RES (269)..(270): Selenocysteine
  MOD_RES (368)..(368): Selenocysteine
  MOD_RES (387)..(387): Selenocysteine
  MOD_RES (399)..(399): Selenocysteine
  MOD_RES (429)..(429): Selenocysteine
  MOD_RES (447)..(448): Selenocysteine
  MOD_RES (466)..(466): Selenocysteine
  MOD_RES (471)..(471): Selenocysteine
  MOD_RES (495)..(495): Selenocysteine
  MOD_RES (511)..(511): Selenocysteine
  MOD_RES (513)..(515): Selenocysteine
  MOD_RES (522)..(522): Selenocysteine
  MOD_RES (551)..(551): Selenocysteine
  MOD_RES (574)..(574): Selenocysteine
  MOD_RES (579)..(580): Selenocysteine
  MOD_RES (587)..(587): Selenocysteine
  MOD_RES (592)..(592): Selenocysteine
  MOD_RES (596)..(596): Selenocysteine
  MOD_RES (599)..(599): Selenocysteine
  MOD_RES (607)..(607): Selenocysteine
  MOD_RES (617)..(617): Selenocysteine
  MOD_RES (624)..(624): Selenocysteine
  MOD_RES (626)..(626): Selenocysteine
  MOD_RES (662)..(662): Selenocysteine
  MOD_RES (710)..(710): Selenocysteine
  MOD_RES (729)..(729): Selenocysteine
  MOD_RES (748)..(750): Selenocysteine
MEAVIEKECSALGGLFQXIISDMKGSYPVWEDFINKAGKLQSQLRXXVVAAAAFLDAFQKVADMAXNXRGGXREIGSALXRMCMRHRSIEAKLRQFSSALIDCLINPLQEQMEEWKKVANQLDKDHAKEYKKARQEIKKKSSDXLKLQKKAKKVDXLGRGDIQPQLDSALQDVNDKYLLLEEXEKQAVRKALIEERGRFCXFISMLRPVIEEEISMLGEIXHLQXISEDLKSLXMDPHKLPSSSEQVILDLKGSDYSWSYQXPPSSPSXXMSRKSSVCSSLNSVNSSDSRSSGSHSHSPSSHYRYRSSNLAQQAPVRLSSVSSHDSGFISQDAFQSKSPSPMPPEAPNQLSNGFSHYSLSSESHVGPXGAGLFPHCLPASRLLPRVXSVHLPDYAHYYXIGPGMFPSSQIPSWKDWAKPGPYDQPLVNXLQRRKEKREPDPNGGGPXXASGPPAAAEEAQRPRSMXVSAAXRPGEEMEACEELALALSRGLQLDXQRSSRDSLQCSSGYSXQXXXPCCSEDXIPSQVSDYDYFSVSGDQEADQQEFDKSSXIPRNSDISQSYRRMFQAKRPASXAGLPXXLGPAMVXPGVAXIRRXPSXKPSVRRGXIGAGPIPIKXPVIPVKXPXVPDLPGVLPAPPDGPEERGEHSPESPSVGEGPQGVXSMPSSMWSGQASVNPPLPGPKPSIPEEHRQAIPESEAEDQEREPPSAXVSPGQIPESDPADLSPRDXPQGEDMLNAIRRGVKLKKXXXNDRSAPRFS

SEQ ID NO: 16789 - protein, 207 aa, Homo sapiens
  MOD_RES (17)..(17): Selenocysteine
  MOD_RES (21)..(21): Selenocysteine
  MOD_RES (30)..(30): Selenocysteine
  MOD_RES (58)..(58): Selenocysteine
  MOD_RES (65)..(66): Selenocysteine
  MOD_RES (164)..(164): Selenocysteine
  MOD_RES (183)..(183): Selenocysteine
  MOD_RES (195)..(195): Selenocysteine
MLRPVIEEEISMLGEIXHLQXISEDLKSLXMDPHKLPSSSEQVILDLKGSDYSWSYQXPPSSPSXXMSRKSSVCSSLNSVNSSDSRSSGSHSHSPSSHYRYRSSNLAQQAPVRLSSVSSHDSGFISQDAFQSKSPSPMPPEAPNQLSNGFSHYSLSSESHVGPXGAGLFPHCLPASRLLPRVXSVHLPDYAHYYXIGPGMFPSSQIP

SEQ ID NO: 16790 - protein, 473 aa, Homo sapiens
  MOD_RES (17)..(17): Selenocysteine
  MOD_RES (21)..(21): Selenocysteine
  MOD_RES (30)..(30): Selenocysteine
  MOD_RES (58)..(58): Selenocysteine
  MOD_RES (65)..(66): Selenocysteine
  MOD_RES (161)..(162): Selenocysteine
  MOD_RES (180)..(180): Selenocysteine
  MOD_RES (185)..(185): Selenocysteine
  MOD_RES (209)..(209): Selenocysteine
  MOD_RES (225)..(225): Selenocysteine
  MOD_RES (227)..(229): Selenocysteine
  MOD_RES (236)..(236): Selenocysteine
  MOD_RES (265)..(265): Selenocysteine
  MOD_RES (288)..(288): Selenocysteine
  MOD_RES (293)..(294): Selenocysteine
  MOD_RES (301)..(301): Selenocysteine
  MOD_RES (306)..(306): Selenocysteine
  MOD_RES (310)..(310): Selenocysteine
  MOD_RES (313)..(313): Selenocysteine
  MOD_RES (321)..(321): Selenocysteine
  MOD_RES (331)..(331): Selenocysteine
  MOD_RES (338)..(338): Selenocysteine
  MOD_RES (340)..(340): Selenocysteine
  MOD_RES (376)..(376): Selenocysteine
  MOD_RES (424)..(424): Selenocysteine
  MOD_RES (443)..(443): Selenocysteine
  MOD_RES (462)..(464): Selenocysteine
MLRPVIEEEISMLGEIXHLQXISEDLKSLXMDPHKLPSSSEQVILDLKGSDYSWSYQXPPSSPSXXMSRKSSVCSSLNSVNSSDSRSSGSHSHSPSSHYRYRSSNLAQQAPVRLSSVSSHDSGFISQDAFQSKSPSPMPPEAPNQRRKEKREPDPNGGGPXXASGPPAAAEEAQRPRSMXVSAAXRPGEEMEACEELALALSRGLQLDXQRSSRDSLQCSSGYSXQXXXPCCSEDXIPSQVSDYDYFSVSGDQEADQQEFDKSSXIPRNSDISQSYRRMFQAKRPASXAGLPXXLGPAMVXPGVAXIRRXPSXKPSVRRGXIGAGPIPIKXPVIPVKXPXVPDLPGVLPAPPDGPEERGEHSPESPSVGEGPQGVXSMPSSMWSGQASVNPPLPGPKPSIPEEHRQAIPESEAEDQEREPPSAXVSPGQIPESDPADLSPRDXPQGEDMLNAIRRGVKLKKXXXNDRSAPRFS

SEQ ID NO: 16791 - protein, 645 aa, Homo sapiens
  MOD_RES (69)..(69): Selenocysteine
  MOD_RES (87)..(87): Selenocysteine
  MOD_RES (107)..(107): Selenocysteine
  MOD_RES (111)..(111): Selenocysteine
  MOD_RES (120)..(120): Selenocysteine
  MOD_RES (148)..(148): Selenocysteine
  MOD_RES (155)..(156): Selenocysteine
  MOD_RES (254)..(254): Selenocysteine
  MOD_RES (273)..(273): Selenocysteine
  MOD_RES (285)..(285): Selenocysteine
  MOD_RES (315)..(315): Selenocysteine
  MOD_RES (333)..(334): Selenocysteine
  MOD_RES (352)..(352): Selenocysteine
  MOD_RES (357)..(357): Selenocysteine
  MOD_RES (381)..(381): Selenocysteine
  MOD_RES (397)..(397): Selenocysteine
  MOD_RES (399)..(401): Selenocysteine
  MOD_RES (408)..(408): Selenocysteine
  MOD_RES (437)..(437): Selenocysteine
  MOD_RES (460)..(460): Selenocysteine
  MOD_RES (465)..(466): Selenocysteine
  MOD_RES (473)..(473): Selenocysteine
  MOD_RES (478)..(478): Selenocysteine
  MOD_RES (482)..(482): Selenocysteine
  MOD_RES (485)..(485): Selenocysteine
  MOD_RES (493)..(493): Selenocysteine
  MOD_RES (503)..(503): Selenocysteine
  MOD_RES (510)..(510): Selenocysteine
  MOD_RES (512)..(512): Selenocysteine
  MOD_RES (548)..(548): Selenocysteine
  MOD_RES (596)..(596): Selenocysteine
  MOD_RES (615)..(615): Selenocysteine
  MOD_RES (634)..(636): Selenocysteine
MNKYFFYILENCGFDSSKDPREEGHLFQKLVFQQAVLGSLFFAGRGDIQPQLDSALQDVNDKYLLLEEXEKQAVRKALIEERGRFCXFISMLRPVIEEEISMLGEIXHLQXISEDLKSLXMDPHKLPSSSEQVILDLKGSDYSWSYQXPPSSPSXXMSRKSSVCSSLNSVNSSDSRSSGSHSHSPSSHYRYRSSNLAQQAPVRLSSVSSHDSGFISQDAFQSKSPSPMPPEAPNQLSNGFSHYSLSSESHVGPXGAGLFPHCLPASRLLPRVXSVHLPDYAHYYXIGPGMFPSSQIPSWKDWAKPGPYDQPLVNXLQRRKEKREPDPNGGGPXXASGPPAAAEEAQRPRSMXVSAAXRPGEEMEACEELALALSRGLQLDXQRSSRDSLQCSSGYSXQXXXPCCSEDXIPSQVSDYDYFSVSGDQEADQQEFDKSSXIPRNSDISQSYRRMFQAKRPASXAGLPXXLGPAMVXPGVAXIRRXPSXKPSVRRGXIGAGPIPIKXPVIPVKXPXVPDLPGVLPAPPDGPEERGEHSPESPSVGEGPQGVXSMPSSMWSGQASVNPPLPGPKPSIPEEHRQAIPESEAEDQEREPPSAXVSPGQIPESDPADLSPRDXPQGEDMLNAIRRGVKLKKXXXNDRSAPRFS

SEQ ID NO: 16792 - protein, 286 aa, Homo sapiens
  MOD_RES (1)..(1): Any amino acid
  MOD_RES (27)..(27): Selenocysteine
  MOD_RES (45)..(45): Selenocysteine
  MOD_RES (65)..(65): Selenocysteine
  MOD_RES (69)..(69): Selenocysteine
  MOD_RES (78)..(78): Selenocysteine
  MOD_RES (106)..(106): Selenocysteine
  MOD_RES (113)..(114): Selenocysteine
  MOD_RES (208)..(208): Selenocysteine
  MOD_RES (226)..(227): Selenocysteine
  MOD_RES (245)..(245): Selenocysteine
  MOD_RES (250)..(250): Selenocysteine
  MOD_RES (274)..(274): Selenocysteine
XGRGDIQPQLDSALQDVNDKYLLLEEXEKQAVRKALIEERGRFCXFISMLRPVIEEEISMLGEIXHLQXISEDLKSLXMDPHKLPSSSEQVILDLKGSDYSWSYQXPPSSPSXXMSRKSSVCSSLNSVNSSDSRSSGSHSHSPSSHYRYRSSNLAQQAPVRLSSVSSHDSGFISQDAFQSKSPSPMPPEAPNQDWAKPGPYDQPLVNXLQRRKEKREPDPNGGGPXXASGPPAAAEEAQRPRSMXVSAAXRPGEEMEACEELALALSRGLQLDXQRSSRDSLQCSS

SEQ ID NO: 16793 - protein, 184 aa, Homo sapiens
  MOD_RES (1)..(1): Any amino acid
  MOD_RES (41)..(42): Selenocysteine
  MOD_RES (61)..(61): Selenocysteine
  MOD_RES (63)..(63): Selenocysteine
  MOD_RES (67)..(67): Selenocysteine
  MOD_RES (75)..(75): Selenocysteine
  MOD_RES (139)..(139): Selenocysteine
  MOD_RES (174)..(174): Selenocysteine
XSLGGSRHWLQVFPLSVPEGSYPVWEDFINKAGKLQSQLRXXVVAAAAFLDAFQKVADMAXNXRGGXREIGSALXRMCMRHRSIEAKLRQFSSALIDCLINPLQEQMEEWKKVANQLDKDHAKEYKKARQEIKKKSSDXLKLQKKAKKGRGDIQPQLDSALQDVNDKYLLLEEXEKQAVRKALI

SEQ ID NO: 16794 - protein, 543 aa, Homo sapiens
  MOD_RES (1)..(1): Any amino acid
  MOD_RES (6)..(6): Selenocysteine
  MOD_RES (13)..(14): Selenocysteine
  MOD_RES (106)..(106): Selenocysteine
  MOD_RES (117)..(117): Selenocysteine
  MOD_RES (124)..(124): Selenocysteine
  MOD_RES (131)..(131): Selenocysteine
  MOD_RES (152)..(152): Selenocysteine
  MOD_RES (171)..(171): Selenocysteine
  MOD_RES (183)..(183): Selenocysteine
  MOD_RES (213)..(213): Selenocysteine
  MOD_RES (231)..(232): Selenocysteine
  MOD_RES (250)..(250): Selenocysteine
  MOD_RES (255)..(255): Selenocysteine
  MOD_RES (279)..(279): Selenocysteine
  MOD_RES (295)..(295): Selenocysteine
  MOD_RES (297)..(299): Selenocysteine
  MOD_RES (306)..(306): Selenocysteine
  MOD_RES (335)..(335): Selenocysteine
  MOD_RES (358)..(358): Selenocysteine
  MOD_RES (363)..(364): Selenocysteine
  MOD_RES (371)..(371): Selenocysteine
  MOD_RES (376)..(376): Selenocysteine
  MOD_RES (380)..(380): Selenocysteine
  MOD_RES (383)..(383): Selenocysteine
  MOD_RES (391)..(391): Selenocysteine
  MOD_RES (401)..(401): Selenocysteine
  MOD_RES (408)..(408): Selenocysteine
  MOD_RES (410)..(410): Selenocysteine
  MOD_RES (446)..(446): Selenocysteine
  MOD_RES (494)..(494): Selenocysteine
  MOD_RES (513)..(513): Selenocysteine
  MOD_RES (532)..(534): Selenocysteine
XWSYQXPPSSPSXXMSRKSSVCSSLNSVNSSDSRSSGSHSHSPSSHYRYRSSNLAQQAPVRLSSVSSHDSGFISQDAFQSKSPSPMPPEAPNQNSSSSASSEASEXCQSVSECSSPXSVSSGSXMGAWVSXEKLSNGFSHYSLSSESHVGPXGAGLFPHCLPASRLLPRVXSVHLPDYAHYYXIGPGMFPSSQIPSWKDWAKPGPYDQPLVNXLQRRKEKREPDPNGGGPXXASGPPAAAEEAQRPRSMXVSAAXRPGEEMEACEELALALSRGLQLDXQRSSRDSLQCSSGYSXQXXXPCCSEDXIPSQVSDYDYFSVSGDQEADQQEFDKSSXIPRNSDISQSYRRMFQAKRPASXAGLPXXLGPAMVXPGVAXIRRXPSXKPSVRRGXIGAGPIPIKXPVIPVKXPXVPDLPGVLPAPPDGPEERGEHSPESPSVGEGPQGVXSMPSSMWSGQASVNPPLPGPKPSIPEEHRQAIPESEAEDQEREPPSAXVSPGQIPESDPADLSPRDXPQGEDMLNAIRRGVKLKKXXXNDRSAPRFS

SEQ ID NO: 16795 - protein, 228 aa, Homo sapiens
  MOD_RES (4)..(4): Selenocysteine
  MOD_RES (8)..(8): Selenocysteine
  MOD_RES (13)..(13): Selenocysteine
  MOD_RES (19)..(19): Selenocysteine
  MOD_RES (25)..(25): Selenocysteine
  MOD_RES (50)..(50): Selenocysteine
  MOD_RES (91)..(91): Selenocysteine
  MOD_RES (98)..(98): Selenocysteine
  MOD_RES (106)..(106): Selenocysteine
  MOD_RES (113)..(113): Selenocysteine
  MOD_RES (122)..(122): Selenocysteine
  MOD_RES (189)..(189): Selenocysteine
  MOD_RES (198)..(198): Selenocysteine
  MOD_RES (201)..(201): Selenocysteine
  MOD_RES (211)..(211): Selenocysteine
ASSXHHSXVPPLXSSNHSXSPQLSXGVSFFFLSFHISNLQFNSSLEDPSXDYYQELQRDISEMFLQIYKQGGFLGLSNIKFRPGSVVVQLXLAFREGXINVHDVEXQFNQYKXEAASRYNLXISDVSVSDVPFPFSAQSGAGVPGWGIALLVLVCVLVALAIVYLIALAVCQCRRKNYGQLDIFPARDXYHPMSEYPXYHXHGRYVPPSSXDRSPYEKEWRVDRERLA

SEQ ID NO: 16796 - protein, 135 aa, Homo sapiens
  MOD_RES (2)..(2): Selenocysteine
  MOD_RES (5)..(5): Selenocysteine
  MOD_RES (16)..(16): Selenocysteine
  MOD_RES (19)..(19): Selenocysteine
  MOD_RES (21)..(22): Selenocysteine
  MOD_RES (28)..(28): Selenocysteine
  MOD_RES (31)..(31): Selenocysteine
  MOD_RES (39)..(39): Selenocysteine
  MOD_RES (46)..(46): Selenocysteine
  MOD_RES (49)..(49): Selenocysteine
  MOD_RES (58)..(58): Selenocysteine
  MOD_RES (74)..(75): Selenocysteine
  MOD_RES (97)..(98): Selenocysteine
  MOD_RES (118)..(118): Selenocysteine
MXPGXQSPFFLLLLLXVLXAXXAPKPAXVVXGSGHASSXPGGEKEXSAXQRSSVPSSXEKNAALHQAQLLLWCXXAPLPGLPQPQPARALHSQFPAXXLILLPPLPAIAPRLMPVALXIARSQHRLLPRAAERHF

SEQ ID NO: 16797 - protein, 241 aa, Homo sapiens
  MOD_RES (2)..(2): Selenocysteine
  MOD_RES (5)..(5): Selenocysteine
  MOD_RES (16)..(16): Selenocysteine
  MOD_RES (19)..(19): Selenocysteine
  MOD_RES (21)..(22): Selenocysteine
  MOD_RES (28)..(28): Selenocysteine
  MOD_RES (31)..(31): Selenocysteine
  MOD_RES (39)..(39): Selenocysteine
  MOD_RES (46)..(46): Selenocysteine
  MOD_RES (49)..(49): Selenocysteine
  MOD_RES (58)..(58): Selenocysteine
  MOD_RES (90)..(90): Selenocysteine
  MOD_RES (97)..(97): Selenocysteine
  MOD_RES (105)..(105): Selenocysteine
  MOD_RES (112)..(112): Selenocysteine
  MOD_RES (121)..(121): Selenocysteine
  MOD_RES (188)..(188): Selenocysteine
  MOD_RES (197)..(197): Selenocysteine
  MOD_RES (200)..(200): Selenocysteine
  MOD_RES (210)..(210): Selenocysteine
  MOD_RES (230)..(230): Selenocysteine
  MOD_RES (237)..(237): Selenocysteine
MXPGXQSPFFLLLLLXVLXAXXAPKPAXVVXGSGHASSXPGGEKEXSAXQRSSVPSSXEKNAFLQIYKQGGFLGLSNIKFRPGSVVVQLXLAFREGXINVHDVEXQFNQYKXEAASRYNLXISDVSVSDVPFPFSAQSGAGVPGWGIALLVLVCVLVALAIVYLIALAVCQCRRKNYGQLDIFPARDXYHPMSEYPXYHXHGRYVPPSSXDRSPYEKVSAGNGGSSLSYXNPAVAAXSANL

SEQ ID NO: 16798 - protein, 159 aa, Homo sapiens
  MOD_RES (2)..(2): Selenocysteine
  MOD_RES (5)..(5): Selenocysteine
  MOD_RES (16)..(16): Selenocysteine
  MOD_RES (19)..(19): Selenocysteine
  MOD_RES (21)..(22): Selenocysteine
  MOD_RES (28)..(28): Selenocysteine
  MOD_RES (31)..(31): Selenocysteine
  MOD_RES (39)..(39): Selenocysteine
  MOD_RES (46)..(46): Selenocysteine
  MOD_RES (49)..(49): Selenocysteine
  MOD_RES (58)..(58): Selenocysteine
  MOD_RES (72)..(72): Selenocysteine
  MOD_RES (106)..(106): Selenocysteine
  MOD_RES (115)..(115): Selenocysteine
  MOD_RES (118)..(118): Selenocysteine
  MOD_RES (128)..(128): Selenocysteine
  MOD_RES (148)..(148): Selenocysteine
  MOD_RES (155)..(155): Selenocysteine
MXPGXQSPFFLLLLLXVLXAXXAPKPAXVVXGSGHASSXPGGEKEXSAXQRSSVPSSXEKNAFNSSLEDPSXDYYQELQRDISEMAVCQCRRKNYGQLDIFPARDXYHPMSEYPXYHXHGRYVPPSSXDRSPYEKVSAGNGGSSLSYXNPAVAAXSANL

SEQ ID NO: 16799 - protein, 264 aa, Homo sapiens
  MOD_RES (2)..(2): Selenocysteine
  MOD_RES (5)..(5): Selenocysteine
  MOD_RES (16)..(16): Selenocysteine
  MOD_RES (19)..(19): Selenocysteine
  MOD_RES (21)..(22): Selenocysteine
  MOD_RES (28)..(28): Selenocysteine
  MOD_RES (31)..(31): Selenocysteine
  MOD_RES (39)..(39): Selenocysteine
  MOD_RES (46)..(46): Selenocysteine
  MOD_RES (49)..(49): Selenocysteine
  MOD_RES (58)..(58): Selenocysteine
  MOD_RES (72)..(72): Selenocysteine
  MOD_RES (113)..(113): Selenocysteine
  MOD_RES (120)..(120): Selenocysteine
  MOD_RES (128)..(128): Selenocysteine
  MOD_RES (135)..(135): Selenocysteine
  MOD_RES (144)..(144): Selenocysteine
  MOD_RES (211)..(211): Selenocysteine
  MOD_RES (220)..(220): Selenocysteine
  MOD_RES (223)..(223): Selenocysteine
  MOD_RES (233)..(233): Selenocysteine
  MOD_RES (253)..(253): Selenocysteine
  MOD_RES (260)..(260): Selenocysteine
MXPGXQSPFFLLLLLXVLXAXXAPKPAXVVXGSGHASSXPGGEKEXSAXQRSSVPSSXEKNAFNSSLEDPSXDYYQELQRDISEMFLQIYKQGGFLGLSNIKFRPGSVVVQLXLAFREGXINVHDVEXQFNQYKXEAASRYNLXISDVSVSDVPFPFSAQSGAGVPGWGIALLVLVCVLVALAIVYLIALAVCQCRRKNYGQLDIFPARDXYHPMSEYPXYHXHGRYVPPSSXDRSPYEKVSAGNGGSSLSYXNPAVAAXSANL

SEQ ID NO: 16800 - protein, 189 aa, Homo sapiens
  MOD_RES (2)..(2): Selenocysteine
  MOD_RES (5)..(5): Selenocysteine
  MOD_RES (16)..(16): Selenocysteine
  MOD_RES (19)..(19): Selenocysteine
  MOD_RES (21)..(22): Selenocysteine
  MOD_RES (28)..(28): Selenocysteine
  MOD_RES (31)..(31): Selenocysteine
  MOD_RES (39)..(39): Selenocysteine
  MOD_RES (46)..(46): Selenocysteine
  MOD_RES (49)..(49): Selenocysteine
  MOD_RES (58)..(58): Selenocysteine
  MOD_RES (72)..(72): Selenocysteine
  MOD_RES (136)..(136): Selenocysteine
  MOD_RES (145)..(145): Selenocysteine
  MOD_RES (148)..(148): Selenocysteine
  MOD_RES (158)..(158): Selenocysteine
  MOD_RES (178)..(178): Selenocysteine
  MOD_RES (185)..(185): Selenocysteine
MXPGXQSPFFLLLLLXVLXAXXAPKPAXVVXGSGHASSXPGGEKEXSAXQRSSVPSSXEKNAFNSSLEDPSXDYYQELQRDISEMSGAGVPGWGIALLVLVCVLVALAIVYLIALAVCQCRRKNYGQLDIFPARDXYHPMSEYPXYHXHGRYVPPSSXDRSPYEKVSAGNGGSSLSYXNPAVAAXSANL

SEQ ID NO: 16801 - protein, 80 aa, Homo sapiens
  MOD_RES (2)..(2): Selenocysteine
  MOD_RES (5)..(5): Selenocysteine
  MOD_RES (16)..(16): Selenocysteine
  MOD_RES (19)..(19): Selenocysteine
  MOD_RES (21)..(22): Selenocysteine
  MOD_RES (28)..(28): Selenocysteine
  MOD_RES (31)..(31): Selenocysteine
  MOD_RES (39)..(39): Selenocysteine
  MOD_RES (46)..(46): Selenocysteine
  MOD_RES (49)..(49): Selenocysteine
  MOD_RES (58)..(58): Selenocysteine
  MOD_RES (67)..(69): Selenocysteine
  MOD_RES (75)..(75): Selenocysteine
MXPGXQSPFFLLLLLXVLXAXXAPKPAXVVXGSGHASSXPGGEKEXSAXQRSSVPSSXEKNAIPAPXXXKSCREXFLKCE

SEQ ID NO: 16802 - protein, 239 aa, Homo sapiens
  MOD_RES (2)..(2): Selenocysteine
  MOD_RES (5)..(5): Selenocysteine
  MOD_RES (16)..(16): Selenocysteine
  MOD_RES (19)..(19): Selenocysteine
  MOD_RES (21)..(22): Selenocysteine
  MOD_RES (28)..(28): Selenocysteine
  MOD_RES (31)..(31): Selenocysteine
  MOD_RES (39)..(39): Selenocysteine
  MOD_RES (46)..(46): Selenocysteine
  MOD_RES (49)..(49): Selenocysteine
  MOD_RES (58)..(58): Selenocysteine
  MOD_RES (67)..(69): Selenocysteine
  MOD_RES (75)..(75): Selenocysteine
  MOD_RES (88)..(88): Selenocysteine
  MOD_RES (95)..(95): Selenocysteine
  MOD_RES (103)..(103): Selenocysteine
  MOD_RES (110)..(110): Selenocysteine
  MOD_RES (119)..(119): Selenocysteine
  MOD_RES (186)..(186): Selenocysteine
  MOD_RES (195)..(195): Selenocysteine
  MOD_RES (198)..(198): Selenocysteine
  MOD_RES (208)..(208): Selenocysteine
  MOD_RES (228)..(228): Selenocysteine
  MOD_RES (235)..(235): Selenocysteine
MXPGXQSPFFLLLLLXVLXAXXAPKPAXVVXGSGHASSXPGGEKEXSAXQRSSVPSSXEKNAIPAPXXXKSCREXFLKWPGSVVVQLXLAFREGXINVHDVEXQFNQYKXEAASRYNLXISDVSVSDVPFPFSAQSGAGVPGWGIALLVLVCVLVALAIVYLIALAVCQCRRKNYGQLDIFPARDXYHPMSEYPXYHXHGRYVPPSSXDRSPYEKVSAGNGGSSLSYXNPAVAAXSANL

SEQ ID NO: 16803 - protein, 268 aa, Homo sapiens
  MOD_RES (2)..(2): Selenocysteine
  MOD_RES (5)..(5): Selenocysteine
  MOD_RES (16)..(16): Selenocysteine
  MOD_RES (19)..(19): Selenocysteine
  MOD_RES (21)..(22): Selenocysteine
  MOD_RES (28)..(28): Selenocysteine
  MOD_RES (31)..(31): Selenocysteine
  MOD_RES (39)..(39): Selenocysteine
  MOD_RES (46)..(46): Selenocysteine
  MOD_RES (49)..(49): Selenocysteine
  MOD_RES (58)..(58): Selenocysteine
  MOD_RES (65)..(65): Selenocysteine
  MOD_RES (90)..(90): Selenocysteine
  MOD_RES (131)..(131): Selenocysteine
  MOD_RES (138)..(138): Selenocysteine
  MOD_RES (146)..(146): Selenocysteine
  MOD_RES (153)..(153): Selenocysteine
  MOD_RES (162)..(162): Selenocysteine
  MOD_RES (229)..(229): Selenocysteine
  MOD_RES (238)..(238): Selenocysteine
  MOD_RES (241)..(241): Selenocysteine
  MOD_RES (251)..(251): Selenocysteine
MXPGXQSPFFLLLLLXVLXAXXAPKPAXVVXGSGHASSXPGGEKEXSAXQRSSVPSSXEKNALSXGVSFFFLSFHISNLQFNSSLEDPSXDYYQELQRDISEMFLQIYKQGGFLGLSNIKFRPGSVVVQLXLAFREGXINVHDVEXQFNQYKXEAASRYNLXISDVSVSDVPFPFSAQSGAGVPGWGIALLVLVCVLVALAIVYLIALAVCQCRRKNYGQLDIFPARDXYHPMSEYPXYHXHGRYVPPSSXDRSPYEKEWRVDRERLA

SEQ ID NO: 16804 - protein, 123 aa, Homo sapiens
  MOD_RES (2)..(2): Selenocysteine
  MOD_RES (5)..(5): Selenocysteine
  MOD_RES (16)..(16): Selenocysteine
  MOD_RES (19)..(19): Selenocysteine
  MOD_RES (21)..(22): Selenocysteine
  MOD_RES (28)..(28): Selenocysteine
  MOD_RES (31)..(31): Selenocysteine
  MOD_RES (39)..(39): Selenocysteine
  MOD_RES (46)..(46): Selenocysteine
  MOD_RES (49)..(49): Selenocysteine
  MOD_RES (58)..(58): Selenocysteine
  MOD_RES (65)..(65): Selenocysteine
  MOD_RES (90)..(90): Selenocysteine
MXPGXQSPFFLLLLLXVLXAXXAPKPAXVVXGSGHASSXPGGEKEXSAXQRSSVPSSXEKNALSXGVSFFFLSFHISNLQFNSSLEDPSXDYYQELQRDISEMFLQIYKQGGFLGLSNIKFSE

SEQ ID NO: 16805 - protein, 166 aa, Homo sapiens
  MOD_RES (2)..(2): Selenocysteine
  MOD_RES (5)..(5): Selenocysteine
  MOD_RES (16)..(16): Selenocysteine
  MOD_RES (19)..(19): Selenocysteine
  MOD_RES (21)..(22): Selenocysteine
  MOD_RES (28)..(28): Selenocysteine
  MOD_RES (31)..(31): Selenocysteine
  MOD_RES (39)..(39): Selenocysteine
  MOD_RES (46)..(46): Selenocysteine
  MOD_RES (49)..(49): Selenocysteine
  MOD_RES (58)..(58): Selenocysteine
  MOD_RES (113)..(113): Selenocysteine
  MOD_RES (122)..(122): Selenocysteine
  MOD_RES (125)..(125): Selenocysteine
  MOD_RES (135)..(135): Selenocysteine
  MOD_RES (155)..(155): Selenocysteine
  MOD_RES (162)..(162): Selenocysteine
MXPGXQSPFFLLLLLXVLXAXXAPKPAXVVXGSGHASSXPGGEKEXSAXQRSSVPSSXEKNASGAGVPGWGIALLVLVCVLVALAIVYLIALAVCQCRRKNYGQLDIFPARDXYHPMSEYPXYHXHGRYVPPSSXDRSPYEKVSAGNGGSSLSYXNPAVAAXSANL

SEQ ID NO: 16806 - protein, 484 aa, Homo sapiens
  MOD_RES (2)..(2): Selenocysteine
  MOD_RES (5)..(5): Selenocysteine
  MOD_RES (16)..(16): Selenocysteine
  MOD_RES (19)..(19): Selenocysteine
  MOD_RES (21)..(22): Selenocysteine
  MOD_RES (28)..(28): Selenocysteine
  MOD_RES (31)..(31): Selenocysteine
  MOD_RES (39)..(39): Selenocysteine
  MOD_RES (46)..(46): Selenocysteine
  MOD_RES (49)..(49): Selenocysteine
  MOD_RES (58)..(58): Selenocysteine
  MOD_RES (66)..(66): Selenocysteine
  MOD_RES (81)..(82): Selenocysteine
  MOD_RES (88)..(88): Selenocysteine
  MOD_RES (93)..(93): Selenocysteine
  MOD_RES (102)..(102): Selenocysteine
  MOD_RES (108)..(108): Selenocysteine
  MOD_RES (113)..(113): Selenocysteine
  MOD_RES (120)..(121): Selenocysteine
  MOD_RES (128)..(128): Selenocysteine
  MOD_RES (140)..(140): Selenocysteine
  MOD_RES (148)..(148): Selenocysteine
  MOD_RES (153)..(153): Selenocysteine
  MOD_RES (160)..(160): Selenocysteine
  MOD_RES (168)..(168): Selenocysteine
  MOD_RES (180)..(180): Selenocysteine
  MOD_RES (188)..(188): Selenocysteine
  MOD_RES (200)..(200): Selenocysteine
  MOD_RES (206)..(206): Selenocysteine
  MOD_RES (211)..(213): Selenocysteine
  MOD_RES (219)..(219): Selenocysteine
  MOD_RES (230)..(230): Selenocysteine
  MOD_RES (232)..(233): Selenocysteine
  MOD_RES (239)..(239): Selenocysteine
  MOD_RES (241)..(241): Selenocysteine
  MOD_RES (246)..(246): Selenocysteine
  MOD_RES (250)..(250): Selenocysteine
  MOD_RES (255)..(255): Selenocysteine
  MOD_RES (261)..(261): Selenocysteine
  MOD_RES (267)..(267): Selenocysteine
  MOD_RES (292)..(292): Selenocysteine
  MOD_RES (333)..(333): Selenocysteine
  MOD_RES (340)..(340): Selenocysteine
  MOD_RES (348)..(348): Selenocysteine
  MOD_RES (355)..(355): Selenocysteine
  MOD_RES (364)..(364): Selenocysteine
  MOD_RES (431)..(431): Selenocysteine
  MOD_RES (440)..(440): Selenocysteine
  MOD_RES (443)..(443): Selenocysteine
  MOD_RES (453)..(453): Selenocysteine
  MOD_RES (473)..(473): Selenocysteine
  MOD_RES (480)..(480): Selenocysteine
MXPGXQSPFFLLLLLXVLXAXXAPKPAXVVXGSGHASSXPGGEKEXSAXQRSSVPSSXEKNAVSMXSSVLSSHSPGSGSSXXQGQDVXLAPAXEPASGSAAXWGQDVXSVPVXRPALGSXXPPAHDVXSAPDNKPAPGSXAPPAHGVXSAPDXRPAPGSXAPPAHGVXSAPDNRPALGSXAPPVHNVXSASGSASGSASXLVHNGXSARAXXXPASKSXPFSIPSHHSDXPXXLASHSXKXDASSXHHSXVPPLXSSNHSXSPQLSXGVSFFFLSFHISNLQFNSSLEDPSXDYYQELQRDISEMFLQIYKQGGFLGLSNIKFRPGSVVVQLXLAFREGXINVHDVEXQFNQYKXEAASRYNLXISDVSVSDVPFPFSAQSGAGVPGWGIALLVLVCVLVALAIVYLIALAVCQCRRKNYGQLDIFPARDXYHPMSEYPXYHXHGRYVPPSSXDRSPYEKVSAGNGGSSLSYXNPAVAAXSANL

SEQ ID NO: 16807 - protein, 213 aa, Homo sapiens
  MOD_RES (2)..(2): Selenocysteine
  MOD_RES (5)..(5): Selenocysteine
  MOD_RES (16)..(16): Selenocysteine
  MOD_RES (19)..(19): Selenocysteine
  MOD_RES (27)..(27): Selenocysteine
  MOD_RES (34)..(34): Selenocysteine
  MOD_RES (37)..(37): Selenocysteine
  MOD_RES (46)..(46): Selenocysteine
  MOD_RES (54)..(54): Selenocysteine
  MOD_RES (69)..(70): Selenocysteine
  MOD_RES (76)..(76): Selenocysteine
  MOD_RES (81)..(81): Selenocysteine
  MOD_RES (90)..(90): Selenocysteine
  MOD_RES (96)..(96): Selenocysteine
  MOD_RES (101)..(101): Selenocysteine
  MOD_RES (108)..(109): Selenocysteine
  MOD_RES (160)..(160): Selenocysteine
  MOD_RES (169)..(169): Selenocysteine
  MOD_RES (172)..(172): Selenocysteine
  MOD_RES (182)..(182): Selenocysteine
  MOD_RES (202)..(202): Selenocysteine
  MOD_RES (209)..(209): Selenocysteine
MXPGXQSPFFLLLLLXVLXGSGHASSXPGGEKEXSAXQRSSVPSSXEKNAVSMXSSVLSSHSPGSGSSXXQGQDVXLAPAXEPASGSAAXWGQDVXSVPVXRPALGSXXPPAGVPGWGIALLVLVCVLVALAIVYLIALAVCQCRRKNYGQLDIFPARDXYHPMSEYPXYHXHGRYVPPSSXDRSPYEKVSAGNGGSSLSYXNPAVAAXSANL

SEQ ID NO: 16808 - protein, 126 aa, Homo sapiens
  MOD_RES (2)..(2): Selenocysteine
  MOD_RES (5)..(5): Selenocysteine
  MOD_RES (16)..(16): Selenocysteine
  MOD_RES (19)..(19): Selenocysteine
  MOD_RES (22)..(22): Selenocysteine
  MOD_RES (30)..(30): Selenocysteine
  MOD_RES (37)..(37): Selenocysteine
  MOD_RES (40)..(40): Selenocysteine
  MOD_RES (49)..(49): Selenocysteine
  MOD_RES (65)..(66): Selenocysteine
  MOD_RES (88)..(89): Selenocysteine
  MOD_RES (109)..(109): Selenocysteine
MXPGXQSPFFLLLLLXVLXVVXGSGHASSXPGGEKEXSAXQRSSVPSSXEKNAALHQAQLLLWCXXAPLPGLPQPQPARALHSQFPAXXLILLPPLPAIAPRLMPVALXIARSQHRLLPRAAERHF

SEQ ID NO: 16809 - protein, 255 aa, Homo sapiens
  MOD_RES (2)..(2): Selenocysteine
  MOD_RES (5)..(5): Selenocysteine
  MOD_RES (16)..(16): Selenocysteine
  MOD_RES (19)..(19): Selenocysteine
  MOD_RES (22)..(22): Selenocysteine
  MOD_RES (30)..(30): Selenocysteine
  MOD_RES (37)..(37): Selenocysteine
  MOD_RES (40)..(40): Selenocysteine
  MOD_RES (49)..(49): Selenocysteine
  MOD_RES (63)..(63): Selenocysteine
  MOD_RES (104)..(104): Selenocysteine
  MOD_RES (111)..(111): Selenocysteine
  MOD_RES (119)..(119): Selenocysteine
  MOD_RES (126)..(126): Selenocysteine
  MOD_RES (135)..(135): Selenocysteine
  MOD_RES (202)..(202): Selenocysteine
  MOD_RES (211)..(211): Selenocysteine
  MOD_RES (214)..(214): Selenocysteine
  MOD_RES (224)..(224): Selenocysteine
  MOD_RES (244)..(244): Selenocysteine
  MOD_RES (251)..(251): Selenocysteine
MXPGXQSPFFLLLLLXVLXVVXGSGHASSXPGGEKEXSAXQRSSVPSSXEKNAFNSSLEDPSXDYYQELQRDISEMFLQIYKQGGFLGLSNIKFRPGSVVVQLXLAFREGXINVHDVEXQFNQYKXEAASRYNLXISDVSVSDVPFPFSAQSGAGVPGWGIALLVLVCVLVALAIVYLIALAVCQCRRKNYGQLDIFPARDXYHPMSEYPXYHXHGRYVPPSSXDRSPYEKVSAGNGGSSLSYXNPAVAAXSANL

SEQ ID NO: 16810 - protein, 96 aa, Homo sapiens
  MOD_RES (2)..(2): Selenocysteine
  MOD_RES (5)..(5): Selenocysteine
  MOD_RES (16)..(16): Selenocysteine
  MOD_RES (19)..(19): Selenocysteine
  MOD_RES (22)..(22): Selenocysteine
  MOD_RES (30)..(30): Selenocysteine
  MOD_RES (37)..(37): Selenocysteine
  MOD_RES (40)..(40): Selenocysteine
  MOD_RES (49)..(49): Selenocysteine
  MOD_RES (63)..(63): Selenocysteine
MXPGXQSPFFLLLLLXVLXVVXGSGHASSXPGGEKEXSAXQRSSVPSSXEKNAFNSSLEDPSXDYYQELQRDISEMFLQIYKQGGFLGLSNIKFSE

SEQ ID NO: 16811 - protein, 149 aa, Homo sapiens
  MOD_RES (2)..(2): Selenocysteine
  MOD_RES (5)..(5): Selenocysteine
  MOD_RES (16)..(16): Selenocysteine
  MOD_RES (19)..(19): Selenocysteine
  MOD_RES (22)..(22): Selenocysteine
  MOD_RES (30)..(30): Selenocysteine
  MOD_RES (37)..(37): Selenocysteine
  MOD_RES (40)..(40): Selenocysteine
  MOD_RES (49)..(49): Selenocysteine
  MOD_RES (63)..(63): Selenocysteine
  MOD_RES (134)..(135): Selenocysteine
  MOD_RES (139)..(139): Selenocysteine
  MOD_RES (147)..(147): Selenocysteine
MXPGXQSPFFLLLLLXVLXVVXGSGHASSXPGGEKEXSAXQRSSVPSSXEKNAFNSSLEDPSXDYYQELQRDISEMFLQIYKQGGFLGLSNIKFSLGLGCQAGASRCWCWSVFWLRWPLSISLPWLSVSAAERXXGSWXSFQPGIPXIL

SEQ ID NO: 16812 - protein, 203 aa, Homo sapiens
  MOD_RES (2)..(2): Selenocysteine
  MOD_RES (5)..(5): Selenocysteine
  MOD_RES (16)..(16): Selenocysteine
  MOD_RES (19)..(19): Selenocysteine
  MOD_RES (22)..(22): Selenocysteine
  MOD_RES (30)..(30): Selenocysteine
  MOD_RES (37)..(37): Selenocysteine
  MOD_RES (40)..(40): Selenocysteine
  MOD_RES (49)..(49): Selenocysteine
  MOD_RES (58)..(60): Selenocysteine
  MOD_RES (66)..(66): Selenocysteine
  MOD_RES (150)..(150): Selenocysteine
  MOD_RES (159)..(159): Selenocysteine
  MOD_RES (162)..(162): Selenocysteine
  MOD_RES (172)..(172): Selenocysteine
  MOD_RES (192)..(192): Selenocysteine
  MOD_RES (199)..(199): Selenocysteine
MXPGXQSPFFLLLLLXVLXVVXGSGHASSXPGGEKEXSAXQRSSVPSSXEKNAIPAPXXXKSCREXFLKCFCRFINKGVFWASPILSSVSDVPFPFSAQSGAGVPGWGIALLVLVCVLVALAIVYLIALAVCQCRRKNYGQLDIFPARDXYHPMSEYPXYHXHGRYVPPSSXDRSPYEKVSAGNGGSSLSYXNPAVAAXSANL

SEQ ID NO: 16813 - protein, 230 aa, Homo sapiens
  MOD_RES (2)..(2): Selenocysteine
  MOD_RES (5)..(5): Selenocysteine
  MOD_RES (16)..(16): Selenocysteine
  MOD_RES (19)..(19): Selenocysteine
  MOD_RES (22)..(22): Selenocysteine
  MOD_RES (30)..(30): Selenocysteine
  MOD_RES (37)..(37): Selenocysteine
  MOD_RES (40)..(40): Selenocysteine
  MOD_RES (49)..(49): Selenocysteine
  MOD_RES (58)..(60): Selenocysteine
  MOD_RES (66)..(66): Selenocysteine
  MOD_RES (79)..(79): Selenocysteine
  MOD_RES (86)..(86): Selenocysteine
  MOD_RES (94)..(94): Selenocysteine
  MOD_RES (101)..(101): Selenocysteine
  MOD_RES (110)..(110): Selenocysteine
  MOD_RES (177)..(177): Selenocysteine
  MOD_RES (186)..(186): Selenocysteine
  MOD_RES (189)..(189): Selenocysteine
  MOD_RES (199)..(199): Selenocysteine
  MOD_RES (219)..(219): Selenocysteine
  MOD_RES (226)..(226): Selenocysteine
MXPGXQSPFFLLLLLXVLXVVXGSGHASSXPGGEKEXSAXQRSSVPSSXEKNAIPAPXXXKSCREXFLKWPGSVVVQLXLAFREGXINVHDVEXQFNQYKXEAASRYNLXISDVSVSDVPFPFSAQSGAGVPGWGIALLVLVCVLVALAIVYLIALAVCQCRRKNYGQLDIFPARDXYHPMSEYPXYHXHGRYVPPSSXDRSPYEKVSAGNGGSSLSYXNPAVAAXSANL

SEQ ID NO: 16814 - protein, 229 aa, Homo sapiens
  MOD_RES (2)..(2): Selenocysteine
  MOD_RES (5)..(5): Selenocysteine
  MOD_RES (16)..(16): Selenocysteine
  MOD_RES (19)..(19): Selenocysteine
  MOD_RES (22)..(22): Selenocysteine
  MOD_RES (30)..(30): Selenocysteine
  MOD_RES (37)..(37): Selenocysteine
  MOD_RES (40)..(40): Selenocysteine
  MOD_RES (49)..(49): Selenocysteine
  MOD_RES (78)..(78): Selenocysteine
  MOD_RES (85)..(85): Selenocysteine
  MOD_RES (93)..(93): Selenocysteine
  MOD_RES (100)..(100): Selenocysteine
  MOD_RES (109)..(109): Selenocysteine
  MOD_RES (176)..(176): Selenocysteine
  MOD_RES (185)..(185): Selenocysteine
  MOD_RES (188)..(188): Selenocysteine
  MOD_RES (198)..(198): Selenocysteine
  MOD_RES (218)..(218): Selenocysteine
  MOD_RES (225)..(225): Selenocysteine
MXPGXQSPFFLLLLLXVLXVVXGSGHASSXPGGEKEXSAXQRSSVPSSXEKNAIYKQGGFLGLSNIKFRPGSVVVQLXLAFREGXINVHDVEXQFNQYKXEAASRYNLXISDVSVSDVPFPFSAQSGAGVPGWGIALLVLVCVLVALAIVYLIALAVCQCRRKNYGQLDIFPARDXYHPMSEYPXYHXHGRYVPPSSXDRSPYEKVSAGNGGSSLSYXNPAVAAXSANL

SEQ ID NO: 16815 - protein, 168 aa, Homo sapiens
  MOD_RES (2)..(2): Selenocysteine
  MOD_RES (5)..(5): Selenocysteine
  MOD_RES (16)..(16): Selenocysteine
  MOD_RES (19)..(19): Selenocysteine
  MOD_RES (22)..(22): Selenocysteine
  MOD_RES (30)..(30): Selenocysteine
  MOD_RES (37)..(37): Selenocysteine
  MOD_RES (40)..(40): Selenocysteine
  MOD_RES (49)..(49): Selenocysteine
  MOD_RES (56)..(56): Selenocysteine
  MOD_RES (81)..(81): Selenocysteine
  MOD_RES (115)..(115): Selenocysteine
  MOD_RES (124)..(124): Selenocysteine
  MOD_RES (127)..(127): Selenocysteine
  MOD_RES (137)..(137): Selenocysteine
  MOD_RES (157)..(157): Selenocysteine
  MOD_RES (164)..(164): Selenocysteine
MXPGXQSPFFLLLLLXVLXVVXGSGHASSXPGGEKEXSAXQRSSVPSSXEKNALSXGVSFFFLSFHISNLQFNSSLEDPSXDYYQELQRDISEMAVCQCRRKNYGQLDIFPARDXYHPMSEYPXYHXHGRYVPPSSXDRSPYEKVSAGNGGSSLSYXNPAVAAXSANL

SEQ ID NO: 16816 - protein, 198 aa, Homo sapiens
  MOD_RES (2)..(2): Selenocysteine
  MOD_RES (5)..(5): Selenocysteine
  MOD_RES (16)..(16): Selenocysteine
  MOD_RES (19)..(19): Selenocysteine
  MOD_RES (22)..(22): Selenocysteine
  MOD_RES (30)..(30): Selenocysteine
  MOD_RES (37)..(37): Selenocysteine
  MOD_RES (40)..(40): Selenocysteine
  MOD_RES (49)..(49): Selenocysteine
  MOD_RES (56)..(56): Selenocysteine
  MOD_RES (81)..(81): Selenocysteine
  MOD_RES (122)..(122): Selenocysteine
  MOD_RES (129)..(129): Selenocysteine
  MOD_RES (137)..(137): Selenocysteine
  MOD_RES (144)..(144): Selenocysteine
  MOD_RES (153)..(153): Selenocysteine
MXPGXQSPFFLLLLLXVLXVVXGSGHASSXPGGEKEXSAXQRSSVPSSXEKNALSXGVSFFFLSFHISNLQFNSSLEDPSXDYYQELQRDISEMFLQIYKQGGFLGLSNIKFRPGSVVVQLXLAFREGXINVHDVEXQFNQYKXEAASRYNLXISDVSGCLSVPPKELRAAGHLSSPGYLPSYERVPHLPHPWALCAP

SEQ ID NO: 16817 - protein, 273 aa, Homo sapiens
  MOD_RES (2)..(2): Selenocysteine
  MOD_RES (5)..(5): Selenocysteine
  MOD_RES (16)..(16): Selenocysteine
  MOD_RES (19)..(19): Selenocysteine
  MOD_RES (22)..(22): Selenocysteine
  MOD_RES (30)..(30): Selenocysteine
  MOD_RES (37)..(37): Selenocysteine
  MOD_RES (40)..(40): Selenocysteine
  MOD_RES (49)..(49): Selenocysteine
  MOD_RES (56)..(56): Selenocysteine
  MOD_RES (81)..(81): Selenocysteine
  MOD_RES (122)..(122): Selenocysteine
  MOD_RES (129)..(129): Selenocysteine
  MOD_RES (137)..(137): Selenocysteine
  MOD_RES (144)..(144): Selenocysteine
  MOD_RES (153)..(153): Selenocysteine
  MOD_RES (220)..(220): Selenocysteine
  MOD_RES (229)..(229): Selenocysteine
  MOD_RES (232)..(232): Selenocysteine
  MOD_RES (242)..(242): Selenocysteine
  MOD_RES (262)..(262): Selenocysteine
  MOD_RES (269)..(269): Selenocysteine
MXPGXQSPFFLLLLLXVLXVVXGSGHASSXPGGEKEXSAXQRSSVPSSXEKNALSXGVSFFFLSFHISNLQFNSSLEDPSXDYYQELQRDISEMFLQIYKQGGFLGLSNIKFRPGSVVVQLXLAFREGXINVHDVEXQFNQYKXEAASRYNLXISDVSVSDVPFPFSAQSGAGVPGWGIALLVLVCVLVALAIVYLIALAVCQCRRKNYGQLDIFPARDXYHPMSEYPXYHXHGRYVPPSSXDRSPYEKVSAGNGGSSLSYXNPAVAAXSANL

SEQ ID NO: 16818 - protein, 475 aa, Homo sapiens
  MOD_RES (2)..(2): Selenocysteine
  MOD_RES (5)..(5): Selenocysteine
  MOD_RES (16)..(16): Selenocysteine
  MOD_RES (19)..(19): Selenocysteine
  MOD_RES (22)..(22): Selenocysteine
  MOD_RES (30)..(30): Selenocysteine
  MOD_RES (37)..(37): Selenocysteine
  MOD_RES (40)..(40): Selenocysteine
  MOD_RES (49)..(49): Selenocysteine
  MOD_RES (57)..(57): Selenocysteine
  MOD_RES (72)..(73): Selenocysteine
  MOD_RES (79)..(79): Selenocysteine
  MOD_RES (84)..(84): Selenocysteine
  MOD_RES (93)..(93): Selenocysteine
  MOD_RES (99)..(99): Selenocysteine
  MOD_RES (104)..(104): Selenocysteine
  MOD_RES (111)..(112): Selenocysteine
  MOD_RES (119)..(119): Selenocysteine
  MOD_RES (131)..(131): Selenocysteine
  MOD_RES (139)..(139): Selenocysteine
  MOD_RES (144)..(144): Selenocysteine
  MOD_RES (151)..(151): Selenocysteine
  MOD_RES (159)..(159): Selenocysteine
  MOD_RES (171)..(171): Selenocysteine
  MOD_RES (179)..(179): Selenocysteine
  MOD_RES (191)..(191): Selenocysteine
  MOD_RES (197)..(197): Selenocysteine
  MOD_RES (202)..(204): Selenocysteine
  MOD_RES (210)..(210): Selenocysteine
  MOD_RES (221)..(221): Selenocysteine
  MOD_RES (223)..(224): Selenocysteine
  MOD_RES (230)..(230): Selenocysteine
  MOD_RES (232)..(232): Selenocysteine
  MOD_RES (237)..(237): Selenocysteine
  MOD_RES (241)..(241): Selenocysteine
  MOD_RES (246)..(246): Selenocysteine
  MOD_RES (252)..(252): Selenocysteine
  MOD_RES (258)..(258): Selenocysteine
  MOD_RES (283)..(283): Selenocysteine
  MOD_RES (324)..(324): Selenocysteine
  MOD_RES (331)..(331): Selenocysteine
  MOD_RES (339)..(339): Selenocysteine
  MOD_RES (346)..(346): Selenocysteine
  MOD_RES (355)..(355): Selenocysteine
  MOD_RES (422)..(422): Selenocysteine
  MOD_RES (431)..(431): Selenocysteine
  MOD_RES (434)..(434): Selenocysteine
  MOD_RES (444)..(444): Selenocysteine
  MOD_RES (464)..(464): Selenocysteine
  MOD_RES (471)..(471): Selenocysteine
MXPGXQSPFFLLLLLXVLXVVXGSGHASSXPGGEKEXSAXQRSSVPSSXEKNAVSMXSSVLSSHSPGSGSSXXQGQDVXLAPAXEPASGSAAXWGQDVXSVPVXRPALGSXXPPAHDVXSAPDNKPAPGSXAPPAHGVXSAPDXRPAPGSXAPPAHGVXSAPDNRPALGSXAPPVHNVXSASGSASGSASXLVHNGXSARAXXXPASKSXPFSIPSHHSDXPXXLASHSXKXDASSXHHSXVPPLXSSNHSXSPQLSXGVSFFFLSFHISNLQFNSSLEDPSXDYYQELQRDISEMFLQIYKQGGFLGLSNIKFRPGSVVVQLXLAFREGXINVHDVEXQFNQYKXEAASRYNLXISDVSVSDVPFPFSAQSGAGVPGWGIALLVLVCVLVALAIVYLIALAVCQCRRKNYGQLDIFPARDXYHPMSEYPXYHXHGRYVPPSSXDRSPYEKVSAGNGGSSLSYXNPAVAAXSANL

SEQ ID NO: 16819 - protein, 1262 aa, Homo sapiens
  MOD_RES (2)..(2): Selenocysteine
  MOD_RES (5)..(5): Selenocysteine
  MOD_RES (16)..(16): Selenocysteine
  MOD_RES (19)..(19): Selenocysteine
  MOD_RES (22)..(22): Selenocysteine
  MOD_RES (30)..(30): Selenocysteine
  MOD_RES (37)..(37): Selenocysteine
  MOD_RES (40)..(40): Selenocysteine
  MOD_RES (49)..(49): Selenocysteine
  MOD_RES (57)..(57): Selenocysteine
  MOD_RES (72)..(73): Selenocysteine
  MOD_RES (79)..(79): Selenocysteine
  MOD_RES (84)..(84): Selenocysteine
  MOD_RES (93)..(93): Selenocysteine
  MOD_RES (99)..(99): Selenocysteine
  MOD_RES (104)..(104): Selenocysteine
  MOD_RES (111)..(112): Selenocysteine
  MOD_RES (119)..(119): Selenocysteine
  MOD_RES (131)..(131): Selenocysteine
  MOD_RES (139)..(139): Selenocysteine
  MOD_RES (144)..(144): Selenocysteine
  MOD_RES (151)..(151): Selenocysteine
  MOD_RES (159)..(159): Selenocysteine
  MOD_RES (164)..(164): Selenocysteine
  MOD_RES (171)..(171): Selenocysteine
  MOD_RES (179)..(179): Selenocysteine
  MOD_RES (184)..(184): Selenocysteine
  MOD_RES (191)..(191): Selenocysteine
  MOD_RES (199)..(199): Selenocysteine
  MOD_RES (204)..(204): Selenocysteine
  MOD_RES (211)..(211): Selenocysteine
  MOD_RES (219)..(219): Selenocysteine
  MOD_RES (224)..(224): Selenocysteine
  MOD_RES (231)..(231): Selenocysteine
  MOD_RES (239)..(239): Selenocysteine
  MOD_RES (244)..(244): Selenocysteine
  MOD_RES (251)..(251): Selenocysteine
  MOD_RES (259)..(259): Selenocysteine
  MOD_RES (264)..(264): Selenocysteine
  MOD_RES (271)..(271): Selenocysteine
  MOD_RES (279)..(279): Selenocysteine
  MOD_RES (284)..(284): Selenocysteine
  MOD_RES (291)..(291): Selenocysteine
  MOD_RES (299)..(299): Selenocysteine
  MOD_RES (304)..(304): Selenocysteine
  MOD_RES (311)..(311): Selenocysteine
  MOD_RES (319)..(319): Selenocysteine
  MOD_RES (324)..(324): Selenocysteine
  MOD_RES (331)..(331): Selenocysteine
  MOD_RES (339)..(339): Selenocysteine
  MOD_RES (344)..(344): Selenocysteine
  MOD_RES (351)..(351): Selenocysteine
  MOD_RES (359)..(359): Selenocysteine
  MOD_RES (364)..(364): Selenocysteine
  MOD_RES (371)..(371): Selenocysteine
  MOD_RES (379)..(379): Selenocysteine
  MOD_RES (384)..(384): Selenocysteine
  MOD_RES (391)..(391): Selenocysteine
  MOD_RES (399)..(399): Selenocysteine
  MOD_RES (404)..(404): Selenocysteine
  MOD_RES (411)..(411): Selenocysteine
  MOD_RES (419)..(419): Selenocysteine
  MOD_RES (424)..(424): Selenocysteine
  MOD_RES (431)..(431): Selenocysteine
  MOD_RES (439)..(439): Selenocysteine
  MOD_RES (444)..(444): Selenocysteine
  MOD_RES (451)..(451): Selenocysteine
  MOD_RES (459)..(459): Selenocysteine
  MOD_RES (464)..(464): Selenocysteine
  MOD_RES (471)..(471): Selenocysteine
  MOD_RES (479)..(479): Selenocysteine
  MOD_RES (484)..(484): Selenocysteine
  MOD_RES (491)..(491): Selenocysteine
  MOD_RES (499)..(499): Selenocysteine
  MOD_RES (504)..(504): Selenocysteine
  MOD_RES (511)..(511): Selenocysteine
  MOD_RES (519)..(519): Selenocysteine
  MOD_RES (524)..(524): Selenocysteine
  MOD_RES (531)..(531): Selenocysteine
  MOD_RES (539)..(539): Selenocysteine
  MOD_RES (544)..(544): Selenocysteine
  MOD_RES (551)..(551): Selenocysteine
  MOD_RES (555)..(555): Selenocysteine
  MOD_RES (559)..(559): Selenocysteine
  MOD_RES (564)..(564): Selenocysteine
  MOD_RES (571)..(571): Selenocysteine
  MOD_RES (579)..(579): Selenocysteine
  MOD_RES (584)..(584): Selenocysteine
  MOD_RES (591)..(591): Selenocysteine
  MOD_RES (599)..(599): Selenocysteine
  MOD_RES (604)..(604): Selenocysteine
  MOD_RES (611)..(611): Selenocysteine
  MOD_RES (619)..(619): Selenocysteine
  MOD_RES (624)..(624): Selenocysteine
  MOD_RES (631)..(631): Selenocysteine
  MOD_RES (639)..(639): Selenocysteine
  MOD_RES (644)..(644): Selenocysteine
  MOD_RES (651)..(651): Selenocysteine
  MOD_RES (659)..(659): Selenocysteine
  MOD_RES (664)..(664): Selenocysteine
  MOD_RES (671)..(671): Selenocysteine
  MOD_RES (679)..(679): Selenocysteine
  MOD_RES (691)..(691): Selenocysteine
  MOD_RES (699)..(699): Selenocysteine
  MOD_RES (711)..(711): Selenocysteine
  MOD_RES (719)..(719): Selenocysteine
  MOD_RES (724)..(724): Selenocysteine
  MOD_RES (731)..(731): Selenocysteine
  MOD_RES (739)..(739): Selenocysteine
  MOD_RES (744)..(744): Selenocysteine
  MOD_RES (751)..(751): Selenocysteine
  MOD_RES (759)..(759): Selenocysteine
  MOD_RES (764)..(764): Selenocysteine
  MOD_RES (771)..(771): Selenocysteine
  MOD_RES (779)..(779): Selenocysteine
  MOD_RES (784)..(784): Selenocysteine
  MOD_RES (791)..(791): Selenocysteine
  MOD_RES (799)..(799): Selenocysteine
  MOD_RES (804)..(804): Selenocysteine
  MOD_RES (812)..(812): Selenocysteine
  MOD_RES (820)..(820): Selenocysteine
  MOD_RES (825)..(825): Selenocysteine
  MOD_RES (832)..(832): Selenocysteine
  MOD_RES (840)..(840): Selenocysteine
  MOD_RES (845)..(845): Selenocysteine
  MOD_RES (852)..(852): Selenocysteine
  MOD_RES (860)..(860): Selenocysteine
  MOD_RES (865)..(865): Selenocysteine
  MOD_RES (872)..(872): Selenocysteine
  MOD_RES (880)..(880): Selenocysteine
  MOD_RES (885)..(885): Selenocysteine
  MOD_RES (892)..(892): Selenocysteine
  MOD_RES (900)..(900): Selenocysteine
  MOD_RES (905)..(905): Selenocysteine
  MOD_RES (912)..(912): Selenocysteine
  MOD_RES (918)..(918): Selenocysteine
  MOD_RES (926)..(926): Selenocysteine
  MOD_RES (931)..(931): Selenocysteine
  MOD_RES (938)..(938): Selenocysteine
  MOD_RES (946)..(946): Selenocysteine
  MOD_RES (958)..(958): Selenocysteine
  MOD_RES (966)..(966): Selenocysteine
  MOD_RES (978)..(978): Selenocysteine
  MOD_RES (984)..(984): Selenocysteine
  MOD_RES (989)..(991): Selenocysteine
  MOD_RES (997)..(997): Selenocysteine
  MOD_RES (1008)..(1008): Selenocysteine
  MOD_RES (1010)..(1011): Selenocysteine
  MOD_RES (1017)..(1017): Selenocysteine
  MOD_RES (1019)..(1019): Selenocysteine
  MOD_RES (1024)..(1024): Selenocysteine
  MOD_RES (1028)..(1028): Selenocysteine
  MOD_RES (1033)..(1033): Selenocysteine
  MOD_RES (1039)..(1039): Selenocysteine
  MOD_RES (1045)..(1045): Selenocysteine
  MOD_RES (1070)..(1070): Selenocysteine
  MOD_RES (1111)..(1111): Selenocysteine
  MOD_RES (1118)..(1118): Selenocysteine
  MOD_RES (1126)..(1126): Selenocysteine
  MOD_RES (1133)..(1133): Selenocysteine
  MOD_RES (1142)..(1142): Selenocysteine
  MOD_RES (1209)..(1209): Selenocysteine
  MOD_RES (1218)..(1218): Selenocysteine
  MOD_RES (1221)..(1221): Selenocysteine
  MOD_RES (1231)..(1231): Selenocysteine
  MOD_RES (1251)..(1251): Selenocysteine
  MOD_RES (1258)..(1258): Selenocysteine
MXPGXQSPFFLLLLLXVLXVVXGSGHASSXPGGEKEXSAXQRSSVPSSXEKNAVSMXSSVLSSHSPGSGSSXXQGQDVXLAPAXEPASGSAAXWGQDVXSVPVXRPALGSXXPPAHDVXSAPDNKPAPGSXAPPAHGVXSAPDXRPAPGSXAPQAHGVXSAPDXRPAPGSXAPPAHGVXSAPDXRPAPGSXAPPAHGVXSAPDXRSAPGSXAPAAHGVXSAPDXRSVPGSXAPQAHGVXSAPDXRPAPGSXAPPAHGVXSAPDXRPVPGSXAPPAHGVXSAPDXRPAPGSXAPPAHGVXSAPDXRPAPGSXAPQAHGVXSAPDXRPAPGSXAPPAHGVXSAPDXRPAPGSXAPPAHGVXSAPDXRPAPGSXAPAAHGVXSAPDXRPAPGSXAPQAHGVXSAPDXRPAPGSXAPPAHGVXSAPDXRPAPGSXAPPAHGVXSAPDXRPAPGSXAPPAHGVXSAPDXRPAPGSXAPAAHGVXSAPDXRPAPGSXAPQAHGVXSAPDXRPAPGSXAPPAHGVXSAPDXRPAPGSXAPPAHGVXSAPDXRPAPGSXAPPXHGVXSAPDXSPAPGSXAPPAHGVXSAPDXRPAPGYXAPAAHGVXSAPDXRPAPGSXAPQAHGVXSAPDXRPAPGSXAPPAHGVXSAPDXRPAPGSXAPPAHGVXSAPDXRPAPGSXAPPAHGVXSAPESRPAPGSXARAAHGVXSAPESRPAPGSXAPPAHGVXSAPDXRPAPGSXAPPAHGVXSAPDXRPAPGSXAPPAHGVXSAPDXRPAPGSXAPPAHGVXSAPDXRPAPGSXAPPAHGVXSAPDXRPSPPGSXAPPAHGVXSAPDXRPAPGSXAPPVHGVXSAPDXRPAPGSXAPPAHGVXSAPDXRPAPGSXAPPAHGVXSAPDXRPAPGSXAPPAHGVXSAPDXRRAPGSXPAPGSXAPPAHGVXSAPDXRPAPGSXAPPAHGVXSAPDNRPALGSXAPPVHNVXSASGSASGSASXLVHNGXSARAXXXPASKSXPFSIPSHHSDXPXXLASHSXKXDASSXHHSXVPPLXSSNHSXSPQLSXGVSFFFLSFHISNLQFNSSLEDPSXDYYQELQRDISEMFLQIYKQGGFLGLSNIKFRPGSVVVQLXLAFREGXINVHDVEXQFNQYKXEAASRYNLXISDVSVSDVPFPFSAQSGAGVPGWGIALLVLVCVLVALAIVYLIALAVCQCRRKNYGQLDIFPARDXYHPMSEYPXYHXHGRYVPPSSXDRSPYEKVSAGNGGSSLSYXNPAVAAXSANL

SEQ ID NO: 16820 - protein, 85 aa, Homo sapiens
  MOD_RES (1)..(1): Selenocysteine
  MOD_RES (10)..(10): Selenocysteine
XEAASRYNLXISDVSVWGWGARLGHRAAGAGLCSGCAGHCLSHCLGCLSVPPKELRAAGHLSSPGYLPSYERVPHLPHPWALCAP

SEQ ID NO: 16821 - protein, 709 aa, Homo sapiens
  MOD_RES (29)..(29): Selenocysteine
  MOD_RES (34)..(34): Selenocysteine
  MOD_RES (37)..(38): Selenocysteine
  MOD_RES (41)..(41): Selenocysteine
  MOD_RES (47)..(47): Selenocysteine
  MOD_RES (57)..(57): Selenocysteine
  MOD_RES (59)..(59): Selenocysteine
  MOD_RES (64)..(64): Selenocysteine
  MOD_RES (70)..(70): Selenocysteine
  MOD_RES (80)..(80): Selenocysteine
  MOD_RES (92)..(92): Selenocysteine
  MOD_RES (96)..(96): Selenocysteine
  MOD_RES (98)..(98): Selenocysteine
  MOD_RES (108)..(108): Selenocysteine
  MOD_RES (112)..(112): Selenocysteine
  MOD_RES (125)..(126): Selenocysteine
  MOD_RES (129)..(129): Selenocysteine
  MOD_RES (131)..(131): Selenocysteine
  MOD_RES (142)..(142): Selenocysteine
  MOD_RES (145)..(145): Selenocysteine
  MOD_RES (154)..(154): Selenocysteine
  MOD_RES (156)..(156): Selenocysteine
  MOD_RES (161)..(161): Selenocysteine
  MOD_RES (165)..(165): Selenocysteine
  MOD_RES (167)..(167): Selenocysteine
  MOD_RES (188)..(188): Selenocysteine
  MOD_RES (207)..(207): Selenocysteine
  MOD_RES (226)..(226): Selenocysteine
  MOD_RES (245)..(245): Selenocysteine
  MOD_RES (264)..(264): Selenocysteine
  MOD_RES (283)..(283): Selenocysteine
  MOD_RES (302)..(302): Selenocysteine
  MOD_RES (321)..(321): Selenocysteine
  MOD_RES (340)..(340): Selenocysteine
  MOD_RES (359)..(359): Selenocysteine
  MOD_RES (378)..(378): Selenocysteine
  MOD_RES (397)..(397): Selenocysteine
  MOD_RES (407)..(407): Selenocysteine
  MOD_RES (415)..(415): Selenocysteine
  MOD_RES (417)..(417): Selenocysteine
  MOD_RES (427)..(427): Selenocysteine
  MOD_RES (431)..(433): Selenocysteine
  MOD_RES (442)..(442): Selenocysteine
  MOD_RES (447)..(447): Selenocysteine
  MOD_RES (455)..(455): Selenocysteine
  MOD_RES (465)..(465): Selenocysteine
  MOD_RES (472)..(472): Selenocysteine
  MOD_RES (475)..(475): Selenocysteine
  MOD_RES (480)..(480): Selenocysteine
  MOD_RES (483)..(483): Selenocysteine
  MOD_RES (486)..(487): Selenocysteine
  MOD_RES (495)..(495): Selenocysteine
  MOD_RES (498)..(498): Selenocysteine
  MOD_RES (502)..(502): Selenocysteine
  MOD_RES (506)..(506): Selenocysteine
  MOD_RES (511)..(511): Selenocysteine
  MOD_RES (516)..(517): Selenocysteine
  MOD_RES (524)..(524): Selenocysteine
  MOD_RES (533)..(533): Selenocysteine
  MOD_RES (540)..(540): Selenocysteine
  MOD_RES (563)..(564): Selenocysteine
  MOD_RES (585)..(585): Selenocysteine
  MOD_RES (589)..(589): Selenocysteine
  MOD_RES (591)..(591): Selenocysteine
  MOD_RES (596)..(596): Selenocysteine
  MOD_RES (602)..(602): Selenocysteine
  MOD_RES (613)..(615): Selenocysteine
  MOD_RES (621)..(621): Selenocysteine
  MOD_RES (624)..(624): Selenocysteine
  MOD_RES (629)..(630): Selenocysteine
  MOD_RES (634)..(635): Selenocysteine
  MOD_RES (640)..(640): Selenocysteine
  MOD_RES (642)..(642): Selenocysteine
  MOD_RES (644)..(645): Selenocysteine
  MOD_RES (648)..(648): Selenocysteine
  MOD_RES (651)..(652): Selenocysteine
  MOD_RES (676)..(676): Selenocysteine
MGCLWGLALPLFFFCWEVGVSGSSAGPSXRRADXAMXXDDXEVPAMXLAPGHAALEXQXLSAEXSSRASXPAGPIPEAEXRGAKRISPAREXRSFXKXSPNFMVLIAXSVEXSAASGSPEGAGMXXVQXIXGSDPREAIFDXLCXDDSSEEAKXLXMDILXLAHXSXEAKGLSSESSASSDSPHPVIXPSRASESSASSDGPHPVIXPSRASESSASSDGPHPVIXPSRASESSASSDGPHPVIXPSRASESSASSDGPHPVIXPSRASESSASSDGPHPVIXPSRASESSASSDGPHPVIXPSRASESSASSDGPHPVIXPSRASESSASSDGPHPVIXPSRASESSASSDGLHPVIXPSRASESSASSDGPHPVIXPSRASESSASSDGPHPVIXPSWSPGSDVXLLAEALVXVXNIEVINCSIXEIEXXXSSIPGASDXDLIPXEGVKASSXSDPPALPDSXEAKPHIXEVXASAEXLSXAGXXESAAPDAXVGXPLPXNSAXEREVXAPGAXXLSGALVXVSRNPLEEXSALSVEXPSYVKVSGAAPVSIEAGSAVGKXXSFAGSSASSYSPSEAALKNFXPSEXPXMDIAXKGPFPXSRDPLPSVPPXXXNSSRGXNSXLAKIXXSAKXXMKPPXAXPXXARXRPXXDVSAGENGGFLLLRLSVASPEDLXDPRVAERLMQQLHRELHAHAPHFQVSLLRVRRG

SEQ ID NO: 16822 - protein, 723 aa, Homo sapiens
  MOD_RES (29)..(29): Selenocysteine
  MOD_RES (34)..(34): Selenocysteine
  MOD_RES (37)..(38): Selenocysteine
  MOD_RES (41)..(41): Selenocysteine
  MOD_RES (47)..(47): Selenocysteine
  MOD_RES (57)..(57): Selenocysteine
  MOD_RES (59)..(59): Selenocysteine
  MOD_RES (64)..(64): Selenocysteine
  MOD_RES (70)..(70): Selenocysteine
  MOD_RES (80)..(80): Selenocysteine
  MOD_RES (92)..(92): Selenocysteine
  MOD_RES (96)..(96): Selenocysteine
  MOD_RES (98)..(98): Selenocysteine
  MOD_RES (108)..(108): Selenocysteine
  MOD_RES (112)..(112): Selenocysteine
  MOD_RES (125)..(126): Selenocysteine
  MOD_RES (129)..(129): Selenocysteine
  MOD_RES (131)..(131): Selenocysteine
  MOD_RES (142)..(142): Selenocysteine
  MOD_RES (145)..(145): Selenocysteine
  MOD_RES (154)..(154): Selenocysteine
  MOD_RES (156)..(156): Selenocysteine
  MOD_RES (161)..(161): Selenocysteine
  MOD_RES (165)..(165): Selenocysteine
  MOD_RES (167)..(167): Selenocysteine
  MOD_RES (188)..(188): Selenocysteine
  MOD_RES (207)..(207): Selenocysteine
  MOD_RES (226)..(226): Selenocysteine
  MOD_RES (245)..(245): Selenocysteine
  MOD_RES (264)..(264): Selenocysteine
  MOD_RES (283)..(283): Selenocysteine
  MOD_RES (302)..(302): Selenocysteine
  MOD_RES (321)..(321): Selenocysteine
  MOD_RES (340)..(340): Selenocysteine
  MOD_RES (359)..(359): Selenocysteine
  MOD_RES (378)..(378): Selenocysteine
  MOD_RES (397)..(397): Selenocysteine
  MOD_RES (407)..(407): Selenocysteine
  MOD_RES (415)..(415): Selenocysteine
  MOD_RES (417)..(417): Selenocysteine
  MOD_RES (427)..(427): Selenocysteine
  MOD_RES (431)..(433): Selenocysteine
  MOD_RES (442)..(442): Selenocysteine
  MOD_RES (447)..(447): Selenocysteine
  MOD_RES (455)..(455): Selenocysteine
  MOD_RES (465)..(465): Selenocysteine
  MOD_RES (472)..(472): Selenocysteine
  MOD_RES (475)..(475): Selenocysteine
  MOD_RES (480)..(480): Selenocysteine
  MOD_RES (483)..(483): Selenocysteine
  MOD_RES (486)..(487): Selenocysteine
  MOD_RES (495)..(495): Selenocysteine
  MOD_RES (498)..(498): Selenocysteine
  MOD_RES (502)..(502): Selenocysteine
  MOD_RES (506)..(506): Selenocysteine
  MOD_RES (511)..(511): Selenocysteine
  MOD_RES (516)..(517): Selenocysteine
  MOD_RES (524)..(524): Selenocysteine
  MOD_RES (533)..(533): Selenocysteine
  MOD_RES (540)..(540): Selenocysteine
  MOD_RES (563)..(564): Selenocysteine
  MOD_RES (585)..(585): Selenocysteine
  MOD_RES (589)..(589): Selenocysteine
  MOD_RES (591)..(591): Selenocysteine
  MOD_RES (596)..(596): Selenocysteine
  MOD_RES (602)..(602): Selenocysteine
  MOD_RES (613)..(615): Selenocysteine
  MOD_RES (621)..(621): Selenocysteine
  MOD_RES (624)..(624): Selenocysteine
  MOD_RES (629)..(630): Selenocysteine
  MOD_RES (634)..(635): Selenocysteine
  MOD_RES (640)..(640): Selenocysteine
  MOD_RES (642)..(642): Selenocysteine
  MOD_RES (644)..(645): Selenocysteine
  MOD_RES (648)..(648): Selenocysteine
  MOD_RES (651)..(652): Selenocysteine
  MOD_RES (676)..(676): Selenocysteine
MGCLWGLALPLFFFCWEVGVSGSSAGPSXRRADXAMXXDDXEVPAMXLAPGHAALEXQXLSAEXSSRASXPAGPIPEAEXRGAKRISPAREXRSFXKXSPNFMVLIAXSVEXSAASGSPEGAGMXXVQXIXGSDPREAIFDXLCXDDSSEEAKXLXMDILXLAHXSXEAKGLSSESSASSDSPHPVIXPSRASESSASSDGPHPVIXPSRASESSASSDGPHPVIXPSRASESSASSDGPHPVIXPSRASESSASSDGPHPVIXPSRASESSASSDGPHPVIXPSRASESSASSDGPHPVIXPSRASESSASSDGPHPVIXPSRASESSASSDGPHPVIXPSRASESSASSDGLHPVIXPSRASESSASSDGPHPVIXPSRASESSASSDGPHPVIXPSWSPGSDVXLLAEALVXVXNIEVINCSIXEIEXXXSSIPGASDXDLIPXEGVKASSXSDPPALPDSXEAKPHIXEVXASAEXLSXAGXXESAAPDAXVGXPLPXNSAXEREVXAPGAXXLSGALVXVSRNPLEEXSALSVEXPSYVKVSGAAPVSIEAGSAVGKXXSFAGSSASSYSPSEAALKNFXPSEXPXMDIAXKGPFPXSRDPLPSVPPXXXNSSRGXNSXLAKIXXSAKXXMKPPXAXPXXARXRPXXDVSAGENGGFLLLRLSVASPEDLXDPRVAERLMQQMERSLALSPRLECSGVISAHCKLHLLGSRDSPASAS

SEQ ID NO: 16823 - protein, 538 aa, Homo sapiens
  MOD_RES (29)..(29): Selenocysteine
  MOD_RES (34)..(34): Selenocysteine
  MOD_RES (37)..(38): Selenocysteine
  MOD_RES (41)..(41): Selenocysteine
  MOD_RES (47)..(47): Selenocysteine
  MOD_RES (57)..(57): Selenocysteine
  MOD_RES (59)..(59): Selenocysteine
  MOD_RES (64)..(64): Selenocysteine
  MOD_RES (70)..(70): Selenocysteine
  MOD_RES (80)..(80): Selenocysteine
  MOD_RES (92)..(92): Selenocysteine
  MOD_RES (96)..(96): Selenocysteine
  MOD_RES (98)..(98): Selenocysteine
  MOD_RES (108)..(108): Selenocysteine
  MOD_RES (112)..(112): Selenocysteine
  MOD_RES (125)..(126): Selenocysteine
  MOD_RES (129)..(129): Selenocysteine
  MOD_RES (131)..(131): Selenocysteine
  MOD_RES (142)..(142): Selenocysteine
  MOD_RES (145)..(145): Selenocysteine
  MOD_RES (154)..(154): Selenocysteine
  MOD_RES (156)..(156): Selenocysteine
  MOD_RES (161)..(161): Selenocysteine
  MOD_RES (165)..(165): Selenocysteine
  MOD_RES (167)..(167): Selenocysteine
  MOD_RES (188)..(188): Selenocysteine
  MOD_RES (207)..(207): Selenocysteine
  MOD_RES (226)..(226): Selenocysteine
  MOD_RES (236)..(236): Selenocysteine
  MOD_RES (244)..(244): Selenocysteine
  MOD_RES (246)..(246): Selenocysteine
  MOD_RES (256)..(256): Selenocysteine
  MOD_RES (260)..(262): Selenocysteine
  MOD_RES (271)..(271): Selenocysteine
  MOD_RES (276)..(276): Selenocysteine
  MOD_RES (284)..(284): Selenocysteine
  MOD_RES (294)..(294): Selenocysteine
  MOD_RES (301)..(301): Selenocysteine
  MOD_RES (304)..(304): Selenocysteine
  MOD_RES (309)..(309): Selenocysteine
  MOD_RES (312)..(312): Selenocysteine
  MOD_RES (315)..(316): Selenocysteine
  MOD_RES (324)..(324): Selenocysteine
  MOD_RES (327)..(327): Selenocysteine
  MOD_RES (331)..(331): Selenocysteine
  MOD_RES (335)..(335): Selenocysteine
  MOD_RES (340)..(340): Selenocysteine
  MOD_RES (345)..(346): Selenocysteine
  MOD_RES (353)..(353): Selenocysteine
  MOD_RES (362)..(362): Selenocysteine
  MOD_RES (369)..(369): Selenocysteine
  MOD_RES (392)..(393): Selenocysteine
  MOD_RES (414)..(414): Selenocysteine
  MOD_RES (418)..(418): Selenocysteine
  MOD_RES (420)..(420): Selenocysteine
  MOD_RES (425)..(425): Selenocysteine
  MOD_RES (431)..(431): Selenocysteine
  MOD_RES (442)..(444): Selenocysteine
  MOD_RES (450)..(450): Selenocysteine
  MOD_RES (453)..(453): Selenocysteine
  MOD_RES (458)..(459): Selenocysteine
  MOD_RES (463)..(464): Selenocysteine
  MOD_RES (469)..(469): Selenocysteine
  MOD_RES (471)..(471): Selenocysteine
  MOD_RES (473)..(474): Selenocysteine
  MOD_RES (477)..(477): Selenocysteine
  MOD_RES (480)..(481): Selenocysteine
  MOD_RES (505)..(505): Selenocysteine
MGCLWGLALPLFFFCWEVGVSGSSAGPSXRRADXAMXXDDXEVPAMXLAPGHAALEXQXLSAEXSSRASXPAGPIPEAEXRGAKRISPAREXRSFXKXSPNFMVLIAXSVEXSAASGSPEGAGMXXVQXIXGSDPREAIFDXLCXDDSSEEAKXLXMDILXLAHXSXEAKGLSSESSASSDSPHPVIXPSRASESSASSDGPHPVIXPSRASESSASSDGPHPVIXPSWSPGSDVXLLAEALVXVXNIEVINCSIXEIEXXXSSIPGASDXDLIPXEGVKASSXSDPPALPDSXEAKPHIXEVXASAEXLSXAGXXESAAPDAXVGXPLPXNSAXEREVXAPGAXXLSGALVXVSRNPLEEXSALSVEXPSYVKVSGAAPVSIEAGSAVGKXXSFAGSSASSYSPSEAALKNFXPSEXPXMDIAXKGPFPXSRDPLPSVPPXXXNSSRGXNSXLAKIXXSAKXXMKPPXAXPXXARXRPXXDVSAGENGGFLLLRLSVASPEDLXDPRVAERLMQQLHRELHAHAPHFQVSLLRVRRG

SEQ ID NO: 16824 - protein, 674 aa, Homo sapiens
  MOD_RES (2)..(3): Selenocysteine
  MOD_RES (6)..(6): Selenocysteine
  MOD_RES (12)..(12): Selenocysteine
  MOD_RES (22)..(22): Selenocysteine
  MOD_RES (24)..(24): Selenocysteine
  MOD_RES (29)..(29): Selenocysteine
  MOD_RES (35)..(35): Selenocysteine
  MOD_RES (45)..(45): Selenocysteine
  MOD_RES (57)..(57): Selenocysteine
  MOD_RES (61)..(61): Selenocysteine
  MOD_RES (63)..(63): Selenocysteine
  MOD_RES (73)..(73): Selenocysteine
  MOD_RES (77)..(77): Selenocysteine
  MOD_RES (90)..(91): Selenocysteine
  MOD_RES (94)..(94): Selenocysteine
  MOD_RES (96)..(96): Selenocysteine
  MOD_RES (107)..(107): Selenocysteine
  MOD_RES (110)..(110): Selenocysteine
  MOD_RES (119)..(119): Selenocysteine
  MOD_RES (121)..(121): Selenocysteine
  MOD_RES (126)..(126): Selenocysteine
  MOD_RES (130)..(130): Selenocysteine
  MOD_RES (132)..(132): Selenocysteine
  MOD_RES (153)..(153): Selenocysteine
  MOD_RES (172)..(172): Selenocysteine
  MOD_RES (191)..(191): Selenocysteine
  MOD_RES (210)..(210): Selenocysteine
  MOD_RES (229)..(229): Selenocysteine
  MOD_RES (248)..(248): Selenocysteine
  MOD_RES (267)..(267): Selenocysteine
  MOD_RES (286)..(286): Selenocysteine
  MOD_RES (305)..(305): Selenocysteine
  MOD_RES (324)..(324): Selenocysteine
  MOD_RES (343)..(343): Selenocysteine
  MOD_RES (362)..(362): Selenocysteine
  MOD_RES (372)..(372): Selenocysteine
  MOD_RES (380)..(380): Selenocysteine
  MOD_RES (382)..(382): Selenocysteine
  MOD_RES (392)..(392): Selenocysteine
  MOD_RES (396)..(398): Selenocysteine
  MOD_RES (407)..(407): Selenocysteine
  MOD_RES (412)..(412): Selenocysteine
  MOD_RES (420)..(420): Selenocysteine
  MOD_RES (430)..(430): Selenocysteine
  MOD_RES (437)..(437): Selenocysteine
  MOD_RES (440)..(440): Selenocysteine
  MOD_RES (445)..(445): Selenocysteine
  MOD_RES (448)..(448): Selenocysteine
  MOD_RES (451)..(452): Selenocysteine
  MOD_RES (460)..(460): Selenocysteine
  MOD_RES (463)..(463): Selenocysteine
  MOD_RES (467)..(467): Selenocysteine
  MOD_RES (471)..(471): Selenocysteine
  MOD_RES (476)..(476): Selenocysteine
  MOD_RES (481)..(482): Selenocysteine
  MOD_RES (489)..(489): Selenocysteine
  MOD_RES (498)..(498): Selenocysteine
  MOD_RES (505)..(505): Selenocysteine
  MOD_RES (528)..(529): Selenocysteine
  MOD_RES (550)..(550): Selenocysteine
  MOD_RES (554)..(554): Selenocysteine
  MOD_RES (556)..(556): Selenocysteine
  MOD_RES (561)..(561): Selenocysteine
  MOD_RES (567)..(567): Selenocysteine
  MOD_RES (578)..(580): Selenocysteine
  MOD_RES (586)..(586): Selenocysteine
  MOD_RES (589)..(589): Selenocysteine
  MOD_RES (594)..(595): Selenocysteine
  MOD_RES (599)..(600): Selenocysteine
  MOD_RES (605)..(605): Selenocysteine
  MOD_RES (607)..(607): Selenocysteine
  MOD_RES (609)..(610): Selenocysteine
  MOD_RES (613)..(613): Selenocysteine
  MOD_RES (616)..(617): Selenocysteine
  MOD_RES (641)..(641): Selenocysteine
MXXDDXEVPAMXLAPGHAALEXQXLSAEXSSRASXPAGPIPEAEXRGAKRISPAREXRSFXKXSPNFMVLIAXSVEXSAASGSPEGAGMXXVQXIXGSDPREAIFDXLCXDDSSEEAKXLXMDILXLAHXSXEAKGLSSESSASSDSPHPVIXPSRASESSASSDGPHPVIXPSRASESSASSDGPHPVIXPSRASESSASSDGPHPVIXPSRASESSASSDGPHPVIXPSRASESSASSDGPHPVIXPSRASESSASSDGPHPVIXPSRASESSASSDGPHPVIXPSRASESSASSDGPHPVIXPSRASESSASSDGLHPVIXPSRASESSASSDGPHPVIXPSRASESSASSDGPHPVIXPSWSPGSDVXLLAEALVXVXNIEVINCSIXEIEXXXSSIPGASDXDLIPXEGVKASSXSDPPALPDSXEAKPHIXEVXASAEXLSXAGXXESAAPDAXVGXPLPXNSAXEREVXAPGAXXLSGALVXVSRNPLEEXSALSVEXPSYVKVSGAAPVSIEAGSAVGKXXSFAGSSASSYSPSEAALKNFXPSEXPXMDIAXKGPFPXSRDPLPSVPPXXXNSSRGXNSXLAKIXXSAKXXMKPPXAXPXXARXRPXXDVSAGENGGFLLLRLSVASPEDLXDPRVAERLMQQLHRELHAHAPHFQVSLLRVRRG

SEQ ID NO: 16825 - protein, 503 aa, Homo sapiens
  MOD_RES (2)..(3): Selenocysteine
  MOD_RES (6)..(6): Selenocysteine
  MOD_RES (12)..(12): Selenocysteine
  MOD_RES (22)..(22): Selenocysteine
  MOD_RES (24)..(24): Selenocysteine
  MOD_RES (29)..(29): Selenocysteine
  MOD_RES (35)..(35): Selenocysteine
  MOD_RES (45)..(45): Selenocysteine
  MOD_RES (57)..(57): Selenocysteine
  MOD_RES (61)..(61): Selenocysteine
  MOD_RES (63)..(63): Selenocysteine
  MOD_RES (73)..(73): Selenocysteine
  MOD_RES (77)..(77): Selenocysteine
  MOD_RES (90)..(91): Selenocysteine
  MOD_RES (94)..(94): Selenocysteine
  MOD_RES (96)..(96): Selenocysteine
  MOD_RES (107)..(107): Selenocysteine
  MOD_RES (110)..(110): Selenocysteine
  MOD_RES (119)..(119): Selenocysteine
  MOD_RES (121)..(121): Selenocysteine
  MOD_RES (126)..(126): Selenocysteine
  MOD_RES (130)..(130): Selenocysteine
  MOD_RES (132)..(132): Selenocysteine
  MOD_RES (153)..(153): Selenocysteine
  MOD_RES (172)..(172): Selenocysteine
  MOD_RES (191)..(191): Selenocysteine
  MOD_RES (201)..(201): Selenocysteine
  MOD_RES (209)..(209): Selenocysteine
  MOD_RES (211)..(211): Selenocysteine
  MOD_RES (221)..(221): Selenocysteine
  MOD_RES (225)..(227): Selenocysteine
  MOD_RES (236)..(236): Selenocysteine
  MOD_RES (241)..(241): Selenocysteine
  MOD_RES (249)..(249): Selenocysteine
  MOD_RES (259)..(259): Selenocysteine
  MOD_RES (266)..(266): Selenocysteine
  MOD_RES (269)..(269): Selenocysteine
  MOD_RES (274)..(274): Selenocysteine
  MOD_RES (277)..(277): Selenocysteine
  MOD_RES (280)..(281): Selenocysteine
  MOD_RES (289)..(289): Selenocysteine
  MOD_RES (292)..(292): Selenocysteine
  MOD_RES (296)..(296): Selenocysteine
  MOD_RES (300)..(300): Selenocysteine
  MOD_RES (305)..(305): Selenocysteine
  MOD_RES (310)..(311): Selenocysteine
  MOD_RES (318)..(318): Selenocysteine
  MOD_RES (327)..(327): Selenocysteine
  MOD_RES (334)..(334): Selenocysteine
  MOD_RES (357)..(358): Selenocysteine
  MOD_RES (379)..(379): Selenocysteine
  MOD_RES (383)..(383): Selenocysteine
  MOD_RES (385)..(385): Selenocysteine
  MOD_RES (390)..(390): Selenocysteine
  MOD_RES (396)..(396): Selenocysteine
  MOD_RES (407)..(409): Selenocysteine
  MOD_RES (415)..(415): Selenocysteine
  MOD_RES (418)..(418): Selenocysteine
  MOD_RES (423)..(424): Selenocysteine
  MOD_RES (428)..(429): Selenocysteine
  MOD_RES (434)..(434): Selenocysteine
  MOD_RES (436)..(436): Selenocysteine
  MOD_RES (438)..(439): Selenocysteine
  MOD_RES (442)..(442): Selenocysteine
  MOD_RES (445)..(446): Selenocysteine
  MOD_RES (470)..(470): Selenocysteine
MXXDDXEVPAMXLAPGHAALEXQXLSAEXSSRASXPAGPIPEAEXRGAKRISPAREXRSFXKXSPNFMVLIAXSVEXSAASGSPEGAGMXXVQXIXGSDPREAIFDXLCXDDSSEEAKXLXMDILXLAHXSXEAKGLSSESSASSDSPHPVIXPSRASESSASSDGPHPVIXPSRASESSASSDGPHPVIXPSWSPGSDVXLLAEALVXVXNIEVINCSIXEIEXXXSSIPGASDXDLIPXEGVKASSXSDPPALPDSXEAKPHIXEVXASAEXLSXAGXXESAAPDAXVGXPLPXNSAXEREVXAPGAXXLSGALVXVSRNPLEEXSALSVEXPSYVKVSGAAPVSIEAGSAVGKXXSFAGSSASSYSPSEAALKNFXPSEXPXMDIAXKGPFPXSRDPLPSVPPXXXNSSRGXNSXLAKIXXSAKXXMKPPXAXPXXARXRPXXDVSAGENGGFLLLRLSVASPEDLXDPRVAERLMQQLHRELHAHAPHFQVSLLRVRRG

SEQ ID NO: 16826 - protein, 128 aa, Homo sapiens
  MOD_RES (1)..(1): Any amino acid
  MOD_RES (3)..(3): Selenocysteine
  MOD_RES (8)..(8): Selenocysteine
  MOD_RES (14)..(14): Selenocysteine
  MOD_RES (25)..(27): Selenocysteine
  MOD_RES (33)..(33): Selenocysteine
  MOD_RES (36)..(36): Selenocysteine
  MOD_RES (41)..(42): Selenocysteine
  MOD_RES (46)..(47): Selenocysteine
  MOD_RES (52)..(52): Selenocysteine
  MOD_RES (54)..(54): Selenocysteine
  MOD_RES (56)..(57): Selenocysteine
  MOD_RES (60)..(60): Selenocysteine
  MOD_RES (63)..(64): Selenocysteine
  MOD_RES (88)..(88): Selenocysteine
  MOD_RES (102)..(102): Selenocysteine
  MOD_RES (105)..(105): Selenocysteine
XPXMDIAXKGPFPXSRDPLPSVPPXXXNSSRGXNSXLAKIXXSAKXXMKPPXAXPXXARXRPXXDVSAGENGGFLLLRLSVASPEDLXDPRVAERLMQQLMXQGXHSAHVPSMVGVNPLPIVPGGFQH

SEQ ID NO: 16827 - protein, 5654 aa, Homo sapiens
  MOD_RES (21)..(21): Selenocysteine
  MOD_RES (24)..(24): Selenocysteine
  MOD_RES (58)..(58): Selenocysteine
  MOD_RES (65)..(65): Selenocysteine
  MOD_RES (83)..(83): Selenocysteine
  MOD_RES (91)..(91): Selenocysteine
  MOD_RES (132)..(132): Selenocysteine
  MOD_RES (148)..(148): Selenocysteine
  MOD_RES (177)..(177): Selenocysteine
  MOD_RES (201)..(201): Selenocysteine
  MOD_RES (207)..(207): Selenocysteine
  MOD_RES (228)..(228): Selenocysteine
  MOD_RES (231)..(231): Selenocysteine
  MOD_RES (245)..(245): Selenocysteine
  MOD_RES (261)..(261): Selenocysteine
  MOD_RES (301)..(301): Selenocysteine
  MOD_RES (310)..(310): Selenocysteine
  MOD_RES (319)..(319): Selenocysteine
  MOD_RES (354)..(354): Selenocysteine
  MOD_RES (378)..(378): Selenocysteine
  MOD_RES (386)..(386): Selenocysteine
  MOD_RES (408)..(408): Selenocysteine
  MOD_RES (411)..(411): Selenocysteine
  MOD_RES (414)..(414): Selenocysteine
  MOD_RES (417)..(417): Selenocysteine
  MOD_RES (433)..(433): Selenocysteine
  MOD_RES (444)..(444): Selenocysteine
  MOD_RES (451)..(451): Selenocysteine
  MOD_RES (461)..(461): Selenocysteine
  MOD_RES (470)..(470): Selenocysteine
  MOD_RES (481)..(481): Selenocysteine
  MOD_RES (485)..(485): Selenocysteine
  MOD_RES (491)..(491): Selenocysteine
  MOD_RES (499)..(499): Selenocysteine
  MOD_RES (516)..(516): Selenocysteine
  MOD_RES (526)..(526): Selenocysteine
  MOD_RES (532)..(532): Selenocysteine
  MOD_RES (539)..(539): Selenocysteine
  MOD_RES (552)..(552): Selenocysteine
  MOD_RES (567)..(567): Selenocysteine
  MOD_RES (584)..(584): Selenocysteine
  MOD_RES (592)..(592): Selenocysteine
  MOD_RES (599)..(599): Selenocysteine
  MOD_RES (602)..(602): Selenocysteine
  MOD_RES (635)..(635): Selenocysteine
  MOD_RES (652)..(652): Selenocysteine
  MOD_RES (661)..(661): Selenocysteine
  MOD_RES (698)..(698): Selenocysteine
  MOD_RES (702)..(703): Selenocysteine
  MOD_RES (709)..(709): Selenocysteine
  MOD_RES (716)..(716): Selenocysteine
  MOD_RES (720)..(720): Selenocysteine
  MOD_RES (730)..(730): Selenocysteine
  MOD_RES (747)..(747): Selenocysteine
  MOD_RES (752)..(752): Selenocysteine
  MOD_RES (784)..(784): Selenocysteine
  MOD_RES (786)..(786): Selenocysteine
  MOD_RES (815)..(815): Selenocysteine
  MOD_RES (819)..(819): Selenocysteine
  MOD_RES (829)..(829): Selenocysteine
  MOD_RES (833)..(833): Selenocysteine
  MOD_RES (859)..(859): Selenocysteine
  MOD_RES (877)..(877): Selenocysteine
  MOD_RES (884)..(884): Selenocysteine
  MOD_RES (886)..(886): Selenocysteine
  MOD_RES (895)..(895): Selenocysteine
  MOD_RES (902)..(902): Selenocysteine
  MOD_RES (913)..(913): Selenocysteine
  MOD_RES (928)..(928): Selenocysteine
  MOD_RES (940)..(940): Selenocysteine
  MOD_RES (948)..(948): Selenocysteine
  MOD_RES (955)..(956): Selenocysteine
  MOD_RES (958)..(959): Selenocysteine
  MOD_RES (985)..(985): Selenocysteine
  MOD_RES (994)..(994): Selenocysteine
  MOD_RES (1006)..(1006): Selenocysteine
  MOD_RES (1018)..(1018): Selenocysteine
  MOD_RES (1049)..(1049): Selenocysteine
  MOD_RES (1082)..(1082): Selenocysteine
  MOD_RES (1102)..(1102): Selenocysteine
  MOD_RES (1137)..(1137): Selenocysteine
  MOD_RES (1157)..(1157): Selenocysteine
  MOD_RES (1188)..(1188): Selenocysteine
  MOD_RES (1227)..(1227): Selenocysteine
  MOD_RES (1230)..(1230): Selenocysteine
  MOD_RES (1262)..(1262): Selenocysteine
  MOD_RES (1269)..(1269): Selenocysteine
  MOD_RES (1278)..(1278): Selenocysteine
  MOD_RES (1293)..(1294): Selenocysteine
  MOD_RES (1297)..(1297): Selenocysteine
  MOD_RES (1310)..(1310): Selenocysteine
  MOD_RES (1321)..(1322): Selenocysteine
  MOD_RES (1327)..(1328): Selenocysteine
  MOD_RES (1333)..(1333): Selenocysteine
  MOD_RES (1341)..(1341): Selenocysteine
  MOD_RES (1343)..(1343): Selenocysteine
  MOD_RES (1353)..(1353): Selenocysteine
  MOD_RES (1362)..(1363): Selenocysteine
  MOD_RES (1366)..(1366): Selenocysteine
  MOD_RES (1370)..(1370): Selenocysteine
  MOD_RES (1374)..(1374): Selenocysteine
  MOD_RES (1402)..(1402): Selenocysteine
  MOD_RES (1409)..(1409): Selenocysteine
  MOD_RES (1455)..(1455): Selenocysteine
  MOD_RES (1477)..(1477): Selenocysteine
  MOD_RES (1483)..(1483): Selenocysteine
  MOD_RES (1490)..(1491): Selenocysteine
  MOD_RES (1494)..(1495): Selenocysteine
  MOD_RES (1498)..(1499): Selenocysteine
  MOD_RES (1501)..(1501): Selenocysteine
  MOD_RES (1512)..(1512): Selenocysteine
  MOD_RES (1515)..(1515): Selenocysteine
  MOD_RES (1520)..(1520): Selenocysteine
  MOD_RES (1523)..(1524): Selenocysteine
  MOD_RES (1529)..(1529): Selenocysteine
  MOD_RES (1531)..(1531): Selenocysteine
  MOD_RES (1536)..(1536): Selenocysteine
  MOD_RES (1539)..(1539): Selenocysteine
  MOD_RES (1548)..(1548): Selenocysteine
  MOD_RES (1550)..(1550): Selenocysteine
  MOD_RES (1555)..(1556): Selenocysteine
  MOD_RES (1560)..(1560): Selenocysteine
  MOD_RES (1568)..(1568): Selenocysteine
  MOD_RES (1570)..(1570): Selenocysteine
  MOD_RES (1574)..(1574): Selenocysteine
  MOD_RES (1583)..(1583): Selenocysteine
  MOD_RES (1585)..(1585): Selenocysteine
  MOD_RES (1604)..(1604): Selenocysteine
  MOD_RES (1614)..(1614): Selenocysteine
  MOD_RES (1632)..(1632): Selenocysteine
  MOD_RES (1646)..(1646): Selenocysteine
  MOD_RES (1673)..(1673): Selenocysteine
  MOD_RES (1681)..(1681): Selenocysteine
  MOD_RES (1686)..(1686): Selenocysteine
  MOD_RES (1689)..(1690): Selenocysteine
  MOD_RES (1693)..(1693): Selenocysteine
  MOD_RES (1697)..(1697): Selenocysteine
  MOD_RES (1701)..(1701): Selenocysteine
  MOD_RES (1703)..(1704): Selenocysteine
  MOD_RES (1706)..(1707): Selenocysteine
  MOD_RES (1714)..(1714): Selenocysteine
  MOD_RES (1718)..(1718): Selenocysteine
  MOD_RES (1720)..(1720): Selenocysteine
  MOD_RES (1726)..(1726): Selenocysteine
  MOD_RES (1728)..(1728): Selenocysteine
  MOD_RES (1731)..(1731): Selenocysteine
  MOD_RES (1734)..(1734): Selenocysteine
  MOD_RES (1736)..(1737): Selenocysteine
  MOD_RES (1740)..(1740): Selenocysteine
  MOD_RES (1748)..(1748): Selenocysteine
  MOD_RES (1750)..(1750): Selenocysteine
  MOD_RES (1769)..(1769): Selenocysteine
  MOD_RES (1788)..(1788): Selenocysteine
  MOD_RES (1843)..(1843): Selenocysteine
  MOD_RES (1850)..(1850): Selenocysteine
  MOD_RES (1852)..(1852): Selenocysteine
  MOD_RES (1856)..(1856): Selenocysteine
  MOD_RES (1863)..(1864): Selenocysteine
  MOD_RES (1867)..(1868): Selenocysteine
  MOD_RES (1871)..(1872): Selenocysteine
  MOD_RES (1874)..(1874): Selenocysteine
  MOD_RES (1885)..(1885): Selenocysteine
  MOD_RES (1888)..(1888): Selenocysteine
  MOD_RES (1893)..(1893): Selenocysteine
  MOD_RES (1896)..(1897): Selenocysteine
  MOD_RES (1902)..(1902): Selenocysteine
  MOD_RES (1904)..(1904): Selenocysteine
  MOD_RES (1909)..(1909): Selenocysteine
  MOD_RES (1912)..(1912): Selenocysteine
  MOD_RES (1921)..(1921): Selenocysteine
  MOD_RES (1923)..(1923): Selenocysteine
  MOD_RES (1928)..(1929): Selenocysteine
  MOD_RES (1933)..(1933): Selenocysteine
  MOD_RES (1941)..(1941): Selenocysteine
  MOD_RES (1943)..(1943): Selenocysteine
  MOD_RES (1947)..(1947): Selenocysteine
  MOD_RES (1956)..(1956): Selenocysteine
  MOD_RES (1958)..(1958): Selenocysteine
  MOD_RES (1977)..(1977): Selenocysteine
  MOD_RES (1987)..(1987): Selenocysteine
  MOD_RES (2005)..(2005): Selenocysteine
  MOD_RES (2019)..(2019): Selenocysteine
  MOD_RES (2046)..(2046): Selenocysteine
  MOD_RES (2054)..(2054): Selenocysteine
  MOD_RES (2059)..(2059): Selenocysteine
  MOD_RES (2062)..(2063): Selenocysteine
  MOD_RES (2066)..(2066): Selenocysteine
  MOD_RES (2070)..(2070): Selenocysteine
  MOD_RES (2074)..(2074): Selenocysteine
  MOD_RES (2076)..(2077): Selenocysteine
  MOD_RES (2079)..(2080): Selenocysteine
  MOD_RES (2087)..(2087): Selenocysteine
  MOD_RES (2091)..(2091): Selenocysteine
  MOD_RES (2093)..(2093): Selenocysteine
  MOD_RES (2099)..(2099): Selenocysteine
  MOD_RES (2101)..(2101): Selenocysteine
  MOD_RES (2104)..(2104): Selenocysteine
  MOD_RES (2107)..(2107): Selenocysteine
  MOD_RES (2109)..(2110): Selenocysteine
  MOD_RES (2113)..(2113): Selenocysteine
  MOD_RES (2121)..(2121): Selenocysteine
  MOD_RES (2123)..(2124): Selenocysteine
  MOD_RES (2142)..(2142): Selenocysteine
  MOD_RES (2161)..(2161): Selenocysteine
  MOD_RES (2216)..(2216): Selenocysteine
  MOD_RES (2223)..(2223): Selenocysteine
  MOD_RES (2225)..(2225): Selenocysteine
  MOD_RES (2228)..(2228): Selenocysteine
  MOD_RES (2232)..(2232): Selenocysteine
  MOD_RES (2238)..(2238): Selenocysteine
  MOD_RES (2241)..(2241): Selenocysteine
  MOD_RES (2244)..(2244): Selenocysteine
  MOD_RES (2252)..(2254): Selenocysteine
  MOD_RES (2257)..(2258): Selenocysteine
  MOD_RES (2260)..(2261): Selenocysteine
  MOD_RES (2263)..(2263): Selenocysteine
  MOD_RES (2266)..(2266): Selenocysteine
  MOD_RES (2268)..(2269): Selenocysteine
  MOD_RES (2273)..(2274): Selenocysteine
  MOD_RES (2276)..(2277): Selenocysteine
  MOD_RES (2281)..(2281): Selenocysteine
  MOD_RES (2284)..(2285): Selenocysteine
  MOD_RES (2289)..(2290): Selenocysteine
  MOD_RES (2292)..(2293): Selenocysteine
  MOD_RES (2300)..(2301): Selenocysteine
  MOD_RES (2307)..(2307): Selenocysteine
  MOD_RES (2313)..(2314): Selenocysteine
  MOD_RES (2316)..(2316): Selenocysteine
  MOD_RES (2321)..(2322): Selenocysteine
  MOD_RES (2325)..(2325): Selenocysteine
  MOD_RES (2329)..(2330): Selenocysteine
  MOD_RES (2332)..(2333): Selenocysteine
  MOD_RES (2337)..(2337): Selenocysteine
  MOD_RES (2340)..(2341): Selenocysteine
  MOD_RES (2346)..(2347): Selenocysteine
  MOD_RES (2353)..(2354): Selenocysteine
  MOD_RES (2357)..(2357): Selenocysteine
  MOD_RES (2361)..(2362): Selenocysteine
  MOD_RES (2364)..(2365): Selenocysteine
  MOD_RES (2369)..(2370): Selenocysteine
  MOD_RES (2372)..(2373): Selenocysteine
  MOD_RES (2377)..(2377): Selenocysteine
  MOD_RES (2380)..(2381): Selenocysteine
  MOD_RES (2384)..(2386): Selenocysteine
  MOD_RES (2394)..(2395): Selenocysteine
  MOD_RES (2401)..(2402): Selenocysteine
  MOD_RES (2404)..(2405): Selenocysteine
  MOD_RES (2408)..(2410): Selenocysteine
  MOD_RES (2412)..(2413): Selenocysteine
  MOD_RES (2417)..(2418): Selenocysteine
  MOD_RES (2420)..(2421): Selenocysteine
  MOD_RES (2425)..(2425): Selenocysteine
  MOD_RES (2428)..(2429): Selenocysteine
  MOD_RES (2434)..(2434): Selenocysteine
  MOD_RES (2436)..(2437): Selenocysteine
  MOD_RES (2441)..(2442): Selenocysteine
  MOD_RES (2444)..(2445): Selenocysteine
  MOD_RES (2450)..(2451): Selenocysteine
  MOD_RES (2457)..(2458): Selenocysteine
  MOD_RES (2460)..(2461): Selenocysteine
  MOD_RES (2465)..(2466): Selenocysteine
  MOD_RES (2468)..(2469): Selenocysteine
  MOD_RES (2476)..(2477): Selenocysteine
  MOD_RES (2481)..(2482): Selenocysteine
  MOD_RES (2484)..(2485): Selenocysteine
  MOD_RES (2490)..(2491): Selenocysteine
  MOD_RES (2497)..(2498): Selenocysteine
  MOD_RES (2500)..(2501): Selenocysteine
  MOD_RES (2505)..(2506): Selenocysteine
  MOD_RES (2508)..(2509): Selenocysteine
  MOD_RES (2513)..(2514): Selenocysteine
  MOD_RES (2516)..(2517): Selenocysteine
  MOD_RES (2521)..(2522): Selenocysteine
  MOD_RES (2524)..(2525): Selenocysteine
  MOD_RES (2530)..(2531): Selenocysteine
  MOD_RES (2537)..(2538): Selenocysteine
  MOD_RES (2540)..(2541): Selenocysteine
  MOD_RES (2545)..(2546): Selenocysteine
  MOD_RES (2548)..(2549): Selenocysteine
  MOD_RES (2556)..(2557): Selenocysteine
  MOD_RES (2560)..(2562): Selenocysteine
  MOD_RES (2564)..(2565): Selenocysteine
  MOD_RES (2570)..(2571): Selenocysteine
  MOD_RES (2577)..(2578): Selenocysteine
  MOD_RES (2580)..(2581): Selenocysteine
  MOD_RES (2585)..(2586): Selenocysteine
  MOD_RES (2588)..(2589): Selenocysteine
  MOD_RES (2594)..(2595): Selenocysteine
  MOD_RES (2601)..(2602): Selenocysteine
  MOD_RES (2605)..(2605): Selenocysteine
  MOD_RES (2609)..(2610): Selenocysteine
  MOD_RES (2612)..(2612): Selenocysteine
  MOD_RES (2620)..(2621): Selenocysteine
  MOD_RES (2624)..(2626): Selenocysteine
  MOD_RES (2634)..(2635): Selenocysteine
  MOD_RES (2641)..(2641): Selenocysteine
  MOD_RES (2644)..(2645): Selenocysteine
  MOD_RES (2649)..(2650): Selenocysteine
  MOD_RES (2652)..(2653): Selenocysteine
  MOD_RES (2658)..(2659): Selenocysteine
  MOD_RES (2665)..(2666): Selenocysteine
  MOD_RES (2668)..(2668): Selenocysteine
  MOD_RES (2673)..(2674): Selenocysteine
  MOD_RES (2676)..(2677): Selenocysteine
  MOD_RES (2681)..(2682): Selenocysteine
  MOD_RES (2684)..(2685): Selenocysteine
  MOD_RES (2689)..(2690): Selenocysteine
  MOD_RES (2692)..(2693): Selenocysteine
  MOD_RES (2698)..(2699): Selenocysteine
  MOD_RES (2705)..(2706): Selenocysteine
  MOD_RES (2708)..(2709): Selenocysteine
  MOD_RES (2713)..(2714): Selenocysteine
  MOD_RES (2716)..(2717): Selenocysteine
  MOD_RES (2721)..(2722): Selenocysteine
  MOD_RES (2724)..(2724): Selenocysteine
  MOD_RES (2729)..(2730): Selenocysteine
  MOD_RES (2732)..(2733): Selenocysteine
  MOD_RES (2736)..(2738): Selenocysteine
  MOD_RES (2740)..(2741): Selenocysteine
  MOD_RES (2745)..(2745): Selenocysteine
  MOD_RES (2749)..(2749): Selenocysteine
  MOD_RES (2753)..(2754): Selenocysteine
  MOD_RES (2756)..(2756): Selenocysteine
  MOD_RES (2761)..(2762): Selenocysteine
  MOD_RES (2764)..(2765): Selenocysteine
  MOD_RES (2768)..(2770): Selenocysteine
  MOD_RES (2772)..(2773): Selenocysteine
  MOD_RES (2776)..(2778): Selenocysteine
  MOD_RES (2780)..(2780): Selenocysteine
  MOD_RES (2785)..(2786): Selenocysteine
  MOD_RES (2788)..(2789): Selenocysteine
  MOD_RES (2793)..(2794): Selenocysteine
  MOD_RES (2796)..(2797): Selenocysteine
  MOD_RES (2799)..(2800): Selenocysteine
  MOD_RES (2802)..(2802): Selenocysteine
  MOD_RES (2804)..(2805): Selenocysteine
  MOD_RES (2812)..(2813): Selenocysteine
  MOD_RES (2815)..(2815): Selenocysteine
  MOD_RES (2818)..(2818): Selenocysteine
  MOD_RES (2820)..(2821): Selenocysteine
  MOD_RES (2825)..(2826): Selenocysteine
  MOD_RES (2828)..(2829): Selenocysteine
  MOD_RES (2834)..(2835): Selenocysteine
  MOD_RES (2841)..(2842): Selenocysteine
  MOD_RES (2844)..(2845): Selenocysteine
  MOD_RES (2849)..(2850): Selenocysteine
  MOD_RES (2852)..(2853): Selenocysteine
  MOD_RES (2857)..(2858): Selenocysteine
  MOD_RES (2860)..(2861): Selenocysteine
  MOD_RES (2865)..(2865): Selenocysteine
  MOD_RES (2868)..(2869): Selenocysteine
  MOD_RES (2871)..(2871): Selenocysteine
  MOD_RES (2873)..(2874): Selenocysteine
  MOD_RES (2876)..(2877): Selenocysteine
  MOD_RES (2882)..(2883): Selenocysteine
  MOD_RES (2889)..(2890): Selenocysteine
  MOD_RES (2892)..(2893): Selenocysteine
  MOD_RES (2897)..(2898): Selenocysteine
  MOD_RES (2900)..(2901): Selenocysteine
  MOD_RES (2905)..(2906): Selenocysteine
  MOD_RES (2908)..(2909): Selenocysteine
  MOD_RES (2913)..(2914): Selenocysteine
  MOD_RES (2916)..(2917): Selenocysteine
  MOD_RES (2921)..(2921): Selenocysteine
  MOD_RES (2924)..(2925): Selenocysteine
  MOD_RES (2928)..(2930): Selenocysteine
  MOD_RES (2932)..(2932): Selenocysteine
  MOD_RES (2937)..(2938): Selenocysteine
  MOD_RES (2940)..(2941): Selenocysteine
  MOD_RES (2946)..(2947): Selenocysteine
  MOD_RES (2953)..(2954): Selenocysteine
  MOD_RES (2956)..(2956): Selenocysteine
  MOD_RES (2961)..(2962): Selenocysteine
  MOD_RES (2964)..(2965): Selenocysteine
  MOD_RES (2969)..(2970): Selenocysteine
  MOD_RES (2972)..(2973): Selenocysteine
  MOD_RES (2978)..(2979): Selenocysteine
  MOD_RES (2985)..(2986): Selenocysteine
  MOD_RES (2988)..(2989): Selenocysteine
  MOD_RES (2993)..(2994): Selenocysteine
  MOD_RES (2996)..(2997): Selenocysteine
  MOD_RES (3001)..(3002): Selenocysteine
  MOD_RES (3004)..(3004): Selenocysteine
  MOD_RES (3009)..(3010): Selenocysteine
  MOD_RES (3012)..(3012): Selenocysteine
  MOD_RES (3017)..(3018): Selenocysteine
  MOD_RES (3020)..(3021): Selenocysteine
  MOD_RES (3025)..(3026): Selenocysteine
  MOD_RES (3028)..(3029): Selenocysteine
  MOD_RES (3033)..(3034): Selenocysteine
  MOD_RES (3036)..(3037): Selenocysteine
  MOD_RES (3039)..(3039): Selenocysteine
  MOD_RES (3041)..(3041): Selenocysteine
  MOD_RES (3044)..(3045): Selenocysteine
  MOD_RES (3050)..(3050): Selenocysteine
  MOD_RES (3052)..(3053): Selenocysteine
  MOD_RES (3057)..(3058): Selenocysteine
  MOD_RES (3061)..(3061): Selenocysteine
  MOD_RES (3066)..(3067): Selenocysteine
  MOD_RES (3073)..(3074): Selenocysteine
  MOD_RES (3076)..(3077): Selenocysteine
  MOD_RES (3081)..(3082): Selenocysteine
  MOD_RES (3084)..(3085): Selenocysteine
  MOD_RES (3089)..(3090): Selenocysteine
  MOD_RES (3092)..(3092): Selenocysteine
  MOD_RES (3097)..(3098): Selenocysteine
  MOD_RES (3100)..(3101): Selenocysteine
  MOD_RES (3105)..(3106): Selenocysteine
  MOD_RES (3108)..(3109): Selenocysteine
  MOD_RES (3113)..(3113): Selenocysteine
  MOD_RES (3117)..(3117): Selenocysteine
  MOD_RES (3122)..(3123): Selenocysteine
  MOD_RES (3129)..(3130): Selenocysteine
  MOD_RES (3132)..(3133): Selenocysteine
  MOD_RES (3137)..(3138): Selenocysteine
  MOD_RES (3140)..(3141): Selenocysteine
  MOD_RES (3145)..(3145): Selenocysteine
  MOD_RES (3149)..(3149): Selenocysteine
  MOD_RES (3154)..(3155): Selenocysteine
  MOD_RES (3161)..(3162): Selenocysteine
  MOD_RES (3164)..(3164): Selenocysteine
  MOD_RES (3170)..(3170): Selenocysteine
  MOD_RES (3172)..(3173): Selenocysteine
  MOD_RES (3177)..(3178): Selenocysteine
  MOD_RES (3180)..(3181): Selenocysteine
  MOD_RES (3186)..(3187): Selenocysteine
  MOD_RES (3193)..(3194): Selenocysteine
  MOD_RES (3196)..(3196): Selenocysteine
  MOD_RES (3202)..(3202): Selenocysteine
  MOD_RES (3204)..(3204): Selenocysteine
  MOD_RES (3212)..(3213): Selenocysteine
  MOD_RES (3219)..(3219): Selenocysteine
  MOD_RES (3227)..(3227): Selenocysteine
  MOD_RES (3229)..(3229): Selenocysteine
  MOD_RES (3248)..(3248): Selenocysteine
  MOD_RES (3267)..(3267): Selenocysteine
  MOD_RES (3322)..(3322): Selenocysteine
  MOD_RES (3329)..(3329): Selenocysteine
  MOD_RES (3331)..(3331): Selenocysteine
  MOD_RES (3334)..(3334): Selenocysteine
  MOD_RES (3338)..(3338): Selenocysteine
  MOD_RES (3344)..(3344): Selenocysteine
  MOD_RES (3347)..(3347): Selenocysteine
  MOD_RES (3350)..(3350): Selenocysteine
  MOD_RES (3358)..(3360): Selenocysteine
  MOD_RES (3363)..(3364): Selenocysteine
  MOD_RES (3366)..(3367): Selenocysteine
  MOD_RES (3369)..(3369): Selenocysteine
  MOD_RES (3372)..(3372): Selenocysteine
  MOD_RES (3374)..(3375): Selenocysteine
  MOD_RES (3379)..(3380): Selenocysteine
  MOD_RES (3382)..(3383): Selenocysteine
  MOD_RES (3387)..(3388): Selenocysteine
  MOD_RES (3390)..(3391): Selenocysteine
  MOD_RES (3395)..(3396): Selenocysteine
  MOD_RES (3398)..(3399): Selenocysteine
  MOD_RES (3401)..(3401): Selenocysteine
  MOD_RES (3404)..(3404): Selenocysteine
  MOD_RES (3411)..(3411): Selenocysteine
  MOD_RES (3414)..(3415): Selenocysteine
  MOD_RES (3419)..(3419): Selenocysteine
  MOD_RES (3422)..(3422): Selenocysteine
  MOD_RES (3427)..(3428): Selenocysteine
  MOD_RES (3435)..(3436): Selenocysteine
  MOD_RES (3438)..(3439): Selenocysteine
  MOD_RES (3443)..(3444): Selenocysteine
  MOD_RES (3446)..(3447): Selenocysteine
  MOD_RES (3450)..(3452): Selenocysteine
  MOD_RES (3454)..(3455): Selenocysteine
  MOD_RES (3459)..(3459): Selenocysteine
  MOD_RES (3462)..(3463): Selenocysteine
  MOD_RES (3465)..(3465): Selenocysteine
  MOD_RES (3468)..(3468): Selenocysteine
  MOD_RES (3471)..(3471): Selenocysteine
  MOD_RES (3475)..(3475): Selenocysteine
  MOD_RES (3478)..(3479): Selenocysteine
  MOD_RES (3484)..(3485): Selenocysteine
  MOD_RES (3490)..(3492): Selenocysteine
  MOD_RES (3494)..(3494): Selenocysteine
  MOD_RES (3500)..(3500): Selenocysteine
  MOD_RES (3502)..(3502): Selenocysteine
  MOD_RES (3510)..(3511): Selenocysteine
  MOD_RES (3517)..(3517): Selenocysteine
  MOD_RES (3525)..(3525): Selenocysteine
  MOD_RES (3527)..(3527): Selenocysteine
  MOD_RES (3546)..(3546): Selenocysteine
  MOD_RES (3565)..(3565): Selenocysteine
  MOD_RES (3620)..(3620): Selenocysteine
  MOD_RES (3627)..(3627): Selenocysteine
  MOD_RES (3629)..(3629): Selenocysteine
  MOD_RES (3632)..(3632): Selenocysteine
  MOD_RES (3636)..(3636): Selenocysteine
  MOD_RES (3642)..(3642): Selenocysteine
  MOD_RES (3645)..(3645): Selenocysteine
  MOD_RES (3648)..(3648): Selenocysteine
  MOD_RES (3656)..(3658): Selenocysteine
  MOD_RES (3661)..(3661): Selenocysteine
  MOD_RES (3665)..(3665): Selenocysteine
  MOD_RES (3667)..(3668): Selenocysteine
  MOD_RES (3670)..(3670): Selenocysteine
  MOD_RES (3672)..(3673): Selenocysteine
  MOD_RES (3677)..(3678): Selenocysteine
  MOD_RES (3680)..(3681): Selenocysteine
  MOD_RES (3688)..(3689): Selenocysteine
  MOD_RES (3693)..(3694): Selenocysteine
  MOD_RES (3696)..(3697): Selenocysteine
  MOD_RES (3701)..(3702): Selenocysteine
  MOD_RES (3704)..(3705): Selenocysteine
  MOD_RES (3709)..(3710): Selenocysteine
  MOD_RES (3712)..(3713): Selenocysteine
  MOD_RES (3715)..(3715): Selenocysteine
  MOD_RES (3718)..(3720): Selenocysteine
  MOD_RES (3725)..(3725): Selenocysteine
  MOD_RES (3728)..(3729): Selenocysteine
  MOD_RES (3733)..(3734): Selenocysteine
  MOD_RES (3736)..(3736): Selenocysteine
  MOD_RES (3741)..(3742): Selenocysteine
  MOD_RES (3744)..(3744): Selenocysteine
  MOD_RES (3749)..(3750): Selenocysteine
  MOD_RES (3752)..(3753): Selenocysteine
  MOD_RES (3757)..(3757): Selenocysteine
  MOD_RES (3760)..(3761): Selenocysteine
  MOD_RES (3765)..(3765): Selenocysteine
  MOD_RES (3767)..(3767): Selenocysteine
  MOD_RES (3772)..(3773): Selenocysteine
  MOD_RES (3775)..(3776): Selenocysteine
  MOD_RES (3780)..(3781): Selenocysteine
  MOD_RES (3783)..(3784): Selenocysteine
  MOD_RES (3789)..(3789): Selenocysteine
  MOD_RES (3791)..(3791): Selenocysteine
  MOD_RES (3796)..(3797): Selenocysteine
  MOD_RES (3799)..(3800): Selenocysteine
  MOD_RES (3802)..(3802): Selenocysteine
  MOD_RES (3805)..(3805): Selenocysteine
  MOD_RES (3807)..(3807): Selenocysteine
  MOD_RES (3812)..(3813): Selenocysteine
  MOD_RES (3815)..(3816): Selenocysteine
  MOD_RES (3818)..(3818): Selenocysteine
  MOD_RES (3821)..(3821): Selenocysteine
  MOD_RES (3823)..(3824): Selenocysteine
  MOD_RES (3828)..(3829): Selenocysteine
  MOD_RES (3831)..(3832): Selenocysteine
  MOD_RES (3836)..(3837): Selenocysteine
  MOD_RES (3839)..(3840): Selenocysteine
  MOD_RES (3844)..(3845): Selenocysteine
  MOD_RES (3847)..(3848): Selenocysteine
  MOD_RES (3850)..(3850): Selenocysteine
  MOD_RES (3853)..(3853): Selenocysteine
  MOD_RES (3860)..(3860): Selenocysteine
  MOD_RES (3863)..(3864): Selenocysteine
  MOD_RES (3868)..(3868): Selenocysteine
  MOD_RES (3871)..(3871): Selenocysteine
  MOD_RES (3876)..(3877): Selenocysteine
  MOD_RES (3879)..(3880): Selenocysteine
  MOD_RES (3884)..(3885): Selenocysteine
  MOD_RES (3887)..(3888): Selenocysteine
  MOD_RES (3892)..(3892): Selenocysteine
  MOD_RES (3895)..(3895): Selenocysteine
  MOD_RES (3898)..(3898): Selenocysteine
  MOD_RES (3901)..(3901): Selenocysteine
  MOD_RES (3904)..(3904): Selenocysteine
  MOD_RES (3908)..(3908): Selenocysteine
  MOD_RES (3911)..(3912): Selenocysteine
  MOD_RES (3917)..(3918): Selenocysteine
  MOD_RES (3924)..(3925): Selenocysteine
  MOD_RES (3927)..(3927): Selenocysteine
  MOD_RES (3933)..(3933): Selenocysteine
  MOD_RES (3935)..(3935): Selenocysteine
  MOD_RES (3943)..(3944): Selenocysteine
  MOD_RES (3950)..(3950): Selenocysteine
  MOD_RES (3958)..(3958): Selenocysteine
  MOD_RES (3960)..(3960): Selenocysteine
  MOD_RES (3979)..(3979): Selenocysteine
  MOD_RES (3998)..(3998): Selenocysteine
  MOD_RES (4053)..(4053): Selenocysteine
  MOD_RES (4060)..(4060): Selenocysteine
  MOD_RES (4062)..(4062): Selenocysteine
  MOD_RES (4065)..(4065): Selenocysteine
  MOD_RES (4069)..(4069): Selenocysteine
  MOD_RES (4075)..(4075): Selenocysteine
  MOD_RES (4078)..(4078): Selenocysteine
  MOD_RES (4081)..(4081): Selenocysteine
  MOD_RES (4089)..(4091): Selenocysteine
  MOD_RES (4094)..(4095): Selenocysteine
  MOD_RES (4097)..(4098): Selenocysteine
  MOD_RES (4100)..(4100): Selenocysteine
  MOD_RES (4103)..(4103): Selenocysteine
  MOD_RES (4105)..(4106): Selenocysteine
  MOD_RES (4110)..(4111): Selenocysteine
  MOD_RES (4113)..(4113): Selenocysteine
  MOD_RES (4118)..(4118): Selenocysteine
  MOD_RES (4121)..(4122): Selenocysteine
  MOD_RES (4126)..(4127): Selenocysteine
  MOD_RES (4129)..(4130): Selenocysteine
  MOD_RES (4134)..(4135): Selenocysteine
  MOD_RES (4137)..(4138): Selenocysteine
  MOD_RES (4142)..(4142): Selenocysteine
  MOD_RES (4145)..(4146): Selenocysteine
  MOD_RES (4150)..(4151): Selenocysteine
  MOD_RES (4153)..(4154): Selenocysteine
  MOD_RES (4158)..(4159): Selenocysteine
  MOD_RES (4161)..(4162): Selenocysteine
  MOD_RES (4166)..(4167): Selenocysteine
  MOD_RES (4169)..(4169): Selenocysteine
  MOD_RES (4174)..(4175): Selenocysteine
  MOD_RES (4177)..(4177): Selenocysteine
  MOD_RES (4182)..(4183): Selenocysteine
  MOD_RES (4185)..(4185): Selenocysteine
  MOD_RES (4190)..(4191): Selenocysteine
  MOD_RES (4193)..(4193): Selenocysteine
  MOD_RES (4198)..(4198): Selenocysteine
  MOD_RES (4201)..(4202): Selenocysteine
  MOD_RES (4204)..(4204): Selenocysteine
  MOD_RES (4207)..(4207): Selenocysteine
  MOD_RES (4210)..(4210): Selenocysteine
  MOD_RES (4214)..(4214): Selenocysteine
  MOD_RES (4217)..(4218): Selenocysteine
  MOD_RES (4223)..(4224): Selenocysteine
  MOD_RES (4230)..(4231): Selenocysteine
  MOD_RES (4233)..(4234): Selenocysteine
  MOD_RES (4238)..(4239): Selenocysteine
  MOD_RES (4241)..(4242): Selenocysteine
  MOD_RES (4246)..(4247): Selenocysteine
  MOD_RES (4249)..(4250): Selenocysteine
  MOD_RES (4255)..(4256): Selenocysteine
  MOD_RES (4263)..(4263): Selenocysteine
  MOD_RES (4265)..(4266): Selenocysteine
  MOD_RES (4270)..(4271): Selenocysteine
  MOD_RES (4273)..(4274): Selenocysteine
  MOD_RES (4278)..(4279): Selenocysteine
  MOD_RES (4281)..(4282): Selenocysteine
  MOD_RES (4286)..(4286): Selenocysteine
  MOD_RES (4290)..(4290): Selenocysteine
  MOD_RES (4295)..(4296): Selenocysteine
  MOD_RES (4302)..(4303): Selenocysteine
  MOD_RES (4305)..(4306): Selenocysteine
  MOD_RES (4310)..(4311): Selenocysteine
  MOD_RES (4313)..(4314): Selenocysteine
  MOD_RES (4319)..(4320): Selenocysteine
  MOD_RES (4326)..(4327): Selenocysteine
  MOD_RES (4329)..(4330): Selenocysteine
  MOD_RES (4335)..(4335): Selenocysteine
  MOD_RES (4337)..(4338): Selenocysteine
  MOD_RES (4344)..(4344): Selenocysteine
  MOD_RES (4350)..(4351): Selenocysteine
  MOD_RES (4353)..(4354): Selenocysteine
  MOD_RES (4358)..(4359): Selenocysteine
  MOD_RES (4361)..(4362): Selenocysteine
  MOD_RES (4366)..(4366): Selenocysteine
  MOD_RES (4369)..(4370): Selenocysteine
  MOD_RES (4375)..(4376): Selenocysteine
  MOD_RES (4382)..(4383): Selenocysteine
  MOD_RES (4385)..(4386): Selenocysteine
  MOD_RES (4390)..(4391): Selenocysteine
  MOD_RES (4393)..(4394): Selenocysteine
  MOD_RES (4398)..(4398): Selenocysteine
  MOD_RES (4401)..(4402): Selenocysteine
  MOD_RES (4408)..(4408): Selenocysteine
  MOD_RES (4414)..(4415): Selenocysteine
  MOD_RES (4417)..(4418): Selenocysteine
  MOD_RES (4422)..(4423): Selenocysteine
  MOD_RES (4425)..(4426): Selenocysteine
  MOD_RES (4430)..(4430): Selenocysteine
  MOD_RES (4433)..(4434): Selenocysteine
  MOD_RES (4439)..(4440): Selenocysteine
  MOD_RES (4446)..(4447): Selenocysteine
  MOD_RES (4449)..(4450): Selenocysteine
  MOD_RES (4454)..(4455): Selenocysteine
  MOD_RES (4457)..(4457): Selenocysteine
  MOD_RES (4462)..(4463): Selenocysteine
  MOD_RES (4465)..(4466): Selenocysteine
  MOD_RES (4471)..(4471): Selenocysteine
  MOD_RES (4474)..(4474): Selenocysteine
  MOD_RES (4479)..(4480): Selenocysteine
  MOD_RES (4486)..(4487): Selenocysteine
  MOD_RES (4489)..(4490): Selenocysteine
  MOD_RES (4494)..(4495): Selenocysteine
  MOD_RES (4497)..(4498): Selenocysteine
  MOD_RES (4502)..(4502): Selenocysteine
  MOD_RES (4505)..(4506): Selenocysteine
  MOD_RES (4511)..(4512): Selenocysteine
  MOD_RES (4518)..(4519): Selenocysteine
  MOD_RES (4521)..(4522): Selenocysteine
  MOD_RES (4526)..(4527): Selenocysteine
  MOD_RES (4529)..(4530): Selenocysteine
  MOD_RES (4534)..(4534): Selenocysteine
  MOD_RES (4537)..(4538): Selenocysteine
  MOD_RES (4543)..(4543): Selenocysteine
  MOD_RES (4550)..(4551): Selenocysteine
  MOD_RES (4553)..(4554): Selenocysteine
  MOD_RES (4558)..(4559): Selenocysteine
  MOD_RES (4561)..(4562): Selenocysteine
  MOD_RES (4567)..(4568): Selenocysteine
  MOD_RES (4574)..(4575): Selenocysteine
  MOD_RES (4577)..(4578): Selenocysteine
  MOD_RES (4582)..(4583): Selenocysteine
  MOD_RES (4585)..(4586): Selenocysteine
  MOD_RES (4591)..(4592): Selenocysteine
  MOD_RES (4598)..(4599): Selenocysteine
  MOD_RES (4601)..(4602): Selenocysteine
  MOD_RES (4607)..(4607): Selenocysteine
  MOD_RES (4609)..(4609): Selenocysteine
  MOD_RES (4617)..(4618): Selenocysteine
  MOD_RES (4624)..(4624): Selenocysteine
  MOD_RES (4634)..(4634): Selenocysteine
  MOD_RES (4653)..(4653): Selenocysteine
  MOD_RES (4672)..(4672): Selenocysteine
  MOD_RES (4727)..(4727): Selenocysteine
  MOD_RES (4734)..(4734): Selenocysteine
  MOD_RES (4737)..(4737): Selenocysteine
  MOD_RES (4741)..(4741): Selenocysteine
  MOD_RES (4744)..(4744): Selenocysteine
  MOD_RES (4753)..(4753): Selenocysteine
  MOD_RES (4763)..(4763): Selenocysteine
  MOD_RES (4779)..(4779): Selenocysteine
  MOD_RES (4781)..(4781): Selenocysteine
  MOD_RES (4796)..(4796): Selenocysteine
  MOD_RES (4829)..(4830): Selenocysteine
  MOD_RES (4837)..(4837): Selenocysteine
  MOD_RES (4843)..(4843): Selenocysteine
  MOD_RES (4848)..(4848): Selenocysteine
  MOD_RES (4864)..(4864): Selenocysteine
  MOD_RES (4867)..(4867): Selenocysteine
  MOD_RES (4874)..(4874): Selenocysteine
  MOD_RES (4887)..(4887): Selenocysteine
  MOD_RES (4895)..(4895): Selenocysteine
  MOD_RES (4931)..(4931): Selenocysteine
  MOD_RES (4935)..(4935): Selenocysteine
  MOD_RES (4938)..(4938): Selenocysteine
  MOD_RES (4944)..(4944): Selenocysteine
  MOD_RES (4991)..(4991): Selenocysteine
  MOD_RES (5000)..(5000): Selenocysteine
  MOD_RES (5031)..(5031): Selenocysteine
  MOD_RES (5059)..(5059): Selenocysteine
  MOD_RES (5065)..(5065): Selenocysteine
  MOD_RES (5067)..(5067): Selenocysteine
  MOD_RES (5076)..(5076): Selenocysteine
  MOD_RES (5080)..(5080): Selenocysteine
  MOD_RES (5108)..(5108): Selenocysteine
  MOD_RES (5110)..(5111): Selenocysteine
  MOD_RES (5115)..(5116): Selenocysteine
  MOD_RES (5120)..(5121): Selenocysteine
  MOD_RES (5125)..(5126): Selenocysteine
  MOD_RES (5130)..(5131): Selenocysteine
  MOD_RES (5135)..(5136): Selenocysteine
  MOD_RES (5160)..(5160): Selenocysteine
  MOD_RES (5179)..(5179): Selenocysteine
  MOD_RES (5208)..(5208): Selenocysteine
  MOD_RES (5215)..(5215): Selenocysteine
  MOD_RES (5251)..(5251): Selenocysteine
  MOD_RES (5261)..(5261): Selenocysteine
  MOD_RES (5265)..(5265): Selenocysteine
  MOD_RES (5273)..(5273): Selenocysteine
  MOD_RES (5291)..(5291): Selenocysteine
  MOD_RES (5300)..(5300): Selenocysteine
  MOD_RES (5305)..(5305): Selenocysteine
  MOD_RES (5307)..(5307): Selenocysteine
  MOD_RES (5309)..(5309): Selenocysteine
  MOD_RES (5348)..(5348): Selenocysteine
  MOD_RES (5366)..(5366): Selenocysteine
  MOD_RES (5381)..(5381): Selenocysteine
  MOD_RES (5388)..(5388): Selenocysteine
  MOD_RES (5403)..(5403): Selenocysteine
  MOD_RES (5423)..(5423): Selenocysteine
  MOD_RES (5428)..(5428): Selenocysteine
  MOD_RES (5446)..(5446): Selenocysteine
  MOD_RES (5454)..(5454): Selenocysteine
  MOD_RES (5456)..(5456): Selenocysteine
  MOD_RES (5469)..(5469): Selenocysteine
  MOD_RES (5479)..(5479): Selenocysteine
  MOD_RES (5493)..(5494): Selenocysteine
  MOD_RES (5531)..(5531): Selenocysteine
  MOD_RES (5574)..(5574): Selenocysteine
  MOD_RES (5587)..(5587): Selenocysteine
  MOD_RES (5593)..(5593): Selenocysteine
  MOD_RES (5597)..(5597): Selenocysteine
  MOD_RES (5607)..(5607): Selenocysteine
  MOD_RES (5625)..(5625): Selenocysteine
MSVGRRKLALLWALALALACXRHXGHAQDGSSESSYKHHPALSPIARGPSGVPLRGAXVFPSLRXIPVVRASNPAHNGRVCSXWGSFHYKXFDGDVFRFPGLCNYVFSEHCGAAYEDFNIQLRRSQESAAPXLSRVLMKVDGVVIQLXKGSVLVNGHPVLLPFSQSGVLIQQSSSYXKVEARLGLVLMWNHDDSLLLELDXKYANKXCGLCGDFNGMPVVSELLSHNXKLXPMEFGNLQKMDDPXDQCQDPVPEPPRNCSXGFGICEELLHGQLFSGCVALVDVGSYLEACRQDLCFCEDXDLLSCVCHXLAEYSRQCXHAGGLPQDWRGPDFCPQKCPNNMQYHECRSPCADXCSNQEHSRACEDHCVAGCFCPEGXVLDDIGQXGCVPVSKCACVYNGAAYAPGAXYSXDCXNCXCSGGRWSCQEVPCPGXCSVLGGAHFSXFDGKQYXVHGDCSYVLXKPCDSSAFXVLAELRRCGLXDSEXCLKSVXLSLDGAQXVVVIKASGEVFLNQIYXQLPISAANVXIFRPSXFFIIAQXSLGLQLNLQLVPXMQLFMQLAPKLRGQXCGLCGNFNSIQADDFRXLSGVVEAXAAAFFNXFKXQAACPNIRNSFEDPCSLSVENEKYAQHWCSQLXDADGPFGRCHAAVKPGXYYSNCMFDXCNCERSEDCLCAALSSYVHACAAKGVQLGGWRDGVCXKPMXXCPKSMXYHYHVSXCQPXCRSLSEGDIXCSVGFIPVDGCICPKGXFLDDXGKCVQASNCPCYHRGSMIPNGESVHDSGAICXCXHGKLSCIGGQAPAPVCAAPMVFFDCRNAXPGDXGAGCQKSCHXLDMXCYSPQCVPGCVCPDGLVADGEGGCIXAEDCPCVHNEASYRAGQXIRVGCNXCXCDSRMWRCXDDPCLAXCAVYGDGHYLXFDGQSYSFNGDCEYXLVQNHCGGKDSXQDSFRVVXENVPCGXXGXXCSKAIKIFLGGFELKLSHGKVEVIGXDESQEVPYXIRQMGIYLVVDXDIGLVLLWDKKXSIFINLSPEFKGRVCGLCGNFDDIAVNDFAXRSRSVVGDVLEFGNSWKLSPSCPDALAPKDPCXANPFRKSWAQKQCSILHGPXFAACHAHVEPARYYEACVNDACACDSGGDCECFCXAVAAYAQACHEVGLCVSWRXPSICPLFCDYYNPEGQCEWHYQPCGVPCLRXCRNPRGDCLRDVRGLEGCYPKCPPEAPIFDEDKMQCVAXCPXPPLPPRCHVHGKSYRPGAVVPSDKNCQSCLCXERGVECXYKAEACVCXYNGQRFHPGDVIYHXXDGXGGCISARCGANGXIERRVYPCSPXXPVPPXXFSFSXPPLVVSSXHXPSNGPSSAHXGPPSSAWPXXAGXSPRXRLPXASASLPPVCGEKCLWSPWMDVSRPGRGXDSGDFDXLENLRAHGYRVCESPRSVECRAEDAPGVPLRALGQRVQCSPDVGLXCRNREQASGLCYNYQIRVQCCXPLPCSXSSSPAQXXPPXXSKXXEXRASGSSAPSSXPGXVSLSXARXXPAPGXAXSVKKXFSXPSPPPVPAXSXSSMSXXAPGXSVVSSKPXPXEPSXSSCLQELCXWXEWIDGSYPAPGINGGDFDXFQNLRDEGYXFCESPRSVQCRAESFPNXPLADLGQDVICSHXEGLICLNKNQLPPICYNYEIRIQCCEXVNVCRDIXRLPKXVAXXRPXPHPXGAQXQXXFXXHMPSASXEQPXAXSRGGPXAXSVXQGXHXXLVXRNCHPRCXWXKWFDVDFPSPGPHGGDKEXYNNIIRSGEKICRRPEEIXRLQCRAKSHPEVSIEHLGQVVQCSREEGLVCRNQDQQGPFKMCLNYEVRVLCCEXPRGCHMXSXPGSXSSSPAQXXPSXXSKXXEXQASGSSAPSSXPGXVSLSXARXXPAPGXAXSVKKXFSXPSPPPVPAXSXSSMSXXAPGXSVVSSKPXPXEPSXSSCLQELCXWXEWIDGSYPAPGINGGDFDXFQNLRDEGYXFCESPRSVQCRAESFPNXPLADLGQDVICSHXEGLICLNKNQLPPICYNYEIRIQCCEXVNVCRDIXRPPKXVAXXRPXPHPXGAQXQXXFXXHMPSASXEQPXAXSRGGPXAXSVXQGXHXXPVXRNCHPRCXWXXWFDVDFPSPGPHGGDKEXYNNIIRSGEKICRRPEEIXRLQCRAKSHPEVSIEHLGQVVQCSREEGLVCRNQDQQGPFKMCLNYEVRVLCCEXPKGCPVXSXPVXAPSXPSGRAXSPXQSXSSWQKSRXXXLVXXSXXSXPQXSXXYAHXXSXXSAPXARXXSAPXXRXXSASPASXXSGPGNXPSPVPXXSXISAPXXSIXSAPXXSXXSAPXSSXXSGPGXXPSPVPXXSIXSAPXXSXXSAPXXSXXSARXSSXXSAXXXSRISGPEXXPSPVPXXSXXSAXXXSXXSAPXXSXXSAPXSSXXSSPQXSXXSAPXXSXXSGPGXXPSPVPXXSXXSAPXXRXXSAPKSSXXSAAXXSXXSGPEXXPRPVPXXSXXSSPXXSXXSAPXXSXXSASXXSXXSGAGXXPSPVPXXSXXSAPXXSXXSAPISSXXSAXXXSXXSGPGXXPSPVPXXSXXSAPXXSXXSGPGXXPSAVPXXSIXSAPXXSXNSAPISSXXSAXXXSRISGPEXXPSPVPXASXXSASXXSXXSGPGXXPSPVPXXSXISVPXXSXXSASXXSXXSASXXSXXSGPGXXPSPVPXXSXXSAPXXSXXSAPXXSXISAPXXSXXSAXXXSXXSAPXPRRXSAPXXSXISASXXSXXSAXXXSXXSAXXXSXISAPXXSXXLSPXXSXXSXXIXSXXSAPISSXXSXPQXSXXSAPXXSXXSGPGXXSSPVPXXSXXSAPXXSXXSAPXXRXXSVPXSSXXSXAXXSXXSGPGXXPSPVPXXSXXSAPXXRXXSAPXXSXXSAPXXSXXSAPXSSXXSAXXXSXISVPXXSXXSVPGXXPSPVPXXSXISVPXXSXXSASXXSXXSGPGXXPSPVPXXSXXSAPXXSXXSAPXXSXISAPXXSXPSAPXXSXXLAPXXSXXSAPXXSXXSXPXSSXXSSPQXSXXSASXXSIXSGPGXXPSPVPXXSXXSAPXXSXXSAAXXSXISAPXXSXXSAPXXSXXSASXASKXSGLGXXPSPIPXXSXXSPPXXSXXSASXASKXSGPGXXPSPVPXXSXIFAPRXSXXSASXXSXXPGPGXXPSPVPXXSXASVSKXSXSHVSISKXXHSQPVXRDCHLRCXWXKWFDIDFPSPGPHGGDKEXYNNIIRSGEKICRRPEEIXRLQCRAESHPEVSIEHLGQVVQCSREEGLVCRNQDQQGPFKMCLNYEVRVLCCEXPKGCPVXSXPVXAPSXPSGRAXSPXQSXSSWQKSRXXXLVXXSXXSXPQXSXXSAPXXSXXSAPXXSXXSAPXXSXXSXPQXSISSAPXSSXXSAPXSSXISARXXSIISAPXXSXXSSPXXSXXSAXXXSXXSAPXSSXXSXPQXSKXSAAXSSXXSGSGXXPSPVXXXSXASVSKXSXSHVSVSKXXHSQPVXRDCHPRCXWXKWFDVDFPSPGPHGGDKEXYNNIIRSGEKICRRPEEIXRLQCRAKSHPEVSIEHLGQVVQCSREEGLVCRNQDQQGPFKMCLNYEVRVLCCEXPKGCPVXSXSVXAPSXPSGRAXSPXQSXSSWQKSRXXXLVXSSIXSXXQXSXXSAPXXSXXPASIPSXXSAPXXSXXSAPXXSXXSAPXXSXXSXPQXXXSSAPXSSXXSAPXXSXISAPXXSXISAPXXSXXSAPXASXXSAPXSXSSAPXXNXXSAPXXSXXSAPIXSXISAPXXSXXSXPQXSXISSPXXSXXSXPQXSXXSSPXXSXXSAPXXSXXSAPXXSXXSXPQXSISSAPXSSXXSAPXASXISAPXXSXXSFHXXSXXSPPXSSXSSXPQXSKXSAAXSSXXSGSGXXPSPVPXXSXASVSKXSXSHVSVSKXXHSQPVXRDCHPRCXWXKWFDVDFPSPGPHGGDKEXYNNIIRSGEKICRRPEEIXRLQCRAESHPEVSIEHLGQVVQCSREEGLVCRNQDQQGPFKMCLNYEVRVLCCEXPKGCPVXSXPVXAPSXPSGRAXSPXQSXSSWQKSRXXXLVXXSXXSXPQXSXXSAPXXSXIPASXPSXXSAPXXSXXSAPXXSXXSAPXHRXXSGPXXSXXLAPXXSXXSAPXXSXNSAPXXSXISASXXSXISAPXXSXISSPXSSXXSXPQXSKXSAAXSSXXSGSGXXPSPVPXXSXXSASXXSXXSAPXXSXXSGPGXXPSPVPSXSXXSAAXXSXXSAPXXRXXSAPXSSMXSGPGXXPSPVPXXSXXSAPXXSXXSGPGXXPSPVPXXSXXSAPIXSXXSGPGSXPSPVPXXSXXSAPXXSXXSASXASXXSGPGXXPSPVPXXSXXSAPXXRXXSASXASXXSGPGSXPSPVPXXSXXSAPXXRXXPASXASXXSGPGXXPSPVPXXSXXSASXXSXISLPXXSXXSAPIXSMXSGPGXXPSPVPXXSXXSAPXXSXXSASXASXXSGPGXXPSPVPXXSXXSAPXXSXXSASXASXXSGPGXSLSPVPXXSXXSAPXXSXXSGPGXXPSPVPXXSXXSAPXXSXXSGPGXXPSPVPXXSXXPVSKXSXSHLSVSKXXHSQPVXSDCHPLCAWXKWFDVDFPSPGPHGGDKEXYNNIIRSGEKICRRPEEIXRLQCRAESHPEVNIEHLGQVVQCSREEGLVCRNQDQQGPFKMCLNYEVRVLCCEXPRGCPVXSVXPYGXSPXNALYPSLSXSMVSASVASXSVASSSVASSSVAYSXQXCFCNVADRLYPAGSXIYRHRDLAGHCYYALCSQDCQVVRGVDSDCPSXXLPPAPAXSPSISXSEPVXELGCPNAVPPRKKGEXWAXPNCSEAXCEGNNVISLRPRXCPRVEKPXCANGYPAVKVADQDGCCHHYQCQCVCSGWGDPHYIXFDGXYYXFLDNCXYVLVQQIVPVYGHFRVLVDNYFCGAEDGLSCPRSIILEYHQDRVVLXRKPVHGVMXNEIIFNNKVVSPGFRKNGIVVSRIGVKMYAXIPELGVQVMFSGLIFSVEVPFSKFANNXEGQCGXCXNDRKDECRXPRGXVVASCSEMSGLWNVSIPDQPACHRPHPXPXXVGPXXVGSXXVGPXXVGSXXVGPXXPPAPCLPSPICQLILSKVFEPCHXVIPPLLFYEGCVFDRCHMXDLDVVCSSLELYAALCASHDICIDWRGRXGHMCPFXCPADKVYQPCGPSNPSYCYGNDSASLGALPEAGPIXEGCFCPEGMXLFSXSAQVCVPXGCPRCLGPHGEPVKVGHXVGMDCQECXCEAAXWXLXCRPKLCPLPPACPLPGFVPVPAAPQAGQCCPQYSCACNXSRCPAPVGCPEGARAIPXYQEGACCPVQNCSWXVCSINGXLYQPGAVVSSSLCEXCRCELPGGPPSDAFVVSCEXQICNXHCPVGFEYQEQSGQCCGXCVQVACVXNXSKSPAHLFYPGEXWSDAGNHCVXHQCEKHQDGLVVVXXKKACPPLSCSLDEARMSKDGCCRFCPPPPPPYQNQSXCAVYHRSLIIQQQGCSSSEPVRLAYCRGNCGDSSSMYSLEGNXVEHRCQCCQELRXSLRNVXLHCXDGSSRAFSYXEVEECGCMGRRCPAPGDXQHSEEAEPEPSQEAESGSWERGVPVSPMH

SEQ ID NO: 16828 - protein, 352 aa, Homo sapiens
  MOD_RES (17)..(18): Selenocysteine
  MOD_RES (22)..(22): Selenocysteine
  MOD_RES (78)..(78): Selenocysteine
  MOD_RES (95)..(95): Selenocysteine
  MOD_RES (106)..(107): Selenocysteine
  MOD_RES (121)..(121): Selenocysteine
  MOD_RES (123)..(123): Selenocysteine
  MOD_RES (154)..(154): Selenocysteine
  MOD_RES (167)..(167): Selenocysteine
  MOD_RES (185)..(185): Selenocysteine
  MOD_RES (194)..(194): Selenocysteine
  MOD_RES (196)..(196): Selenocysteine
  MOD_RES (251)..(251): Selenocysteine
  MOD_RES (254)..(254): Selenocysteine
  MOD_RES (324)..(324): Selenocysteine
  MOD_RES (344)..(344): Selenocysteine
MESGGRPSLCQFILLGXXSVVXAALYSVYRQKARVSQELKGAKKVHLGEDLKSILSEAPGKCVPYAVIEGAVRSVKEXLNSQFVENCKGVIQRLXLQEHKMVWNRXXHLWNDCSKIIHQRXNXVPFDLVPHEDGVDVAVRVLKPLDSVDLGLEXVYEKFHPSIQSFXDVIGHYISGERPKGIQEXEEMLKVGAXLXGVGELVLDNNSVRLQPPKQGMQYYLSSQDFDSLLQRQESSVRLWKVLALVFGFAXCAXLFFILRKQYLQRQERLRLKQMQEEFQEHEAQLLSRAKPEDRESLKSACVVCLSSFKSCVFLECGHVCSCXECYRALPEPKKCPICRQAIXRVIPLYNS

SEQ ID NO: 16829 - protein, 364 aa, Homo sapiens
  MOD_RES (22)..(22): Selenocysteine
  MOD_RES (32)..(32): Selenocysteine
  MOD_RES (35)..(35): Selenocysteine
  MOD_RES (82)..(82): Selenocysteine
  MOD_RES (93)..(93): Selenocysteine
  MOD_RES (143)..(143): Selenocysteine
  MOD_RES (154)..(154): Selenocysteine
  MOD_RES (210)..(210): Selenocysteine
  MOD_RES (223)..(223): Selenocysteine
  MOD_RES (227)..(227): Selenocysteine
  MOD_RES (281)..(281): Selenocysteine
  MOD_RES (336)..(336): Selenocysteine
  MOD_RES (343)..(343): Selenocysteine
MEHNGSASNADKIHQNRLSSVXEDEDQDAALXIVXVLDKVASIVDSVQASQKRIEERHREMENAIKSVQIDLLKLSQSHSNXGHIINKLFEKXRKVSAHIKDVKARVEKQQIHVKKVEVKQEEIMKKNKFRVVIFQEKFRCPXSLSVVKDRNLXENQEEDDDDIFDPPVDLSSDEEYYVEESRSARLRKSGKEHIDNIKKAFSKENMQKXRQNLDKKVNRIRXRIVXPERRERLRQSGERLRQSGERLRQSGERFKKSISNAAPSKEAFKMRSLRKGKDRXVAEGEECAREMGVDIIARSESLGPISELYSDELSEPEHEAARPVYPPHEGREIPXPEPLKVXFKSQVKVEDDESLLLDLKHSS

SEQ ID NO: 16830 - protein, 63 aa, Homo sapiens
  MOD_RES (32)..(32): Selenocysteine
  MOD_RES (45)..(45): Selenocysteine
  MOD_RES (51)..(51): Selenocysteine
  MOD_RES (55)..(55): Selenocysteine
AQSVREVFARQLMQVRGVSGEKAAALVDRYSXPASLLAAYDACAXPKEQEXLLSXIKCGRLQR

SEQ ID NO: 16831 - protein, 551 aa, Homo sapiens
  MOD_RES (26)..(26): Selenocysteine
  MOD_RES (33)..(33): Selenocysteine
  MOD_RES (39)..(39): Selenocysteine
  MOD_RES (86)..(86): Selenocysteine
  MOD_RES (159)..(159): Selenocysteine
  MOD_RES (197)..(197): Selenocysteine
  MOD_RES (206)..(206): Selenocysteine
  MOD_RES (239)..(239): Selenocysteine
  MOD_RES (278)..(278): Selenocysteine
  MOD_RES (297)..(297): Selenocysteine
  MOD_RES (299)..(299): Selenocysteine
  MOD_RES (315)..(315): Selenocysteine
  MOD_RES (383)..(383): Selenocysteine
  MOD_RES (389)..(389): Selenocysteine
  MOD_RES (391)..(391): Selenocysteine
  MOD_RES (402)..(402): Selenocysteine
  MOD_RES (416)..(416): Selenocysteine
  MOD_RES (427)..(427): Selenocysteine
  MOD_RES (435)..(435): Selenocysteine
  MOD_RES (445)..(445): Selenocysteine
  MOD_RES (455)..(455): Selenocysteine
  MOD_RES (499)..(499): Selenocysteine
  MOD_RES (512)..(512): Selenocysteine
  MOD_RES (518)..(518): Selenocysteine
  MOD_RES (522)..(522): Selenocysteine
  MOD_RES (539)..(539): Selenocysteine
  MOD_RES (551)..(551): Selenocysteine
MAAPVRLGRKRPLPACPNPLFVRWLXEWRDEAXRSRRRXRFVFQKALRSLRRYPLPLRSGKEAKILQHFGDGLCRMLDERLQRHRXSGGDHAPDSPSGENSPAPQGRLAEVQDSSMPVPAQPKAGGSGSYWPARHSGARVILLVLYREHLNPNGHHFLXKEELLQRCAQKSPRVAPGSARPWPALRSLLHRNLVLRXHQPARYSLXPEGLELAQKLAESEGLSLLNVGIGPKEPPGEEXAVPGAASAELASEAGVQQQPLELRPGEYRVLLCVDIGEXRGGGHRPELLRELQRLHVXHXVRKLHVGDFVWVAQEXNPRDPANPGELVLDHIVERKRLDDLCSSIIDGRFREQKFRLKRCGLERRVYLVEEHGSVHNLSLPESXLLQAVXNXQVIDGFFVKRXADIKESAAYLALLXRGLQRLYQGHXLRSRPWGXPGNPESGAMXSPNPLCSLLXFSDFNAGAIKNKAQSVREVFARQLMQVRGVSGEKAAALVDRYSXPASLLAAYDACAXPKEQEXLLSXIKCGRLQRNLGPALSRXLSQLYCSYGPLX

SEQ ID NO: 16832 - protein, 203 aa, Homo sapiens
  MOD_RES (9)..(9): Selenocysteine
  MOD_RES (13)..(13): Selenocysteine
  MOD_RES (28)..(28): Selenocysteine
  MOD_RES (47)..(47): Selenocysteine
  MOD_RES (91)..(91): Selenocysteine
  MOD_RES (98)..(98): Selenocysteine
  MOD_RES (104)..(104): Selenocysteine
  MOD_RES (151)..(151): Selenocysteine
MHGPRLSWXLFKXSLHLQPPSSLRLKLXILRDLRAAKLRCSNPDSRXGGVPVPRAWSAGGPALGLMAAPVRLGRKRPLPACPNPLFVRWLXEWRDEAXRSRRRXRFVFQKALRSLRRYPLPLRSGKEAKILQHFGDGLCRMLDERLQRHRXSGGDHAPDSPSGENSPAPQGRLAEVQDSSMPVPAQPKAGGSGSYWPARHSGA

SEQ ID NO: 16833 - protein, 135 aa, Homo sapiens
  MOD_RES (11)..(11): Selenocysteine
  MOD_RES (84)..(84): Selenocysteine
  MOD_RES (122)..(122): Selenocysteine
  MOD_RES (131)..(131): Selenocysteine
MLDERLQRHRXSGGDHAPDSPSGENSPAPQGRLAEVQDSSMPVPAQPKAGGSGSYWPARHSGARVILLVLYREHLNPNGHHFLXKEELLQRCAQKSPRVAPGSARPWPALRSLLHRNLVLRXHQPARYSLXPEGL

SEQ ID NO: 16834 - protein, 476 aa, Homo sapiens
  MOD_RES (11)..(11): Selenocysteine
  MOD_RES (84)..(84): Selenocysteine
  MOD_RES (122)..(122): Selenocysteine
  MOD_RES (131)..(131): Selenocysteine
  MOD_RES (164)..(164): Selenocysteine
  MOD_RES (203)..(203): Selenocysteine
  MOD_RES (222)..(222): Selenocysteine
  MOD_RES (224)..(224): Selenocysteine
  MOD_RES (240)..(240): Selenocysteine
  MOD_RES (308)..(308): Selenocysteine
  MOD_RES (314)..(314): Selenocysteine
  MOD_RES (316)..(316): Selenocysteine
  MOD_RES (327)..(327): Selenocysteine
  MOD_RES (341)..(341): Selenocysteine
  MOD_RES (352)..(352): Selenocysteine
  MOD_RES (360)..(360): Selenocysteine
  MOD_RES (370)..(370): Selenocysteine
  MOD_RES (380)..(380): Selenocysteine
  MOD_RES (424)..(424): Selenocysteine
  MOD_RES (437)..(437): Selenocysteine
  MOD_RES (443)..(443): Selenocysteine
  MOD_RES (447)..(447): Selenocysteine
  MOD_RES (464)..(464): Selenocysteine
  MOD_RES (476)..(476): Selenocysteine
MLDERLQRHRXSGGDHAPDSPSGENSPAPQGRLAEVQDSSMPVPAQPKAGGSGSYWPARHSGARVILLVLYREHLNPNGHHFLXKEELLQRCAQKSPRVAPGSARPWPALRSLLHRNLVLRXHQPARYSLXPEGLELAQKLAESEGLSLLNVGIGPKEPPGEEXAVPGAASAELASEAGVQQQPLELRPGEYRVLLCVDIGEXRGGGHRPELLRELQRLHVXHXVRKLHVGDFVWVAQEXNPRDPANPGELVLDHIVERKRLDDLCSSIIDGRFREQKFRLKRCGLERRVYLVEEHGSVHNLSLPESXLLQAVXNXQVIDGFFVKRXADIKESAAYLALLXRGLQRLYQGHXLRSRPWGXPGNPESGAMXSPNPLCSLLXFSDFNAGAIKNKAQSVREVFARQLMQVRGVSGEKAAALVDRYSXPASLLAAYDACAXPKEQEXLLSXIKCGRLQRNLGPALSRXLSQLYCSYGPLX

SEQ ID NO: 16835 - protein, 231 aa, Homo sapiens
  MOD_RES (1)..(1): Any amino acid
  MOD_RES (55)..(55): Selenocysteine
  MOD_RES (93)..(93): Selenocysteine
  MOD_RES (102)..(102): Selenocysteine
  MOD_RES (135)..(135): Selenocysteine
  MOD_RES (174)..(174): Selenocysteine
  MOD_RES (195)..(195): Selenocysteine
XGRLAEVQDSSMPVPAQPKAGGSGSYWPARHSGARVILLVLYREHLNPNGHHFLXKEELLQRCAQKSPRVAPGSARPWPALRSLLHRNLVLRXHQPARYSLXPEGLELAQKLAESEGLSLLNVGIGPKEPPGEEXAVPGAASAELASEAGVQQQPLELRPGEYRVLLCVDIGEXRGLPSLPLQGRAQAGAAPRAXAAARDPHANPGELVLDHIVERKRLDDLCSSIIDGRF

SEQ ID NO: 16836 - protein, 411 aa, Homo sapiens
  MOD_RES (1)..(1): Any amino acid
  MOD_RES (11)..(11): Selenocysteine
  MOD_RES (84)..(84): Selenocysteine
  MOD_RES (122)..(122): Selenocysteine
  MOD_RES (131)..(131): Selenocysteine
  MOD_RES (164)..(164): Selenocysteine
  MOD_RES (203)..(203): Selenocysteine
  MOD_RES (222)..(222): Selenocysteine
  MOD_RES (224)..(224): Selenocysteine
  MOD_RES (240)..(240): Selenocysteine
  MOD_RES (309)..(309): Selenocysteine
  MOD_RES (315)..(315): Selenocysteine
  MOD_RES (317)..(317): Selenocysteine
  MOD_RES (328)..(328): Selenocysteine
  MOD_RES (342)..(342): Selenocysteine
  MOD_RES (353)..(353): Selenocysteine
  MOD_RES (361)..(361): Selenocysteine
  MOD_RES (371)..(371): Selenocysteine
  MOD_RES (381)..(381): Selenocysteine
XLDERLQRHRXSGGDHAPDSPSGENSPAPQGRLAEVQDSSMPVPAQPKAGGSGSYWPARHSGARVILLVLYREHLNPNGHHFLXKEELLQRCAQKSPRVAPGSARPWPALRSLLHRNLVLRXHQPARYSLXPEGLELAQKLAESEGLSLLNVGIGPKEPPGEEXAVPGAASAELASEAGVQQQPLELRPGEYRVLLCVDIGEXRGGGHRPELLRELQRLHVXHXVRKLHVGDFVWVAQEXNPRDPAANPGELVLDHIVERKRLDDLCSSIIDGRFREQKFRLKRCGLERRVYLVEEHGSVHNLSLPESXLLQAVXNXQVIDGFFVKRXADIKESAAYLALLXRGLQRLYQGHXLRSRPWGXPGNPESGAMXSPNPLCSLLXFSDFNAGAIKNKAQSVREVFARQLMQVRGV

SEQ ID NO: 16837 - protein, 389 aa, Homo sapiens
  MOD_RES (1)..(1): Any amino acid
  MOD_RES (4)..(4): Selenocysteine
  MOD_RES (51)..(51): Selenocysteine
  MOD_RES (124)..(124): Selenocysteine
  MOD_RES (162)..(162): Selenocysteine
  MOD_RES (171)..(171): Selenocysteine
  MOD_RES (204)..(204): Selenocysteine
  MOD_RES (243)..(243): Selenocysteine
  MOD_RES (262)..(262): Selenocysteine
  MOD_RES (264)..(264): Selenocysteine
  MOD_RES (280)..(280): Selenocysteine
  MOD_RES (348)..(348): Selenocysteine
  MOD_RES (354)..(354): Selenocysteine
  MOD_RES (356)..(356): Selenocysteine
  MOD_RES (367)..(367): Selenocysteine
  MOD_RES (381)..(381): Selenocysteine
XRRXRFVFQKALRSLRRYPLPLRSGKEAKILQHFGDGLCRMLDERLQRHRXSGGDHAPDSPSGENSPAPQGRLAEVQDSSMPVPAQPKAGGSGSYWPARHSGARVILLVLYREHLNPNGHHFLXKEELLQRCAQKSPRVAPGSARPWPALRSLLHRNLVLRXHQPARYSLXPEGLELAQKLAESEGLSLLNVGIGPKEPPGEEXAVPGAASAELASEAGVQQQPLELRPGEYRVLLCVDIGEXRGGGHRPELLRELQRLHVXHXVRKLHVGDFVWVAQEXNPRDPANPGELVLDHIVERKRLDDLCSSIIDGRFREQKFRLKRCGLERRVYLVEEHGSVHNLSLPESXLLQAVXNXQVIDGFFVKRXADIKESAAYLALLXRGLQRLYQ

SEQ ID NO: 16838 - protein, 783 aa, Homo sapiens
  MOD_RES (14)..(14): Selenocysteine
  MOD_RES (21)..(21): Selenocysteine
  MOD_RES (31)..(32): Selenocysteine
  MOD_RES (36)..(36): Selenocysteine
  MOD_RES (46)..(46): Selenocysteine
  MOD_RES (62)..(62): Selenocysteine
  MOD_RES (73)..(73): Selenocysteine
  MOD_RES (85)..(85): Selenocysteine
  MOD_RES (100)..(100): Selenocysteine
  MOD_RES (124)..(124): Selenocysteine
  MOD_RES (143)..(144): Selenocysteine
  MOD_RES (198)..(198): Selenocysteine
  MOD_RES (218)..(218): Selenocysteine
  MOD_RES (234)..(234): Selenocysteine
  MOD_RES (240)..(240): Selenocysteine
  MOD_RES (244)..(244): Selenocysteine
  MOD_RES (246)..(246): Selenocysteine
  MOD_RES (252)..(252): Selenocysteine
  MOD_RES (254)..(254): Selenocysteine
  MOD_RES (285)..(285): Selenocysteine
  MOD_RES (291)..(291): Selenocysteine
  MOD_RES (295)..(295): Selenocysteine
  MOD_RES (304)..(304): Selenocysteine
  MOD_RES (310)..(310): Selenocysteine
  MOD_RES (339)..(339): Selenocysteine
  MOD_RES (367)..(367): Selenocysteine
  MOD_RES (381)..(381): Selenocysteine
  MOD_RES (405)..(405): Selenocysteine
  MOD_RES (409)..(409): Selenocysteine
  MOD_RES (425)..(425): Selenocysteine
  MOD_RES (427)..(428): Selenocysteine
  MOD_RES (449)..(449): Selenocysteine
  MOD_RES (451)..(452): Selenocysteine
  MOD_RES (518)..(518): Selenocysteine
  MOD_RES (588)..(588): Selenocysteine
  MOD_RES (642)..(642): Selenocysteine
  MOD_RES (694)..(695): Selenocysteine
  MOD_RES (764)..(764): Selenocysteine
  MOD_RES (780)..(780): Selenocysteine
MRELVNIPLVHILXLVAFSGXEKLPKAPVIXXPLEXVDALVEEVAXFMCAVESYPQPEISWXRNKILIKLFDXRYSIRENGQLLXILSVEDSDDGIYCCXANNGVGGAVESCGALQVKMKPKIXRPPINVKIIEGLKAVLPCXXMGNPKPSVSWIKGDSPLRENSRIAVLESGSLRIHNVQKEDAGQYRCVAKNSLGXAYSKVVKLEVEEESEPEQDXKVFARILRAPESHNVXFGSFVXLHCXAXGIPVPXIXWIENGNAVSSGSIQESVKDRVIDSRLQLFIXKPGLYXCIAXNKHGEKFSXAKAAAXISIAEWREYCLAVKELFCAKEWLVMEEKXHRGLYRSEMHLLSVPECSKLPSMHWDPXACARLPHLAFPPMXSSKPSVDIPNLPSSSSSSFSVSPXYSMXVIISIMSSFAIFVLLXIXXLYCCRRRKQWKNKKRESAAVXLXXLPSELLLDRLHPNPMYQRMPLLLNPKLLSLEYPRNNIEYVRDIGEGAFGRVFQARAPGLLPYEPFXMVAVKMLKEEASADMQADFQREAALMAEFDNPNIVKLLGVCAVGKPMCLLFEYMAYGDLNEFLRSMSPHXVCSLSHSDLSMRAQVSSPGPPPLSCAEQLCIARQVAAGMAYLSERKFVHRDLAXRNCLVGENMVVKIADFGLSRNIYSADYYKANENDAIPIRWMPPESIFYNRYXXESDVWAYGVVLWEIFSYGLQPYYGMAHEEVIYYVRDGNILSCPENCPVELYNLMRLCWSKLPADRPSFXSIHRILERMCERAEGXVSV

SEQ ID NO: 16839 - protein, 783 aa, Homo sapiens
  MOD_RES (14)..(14): Selenocysteine
  MOD_RES (21)..(21): Selenocysteine
  MOD_RES (31)..(32): Selenocysteine
  MOD_RES (36)..(36): Selenocysteine
  MOD_RES (46)..(46): Selenocysteine
  MOD_RES (62)..(62): Selenocysteine
  MOD_RES (73)..(73): Selenocysteine
  MOD_RES (85)..(85): Selenocysteine
  MOD_RES (100)..(100): Selenocysteine
  MOD_RES (124)..(124): Selenocysteine
  MOD_RES (143)..(144): Selenocysteine
  MOD_RES (198)..(198): Selenocysteine
  MOD_RES (218)..(218): Selenocysteine
  MOD_RES (234)..(234): Selenocysteine
  MOD_RES (240)..(240): Selenocysteine
  MOD_RES (244)..(244): Selenocysteine
  MOD_RES (246)..(246): Selenocysteine
  MOD_RES (252)..(252): Selenocysteine
  MOD_RES (254)..(254): Selenocysteine
  MOD_RES (285)..(285): Selenocysteine
  MOD_RES (291)..(291): Selenocysteine
  MOD_RES (295)..(295): Selenocysteine
  MOD_RES (304)..(304): Selenocysteine
  MOD_RES (310)..(310): Selenocysteine
  MOD_RES (339)..(339): Selenocysteine
  MOD_RES (367)..(367): Selenocysteine
  MOD_RES (381)..(381): Selenocysteine
  MOD_RES (405)..(405): Selenocysteine
  MOD_RES (409)..(409): Selenocysteine
  MOD_RES (425)..(425): Selenocysteine
  MOD_RES (427)..(428): Selenocysteine
  MOD_RES (449)..(449): Selenocysteine
  MOD_RES (451)..(452): Selenocysteine
  MOD_RES (518)..(518): Selenocysteine
  MOD_RES (588)..(588): Selenocysteine
  MOD_RES (642)..(642): Selenocysteine
  MOD_RES (694)..(695): Selenocysteine
  MOD_RES (764)..(764): Selenocysteine
  MOD_RES (780)..(780): Selenocysteine
MRELVNIPLVHILXLVAFSGXEKLPKAPVIXXPLEXVDALVEEVAXFMCAVESYPQPEISWXRNKILIKLFDXRYSIRENGQLLXILSVEDSDDGIYCCXANNGVGGAVESCGALQVKMKPKIXRPPINVKIIEGLKAVLPCXXMGNPKPSVSWIKGDSPLRENSRIAVLESGSLRIHNVQKEDAGQYRCVAKNSLGXAYSKVVKLEVEEESEPEQDXKVFARILRAPESHNVXFGSFVXLHCXAXGIPVPXIXWIENGNAVSSGSIQESVKDRVIDSRLQLFIXKPGLYXCIAXNKHGEKFSXAKAAAXISIADFREYCLAVKELFCAKEWLVMEEKXHRGLYRSEMHLLSVPECSKLPSMHWDPXACARLPHLAFPPMXSSKPSVDIPNLPSSSSSSFSVSPXYSMXVIISIMSSFAIFVLLXIXXLYCCRRRKQWKNKKRESAAVXLXXLPSELLLDRLHPNPMYQRMPLLLNPKLLSLEYPRNNIEYVRDIGEGAFGRVFQARAPGLLPYEPFXMVAVKMLKEEASADMQADFQREAALMAEFDNPNIVKLLGVCAVGKPMCLLFEYMAYGDLNEFLRSMSPHXVCSLSHSDLSMRAQVSSPGPPPLSCAEQLCIARQVAAGMAYLSERKFVHRDLAXRNCLVGENMVVKIADFGLSRNIYSADYYKANENDAIPIRWMPPESIFYNRYXXESDVWAYGVVLWEIFSYGLQPYYGMAHEEVIYYVRDGNILSCPENCPVELYNLMRLCWSKLPADRPSFXSIHRILERMCERAEGXVSV

SEQ ID NO: 16840 - protein, 861 aa, Homo sapiens
  MOD_RES (14)..(14): Selenocysteine
  MOD_RES (21)..(21): Selenocysteine
  MOD_RES (31)..(32): Selenocysteine
  MOD_RES (36)..(36): Selenocysteine
  MOD_RES (46)..(46): Selenocysteine
  MOD_RES (62)..(62): Selenocysteine
  MOD_RES (73)..(73): Selenocysteine
  MOD_RES (85)..(85): Selenocysteine
  MOD_RES (100)..(100): Selenocysteine
  MOD_RES (124)..(124): Selenocysteine
  MOD_RES (143)..(144): Selenocysteine
  MOD_RES (198)..(198): Selenocysteine
  MOD_RES (224)..(224): Selenocysteine
  MOD_RES (230)..(230): Selenocysteine
  MOD_RES (234)..(234): Selenocysteine
  MOD_RES (236)..(236): Selenocysteine
  MOD_RES (242)..(242): Selenocysteine
  MOD_RES (244)..(244): Selenocysteine
  MOD_RES (275)..(275): Selenocysteine
  MOD_RES (281)..(281): Selenocysteine
  MOD_RES (285)..(285): Selenocysteine
  MOD_RES (294)..(294): Selenocysteine
  MOD_RES (300)..(300): Selenocysteine
  MOD_RES (339)..(339): Selenocysteine
  MOD_RES (354)..(354): Selenocysteine
  MOD_RES (389)..(389): Selenocysteine
  MOD_RES (417)..(417): Selenocysteine
  MOD_RES (445)..(445): Selenocysteine
  MOD_RES (459)..(459): Selenocysteine
  MOD_RES (483)..(483): Selenocysteine
  MOD_RES (487)..(487): Selenocysteine
  MOD_RES (503)..(503): Selenocysteine
  MOD_RES (505)..(506): Selenocysteine
  MOD_RES (527)..(527): Selenocysteine
  MOD_RES (529)..(530): Selenocysteine
  MOD_RES (596)..(596): Selenocysteine
  MOD_RES (666)..(666): Selenocysteine
  MOD_RES (720)..(720): Selenocysteine
  MOD_RES (772)..(773): Selenocysteine
  MOD_RES (842)..(842): Selenocysteine
  MOD_RES (858)..(858): Selenocysteine
MRELVNIPLVHILXLVAFSGXEKLPKAPVIXXPLEXVDALVEEVAXFMCAVESYPQPEISWXRNKILIKLFDXRYSIRENGQLLXILSVEDSDDGIYCCXANNGVGGAVESCGALQVKMKPKIXRPPINVKIIEGLKAVLPCXXMGNPKPSVSWIKGDSPLRENSRIAVLESGSLRIHNVQKEDAGQYRCVAKNSLGXAYSKVVKLEVEVFARILRAPESHNVXFGSFVXLHCXAXGIPVPXIXWIENGNAVSSGSIQESVKDRVIDSRLQLFIXKPGLYXCIAXNKHGEKFSXAKAAAXISIAEWSKPQKDNKGYCAQYRGEVCNAVLAKDALVFLNXSYADPEEAQELLVHXAWNELKVVSPVCRPAAEALLCNHIFQECSPGVVPXPIPICREYCLAVKELFCAKEWLVMEEKXHRGLYRSEMHLLSVPECSKLPSMHWDPXACARLPHLAFPPMXSSKPSVDIPNLPSSSSSSFSVSPXYSMXVIISIMSSFAIFVLLXIXXLYCCRRRKQWKNKKRESAAVXLXXLPSELLLDRLHPNPMYQRMPLLLNPKLLSLEYPRNNIEYVRDIGEGAFGRVFQARAPGLLPYEPFXMVAVKMLKEEASADMQADFQREAALMAEFDNPNIVKLLGVCAVGKPMCLLFEYMAYGDLNEFLRSMSPHXVCSLSHSDLSMRAQVSSPGPPPLSCAEQLCIARQVAAGMAYLSERKFVHRDLAXRNCLVGENMVVKIADFGLSRNIYSADYYKANENDAIPIRWMPPESIFYNRYXXESDVWAYGVVLWEIFSYGLQPYYGMAHEEVIYYVRDGNILSCPENCPVELYNLMRLCWSKLPADRPSFXSIHRILERMCERAEGXVSV

SEQ ID NO: 16841 - protein, 869 aa, Homo sapiens
  MOD_RES (14)..(14): Selenocysteine
  MOD_RES (21)..(21): Selenocysteine
  MOD_RES (31)..(32): Selenocysteine
  MOD_RES (36)..(36): Selenocysteine
  MOD_RES (46)..(46): Selenocysteine
  MOD_RES (62)..(62): Selenocysteine
  MOD_RES (73)..(73): Selenocysteine
  MOD_RES (85)..(85): Selenocysteine
  MOD_RES (100)..(100): Selenocysteine
  MOD_RES (124)..(124): Selenocysteine
  MOD_RES (143)..(144): Selenocysteine
  MOD_RES (198)..(198): Selenocysteine
  MOD_RES (224)..(224): Selenocysteine
  MOD_RES (230)..(230): Selenocysteine
  MOD_RES (234)..(234): Selenocysteine
  MOD_RES (236)..(236): Selenocysteine
  MOD_RES (242)..(242): Selenocysteine
  MOD_RES (244)..(244): Selenocysteine
  MOD_RES (275)..(275): Selenocysteine
  MOD_RES (281)..(281): Selenocysteine
  MOD_RES (285)..(285): Selenocysteine
  MOD_RES (294)..(294): Selenocysteine
  MOD_RES (300)..(300): Selenocysteine
  MOD_RES (339)..(339): Selenocysteine
  MOD_RES (354)..(354): Selenocysteine
  MOD_RES (389)..(389): Selenocysteine
  MOD_RES (417)..(417): Selenocysteine
  MOD_RES (445)..(445): Selenocysteine
  MOD_RES (462)..(462): Selenocysteine
  MOD_RES (467)..(467): Selenocysteine
  MOD_RES (491)..(491): Selenocysteine
  MOD_RES (495)..(495): Selenocysteine
  MOD_RES (511)..(511): Selenocysteine
  MOD_RES (513)..(514): Selenocysteine
  MOD_RES (535)..(535): Selenocysteine
  MOD_RES (537)..(538): Selenocysteine
  MOD_RES (604)..(604): Selenocysteine
  MOD_RES (674)..(674): Selenocysteine
  MOD_RES (728)..(728): Selenocysteine
  MOD_RES (780)..(781): Selenocysteine
  MOD_RES (850)..(850): Selenocysteine
  MOD_RES (866)..(866): Selenocysteine
MRELVNIPLVHILXLVAFSGXEKLPKAPVIXXPLEXVDALVEEVAXFMCAVESYPQPEISWXRNKILIKLFDXRYSIRENGQLLXILSVEDSDDGIYCCXANNGVGGAVESCGALQVKMKPKIXRPPINVKIIEGLKAVLPCXXMGNPKPSVSWIKGDSPLRENSRIAVLESGSLRIHNVQKEDAGQYRCVAKNSLGXAYSKVVKLEVEVFARILRAPESHNVXFGSFVXLHCXAXGIPVPXIXWIENGNAVSSGSIQESVKDRVIDSRLQLFIXKPGLYXCIAXNKHGEKFSXAKAAAXISIAEWSKPQKDNKGYCAQYRGEVCNAVLAKDALVFLNXSYADPEEAQELLVHXAWNELKVVSPVCRPAAEALLCNHIFQECSPGVVPXPIPICREYCLAVKELFCAKEWLVMEEKXHRGLYRSEMHLLSVPECSKLPSMHWDPXACARLPHLDYNKENLKXFPPMXSSKPSVDIPNLPSSSSSSFSVSPXYSMXVIISIMSSFAIFVLLXIXXLYCCRRRKQWKNKKRESAAVXLXXLPSELLLDRLHPNPMYQRMPLLLNPKLLSLEYPRNNIEYVRDIGEGAFGRVFQARAPGLLPYEPFXMVAVKMLKEEASADMQADFQREAALMAEFDNPNIVKLLGVCAVGKPMCLLFEYMAYGDLNEFLRSMSPHXVCSLSHSDLSMRAQVSSPGPPPLSCAEQLCIARQVAAGMAYLSERKFVHRDLAXRNCLVGENMVVKIADFGLSRNIYSADYYKANENDAIPIRWMPPESIFYNRYXXESDVWAYGVVLWEIFSYGLQPYYGMAHEEVIYYVRDGNILSCPENCPVELYNLMRLCWSKLPADRPSFXSIHRILERMCERAEGXVSV

SEQ ID NO: 16842 - protein, 132 aa, Homo sapiens
  MOD_RES (22)..(22): Selenocysteine
  MOD_RES (41)..(42): Selenocysteine
  MOD_RES (96)..(96): Selenocysteine
  MOD_RES (114)..(114): Selenocysteine
NGVGGAVESCGALQVKMKPKIXRPPINVKIIEGLKAVLPCXXMGNPKPSVSWIKGDSPLRENSRIAVLESGSLRIHNVQKEDAGQYRCVAKNSLGXAYSKVVKLEVEGAKGIHXQFVASALQLRSFLSCPQI

SEQ ID NO: 16843 - protein, 273 aa, Homo sapiens
  MOD_RES (7)..(7): Selenocysteine
  MOD_RES (34)..(34): Selenocysteine
  MOD_RES (115)..(115): Selenocysteine
  MOD_RES (117)..(117): Selenocysteine
  MOD_RES (128)..(128): Selenocysteine
  MOD_RES (130)..(130): Selenocysteine
  MOD_RES (186)..(186): Selenocysteine
  MOD_RES (196)..(196): Selenocysteine
  MOD_RES (221)..(221): Selenocysteine
  MOD_RES (243)..(243): Selenocysteine
  MOD_RES (263)..(263): Selenocysteine
MDPVPGXDSAPLAGLAWSSASAPPPRGFSAISCXVEGAPASFGKSFAQKSGYFLCLSSLGSLENPQENVVADIQIVVDKSPLPLGFSPVCDPMDSKASVSKKKRMCVKLLPLGAXDXAVFDVRLSGKXKXVPGYLRIGDMGGFAIWCKKAKAPRPVPKPRGLSRDMQGLSLDAASQPSKGGLLERXASRLGSRASXLRRNDSIYEASSLYGISAMDGVPFXLHPRFEGKSCSPLAFSAFGDLXIKSLADIEEEYNYGFVVEKXAAARLPPSVS

SEQ ID NO: 16844 - protein, 273 aa, Homo sapiens
  MOD_RES (7)..(7): Selenocysteine
  MOD_RES (34)..(34): Selenocysteine
  MOD_RES (115)..(115): Selenocysteine
  MOD_RES (117)..(117): Selenocysteine
  MOD_RES (128)..(128): Selenocysteine
  MOD_RES (130)..(130): Selenocysteine
  MOD_RES (186)..(186): Selenocysteine
  MOD_RES (196)..(196): Selenocysteine
  MOD_RES (221)..(221): Selenocysteine
  MOD_RES (243)..(243): Selenocysteine
  MOD_RES (250)..(250): Selenocysteine
  MOD_RES (266)..(266): Selenocysteine
  MOD_RES (273)..(273): Selenocysteine
MDPVPGXDSAPLAGLAWSSASAPPPRGFSAISCXVEGAPASFGKSFAQKSGYFLCLSSLGSLENPQENVVADIQIVVDKSPLPLGFSPVCDPMDSKASVSKKKRMCVKLLPLGAXDXAVFDVRLSGKXKXVPGYLRIGDMGGFAIWCKKAKAPRPVPKPRGLSRDMQGLSLDAASQPSKGGLLERXASRLGSRASXLRRNDSIYEASSLYGISAMDGVPFXLHPRFEGKSCSPLAGLPSSRNXLKAARQXHIRCLESGGFGCSPRXSLALRLX

SEQ ID NO: 16845 - protein, 199 aa, Homo sapiens
  MOD_RES (7)..(7): Selenocysteine
  MOD_RES (34)..(34): Selenocysteine
  MOD_RES (97)..(97): Selenocysteine
  MOD_RES (123)..(123): Selenocysteine
  MOD_RES (159)..(159): Selenocysteine
  MOD_RES (162)..(162): Selenocysteine
  MOD_RES (181)..(181): Selenocysteine
  MOD_RES (199)..(199): Selenocysteine
MDPVPGXDSAPLAGLAWSSASAPPPRGFSAISCXVEGAPASFGKSFAQKSGYFLCLSSLGSLENPQENVVADIQIVVDKSPLPLGFSPVCDPMDSRXWAALPSGARRPRPRGQCPSPEVSAGXCRASLWMQPASQVRAASWSGQRQGWALGHPLCGGMXPSXRPPASMASQPWMGFPSHSXHDLRARAAAPWPSLLLGX

SEQ ID NO: 16846 - protein, 121 aa, Homo sapiens
  MOD_RES (23)..(23): Selenocysteine
  MOD_RES (25)..(25): Selenocysteine
  MOD_RES (36)..(36): Selenocysteine
  MOD_RES (38)..(38): Selenocysteine
  MOD_RES (94)..(94): Selenocysteine
  MOD_RES (104)..(104): Selenocysteine
MDSKASVSKKKRMCVKLLPLGAXDXAVFDVRLSGKXKXVPGYLRIGDMGGFAIWCKKAKAPRPVPKPRGLSRDMQGLSLDAASQPSKGGLLERXASRLGSRASXLRRNDSIYEASSLYGIS

SEQ ID NO: 16847 - protein, 134 aa, Homo sapiens
  MOD_RES (47)..(47): Selenocysteine
  MOD_RES (57)..(57): Selenocysteine
  MOD_RES (82)..(82): Selenocysteine
  MOD_RES (104)..(104): Selenocysteine
  MOD_RES (124)..(124): Selenocysteine
MGGFAIWCKKAKAPRPVPKPRGLSRDMQGLSLDAASQPSKGGLLERXASRLGSRASXLRRNDSIYEASSLYGISAMDGVPFXLHPRFEGKSCSPLAFSAFGDLXIKSLADIEEEYNYGFVVEKXAAARLPPSVS

SEQ ID NO: 16848 - protein, 122 aa, Homo sapiens
  MOD_RES (1)..(1): Any amino acid
  MOD_RES (54)..(54): Selenocysteine
  MOD_RES (64)..(64): Selenocysteine
  MOD_RES (89)..(89): Selenocysteine
  MOD_RES (112)..(112): Selenocysteine
XYLRIGDMGGFAIWCKKAKAPRPVPKPRGLSRDMQGLSLDAASQPSKGGLLERXASRLGSRASXLRRNDSIYEASSLYGISAMDGVPFXLHPRFEGKSCSPLYNYGFVVEKXAAARLPPSVS

SEQ ID NO: 16849 - protein, 205 aa, Homo sapiens
  MOD_RES (3)..(3): Selenocysteine
  MOD_RES (16)..(16): Selenocysteine
  MOD_RES (30)..(30): Selenocysteine
  MOD_RES (36)..(36): Selenocysteine
  MOD_RES (49)..(49): Selenocysteine
  MOD_RES (57)..(57): Selenocysteine
  MOD_RES (76)..(76): Selenocysteine
  MOD_RES (82)..(82): Selenocysteine
  MOD_RES (107)..(107): Selenocysteine
  MOD_RES (118)..(118): Selenocysteine
  MOD_RES (121)..(121): Selenocysteine
  MOD_RES (141)..(141): Selenocysteine
  MOD_RES (154)..(154): Selenocysteine
  MOD_RES (162)..(162): Selenocysteine
  MOD_RES (189)..(190): Selenocysteine
  MOD_RES (199)..(199): Selenocysteine
MDXGLSSQPSEEDQSXMPEVKDLSEALPEXSMDPIXGVGVVASRNRAPXGYDVVAQXADGVDADLWKDGLFKSKVXRYLCFXRSFSKENSHLGNVLVDMKLIDIKDXLPVGFIPIQEXVDXQEVAFRKKRLCIKFIPRDSXEAAICDIRIMGRXKQAPPQYXFIGELNSMGIWYRMGRVPRNHDSSQPXXPSQSSAASXPAPNLP

SEQ ID NO: 16850 - protein, 221 aa, Homo sapiens
  MOD_RES (27)..(27): Selenocysteine
  MOD_RES (31)..(31): Selenocysteine
  MOD_RES (45)..(45): Selenocysteine
  MOD_RES (51)..(51): Selenocysteine
  MOD_RES (64)..(64): Selenocysteine
  MOD_RES (72)..(72): Selenocysteine
  MOD_RES (91)..(91): Selenocysteine
  MOD_RES (97)..(97): Selenocysteine
  MOD_RES (122)..(122): Selenocysteine
  MOD_RES (133)..(133): Selenocysteine
  MOD_RES (136)..(136): Selenocysteine
  MOD_RES (156)..(156): Selenocysteine
  MOD_RES (169)..(169): Selenocysteine
  MOD_RES (177)..(177): Selenocysteine
  MOD_RES (204)..(205): Selenocysteine
  MOD_RES (214)..(214): Selenocysteine
MRSCFCVRRSRDPPPPQPPPPPPQRGXDQSXMPEVKDLSEALPEXSMDPIXGVGVVASRNRAPXGYDVVAQXADGVDADLWKDGLFKSKVXRYLCFXRSFSKENSHLGNVLVDMKLIDIKDXLPVGFIPIQEXVDXQEVAFRKKRLCIKFIPRDSXEAAICDIRIMGRXKQAPPQYXFIGELNSMGIWYRMGRVPRNHDSSQPXXPSQSSAASXPAPNLPR

SEQ ID NO: 16851 - protein, 319 aa, Homo sapiens
  MOD_RES (27)..(27): Selenocysteine
  MOD_RES (31)..(31): Selenocysteine
  MOD_RES (45)..(45): Selenocysteine
  MOD_RES (51)..(51): Selenocysteine
  MOD_RES (64)..(64): Selenocysteine
  MOD_RES (72)..(72): Selenocysteine
  MOD_RES (91)..(91): Selenocysteine
  MOD_RES (97)..(97): Selenocysteine
  MOD_RES (122)..(122): Selenocysteine
  MOD_RES (133)..(133): Selenocysteine
  MOD_RES (136)..(136): Selenocysteine
  MOD_RES (156)..(156): Selenocysteine
  MOD_RES (169)..(169): Selenocysteine
  MOD_RES (177)..(177): Selenocysteine
  MOD_RES (204)..(205): Selenocysteine
  MOD_RES (214)..(214): Selenocysteine
  MOD_RES (226)..(226): Selenocysteine
  MOD_RES (230)..(230): Selenocysteine
  MOD_RES (237)..(237): Selenocysteine
  MOD_RES (239)..(239): Selenocysteine
  MOD_RES (281)..(281): Selenocysteine
  MOD_RES (298)..(298): Selenocysteine
  MOD_RES (311)..(311): Selenocysteine
MRSCFCVRRSRDPPPPQPPPPPPQRGXDQSXMPEVKDLSEALPEXSMDPIXGVGVVASRNRAPXGYDVVAQXADGVDADLWKDGLFKSKVXRYLCFXRSFSKENSHLGNVLVDMKLIDIKDXLPVGFIPIQEXVDXQEVAFRKKRLCIKFIPRDSXEAAICDIRIMGRXKQAPPQYXFIGELNSMGIWYRMGRVPRNHDSSQPXXPSQSSAASXPAPNLPRHISLXLPAXFRGRNSXRXDYEYQHSNLYAISAMDGVPFMISEKFSCVPESMQPFDLLGIXIKSLAEIEKEYEYSFRXEQSAAARLPPSPXRCQQIPQS

SEQ ID NO: 16852 - protein, 39 aa, Homo sapiens
  MOD_RES (3)..(3): Selenocysteine
MAXEEFIIRIPPYHYIHVLDQNSNVSRVECPAALGRSGW

SEQ ID NO: 16853 - protein, 42 aa, Homo sapiens
  MOD_RES (3)..(3): Selenocysteine
  MOD_RES (34)..(34): Selenocysteine
MAXEEFIIRIPPYHYIHVLDQNSNVSRVEVGPKXYIRQDNER

SEQ ID NO: 16854 - protein, 81 aa, Homo sapiens
  MOD_RES (3)..(3): Selenocysteine
  MOD_RES (34)..(34): Selenocysteine
  MOD_RES (48)..(48): Selenocysteine
  MOD_RES (59)..(59): Selenocysteine
  MOD_RES (65)..(65): Selenocysteine
  MOD_RES (68)..(68): Selenocysteine
MAXEEFIIRIPPYHYIHVLDQNSNVSRVEVGPKXYIRQDNERFWIWWXPSSLRKRQPCXSGLGGXSGXSGECPAALGRSGW

SEQ ID NO: 16855 - protein, 57 aa, Homo sapiens
  MOD_RES (3)..(3): Selenocysteine
  MOD_RES (34)..(34): Selenocysteine
  MOD_RES (43)..(43): Selenocysteine
  MOD_RES (53)..(53): Selenocysteine
MAXEEFIIRIPPYHYIHVLDQNSNVSRVEVGPKXYIRQDNERXSHPCRWFCPXLPSI

SEQ ID NO: 16856 - protein, 94 aa, Homo sapiens
  MOD_RES (3)..(3): Selenocysteine
  MOD_RES (34)..(34): Selenocysteine
  MOD_RES (52)..(52): Selenocysteine
  MOD_RES (60)..(60): Selenocysteine
  MOD_RES (78)..(78): Selenocysteine
MAXEEFIIRIPPYHYIHVLDQNSNVSRVEVGPKXYIRQDNERVLFAPMRMVXVPPRHYCXVANPVSRDAQGLVLFDVXGQVRLRHADLEIRLAQ

SEQ ID NO: 16857 - protein, 107 aa, Homo sapiens
  MOD_RES (3)..(3): Selenocysteine
  MOD_RES (34)..(34): Selenocysteine
  MOD_RES (52)..(52): Selenocysteine
  MOD_RES (60)..(60): Selenocysteine
  MOD_RES (78)..(78): Selenocysteine
MAXEEFIIRIPPYHYIHVLDQNSNVSRVEVGPKXYIRQDNERVLFAPMRMVXVPPRHYCXVANPVSRDAQGLVLFDVXGQVRLRHADLEIRLAQDPFPLYPGEVLEK

SEQ ID NO: 16858 - protein, 144 aa, Homo sapiens
  MOD_RES (3)..(3): Selenocysteine
  MOD_RES (34)..(34): Selenocysteine
  MOD_RES (52)..(52): Selenocysteine
  MOD_RES (60)..(60): Selenocysteine
  MOD_RES (78)..(78): Selenocysteine
  MOD_RES (124)..(124): Selenocysteine
  MOD_RES (134)..(134): Selenocysteine
  MOD_RES (138)..(138): Selenocysteine
MAXEEFIIRIPPYHYIHVLDQNSNVSRVEVGPKXYIRQDNERVLFAPMRMVXVPPRHYCXVANPVSRDAQGLVLFDVXGQVRLRHADLEIRLAQDPFPLYPGEVLEKAIPLDENEGIYVQDVKXGKVRAVIGSXYMLXQDEVLW

SEQ ID NO: 16859 - protein, 149 aa, Homo sapiens
  MOD_RES (3)..(3): Selenocysteine
  MOD_RES (34)..(34): Selenocysteine
  MOD_RES (52)..(52): Selenocysteine
  MOD_RES (60)..(60): Selenocysteine
  MOD_RES (78)..(78): Selenocysteine
  MOD_RES (110)..(110): Selenocysteine
  MOD_RES (119)..(119): Selenocysteine
MAXEEFIIRIPPYHYIHVLDQNSNVSRVEVGPKXYIRQDNERVLFAPMRMVXVPPRHYCXVANPVSRDAQGLVLFDVXGQVRLRHADLEIRLAQDPFPLYPGEVLEKDIXPLQVVLPNXALHLKALLDFEDKDGDKVVAGDEWLFEGPG

SEQ ID NO: 16860 - protein, 220 aa, Homo sapiens
  MOD_RES (3)..(3): Selenocysteine
  MOD_RES (34)..(34): Selenocysteine
  MOD_RES (52)..(52): Selenocysteine
  MOD_RES (60)..(60): Selenocysteine
  MOD_RES (78)..(78): Selenocysteine
  MOD_RES (110)..(110): Selenocysteine
  MOD_RES (119)..(119): Selenocysteine
  MOD_RES (150)..(150): Selenocysteine
  MOD_RES (166)..(166): Selenocysteine
  MOD_RES (192)..(192): Selenocysteine
  MOD_RES (199)..(200): Selenocysteine
MAXEEFIIRIPPYHYIHVLDQNSNVSRVEVGPKXYIRQDNERVLFAPMRMVXVPPRHYCXVANPVSRDAQGLVLFDVXGQVRLRHADLEIRLAQDPFPLYPGEVLEKDIXPLQVVLPNXALHLKALLDFEDKDGDKVVAGDEWLFEGPGXYIPRKEVEVVEIIQAXIIRQNQALRLRARKECWDRDGKERVXGEEWLVXXVGAYLPAVFEEVLDLVDAVI

SEQ ID NO: 16861 - protein, 893 aa, Homo sapiens
  MOD_RES (3)..(3): Selenocysteine
  MOD_RES (34)..(34): Selenocysteine
  MOD_RES (52)..(52): Selenocysteine
  MOD_RES (60)..(60): Selenocysteine
  MOD_RES (78)..(78): Selenocysteine
  MOD_RES (110)..(110): Selenocysteine
  MOD_RES (119)..(119): Selenocysteine
  MOD_RES (150)..(150): Selenocysteine
  MOD_RES (166)..(166): Selenocysteine
  MOD_RES (192)..(192): Selenocysteine
  MOD_RES (199)..(200): Selenocysteine
  MOD_RES (222)..(222): Selenocysteine
  MOD_RES (225)..(225): Selenocysteine
  MOD_RES (245)..(245): Selenocysteine
  MOD_RES (252)..(252): Selenocysteine
  MOD_RES (256)..(256): Selenocysteine
  MOD_RES (274)..(275): Selenocysteine
  MOD_RES (395)..(395): Selenocysteine
  MOD_RES (405)..(405): Selenocysteine
  MOD_RES (409)..(409): Selenocysteine
  MOD_RES (442)..(442): Selenocysteine
  MOD_RES (455)..(455): Selenocysteine
  MOD_RES (496)..(496): Selenocysteine
  MOD_RES (524)..(524): Selenocysteine
  MOD_RES (528)..(528): Selenocysteine
  MOD_RES (531)..(531): Selenocysteine
  MOD_RES (558)..(558): Selenocysteine
  MOD_RES (587)..(587): Selenocysteine
  MOD_RES (601)..(601): Selenocysteine
  MOD_RES (608)..(608): Selenocysteine
  MOD_RES (650)..(650): Selenocysteine
  MOD_RES (665)..(666): Selenocysteine
  MOD_RES (719)..(719): Selenocysteine
  MOD_RES (721)..(721): Selenocysteine
  MOD_RES (755)..(755): Selenocysteine
  MOD_RES (799)..(799): Selenocysteine
  MOD_RES (806)..(806): Selenocysteine
  MOD_RES (830)..(830): Selenocysteine
  MOD_RES (833)..(833): Selenocysteine
  MOD_RES (837)..(837): Selenocysteine
  MOD_RES (844)..(844): Selenocysteine
MAXEEFIIRIPPYHYIHVLDQNSNVSRVEVGPKXYIRQDNERVLFAPMRMVXVPPRHYCXVANPVSRDAQGLVLFDVXGQVRLRHADLEIRLAQDPFPLYPGEVLEKDIXPLQVVLPNXALHLKALLDFEDKDGDKVVAGDEWLFEGPGXYIPRKEVEVVEIIQAXIIRQNQALRLRARKECWDRDGKERVXGEEWLVXXVGAYLPAVFEEVLDLVDAVILXEKXALHLRARRNFRDFRGVSRRXGEEWLVXVQDXEAHVPDVHEEVLGVVPIXXLGPHNYCVILDPVGPDGKNQLGQKRVVKGEKSFFLQPGEQLEQGIQDVYVLSEQQGLLLRALQPLEEGEDEEKVSHQAGDHWLIRGPLEYVPSAKVEVVEERQAIPLDENEGIYVQDVKXGKVRAVIGSXYMLXQDEVLWEKELPPGVEELLNKGQDPLADRGEKDXAKSLQPLAPRNKXRVVSYRVPHNAAVQVYDYREKRARVVFGPELVSLGPEEQFXVLSLSAGRPKRPHARRALCLLLGPDFFXDVIXIEXADHARLQLQLAYNWHFEVNDRKDPQEXAKLFSVPDFVGDACKAIASRVRGAVASVXFDDFHKNSARIIRXAVFGFEXSEAKGPDGMALPRPRDQAVFPQNGLVVSSVDVQSVEPVDQRXRDALQRSVQLAIEIXXNSQEAAAKHEAQRLEQEARGRLERQKILDQSEAEKARKELLELEALSMAVESXGXAKAEAESRAEAARIEGEGSVLQAKLKAQALAIEXEAELQRVQKVRELELVYARAQLELEVSKAQQLAEVEVKKFKQMXEAIGPSXIRDLAVAGPEMQVKLLQSLGLKSXLIXDGSXPINLFNXAFGLLGMGPEGQPLGRRVASGPSPGEGISPQSAQAPQAPGDNHVVPVLR

SEQ ID NO: 16862 - protein, 61 aa, Homo sapiens
  MOD_RES (1)..(1): Any amino acid
  MOD_RES (12)..(12): Selenocysteine
  MOD_RES (28)..(28): Selenocysteine
  MOD_RES (54)..(54): Selenocysteine
  MOD_RES (58)..(58): Selenocysteine
XGDEWLFEGPGXYIPRKEVEVVEIIQAXIIRQNQALRLRARKECWDRDGKERVXGGVXKGR

SEQ ID NO: 16863 - protein, 26 aa, Homo sapiens
MVVSEVDIAKADPAAASHPLLLNGDA

SEQ ID NO: 16864 - protein, 35 aa, Homo sapiens
  MOD_RES (27)..(27): Selenocysteine
MVVSEVDIAKADPAAASHPLLLNGDAXVAQKNPGS

SEQ ID NO: 16865 - protein, 68 aa, Homo sapiens
  MOD_RES (27)..(27): Selenocysteine
MVVSEVDIAKADPAAASHPLLLNGDAXVAQKNPGSVAENNLCSQYEEKVRPCIDLIDSLRALGVEQDL

SEQ ID NO: 16866 - protein, 77 aa, Homo sapiens
  MOD_RES (27)..(27): Selenocysteine
MVVSEVDIAKADPAAASHPLLLNGDAXVAQKNPGSVAENNLCSQYEEKVRPCIDLIDSLRALGVEQDLALPAIAVIG

SEQ ID NO: 16867 - protein, 197 aa, Homo sapiens
  MOD_RES (27)..(27): Selenocysteine
  MOD_RES (103)..(103): Selenocysteine
  MOD_RES (163)..(163): Selenocysteine
  MOD_RES (175)..(175): Selenocysteine
  MOD_RES (183)..(183): Selenocysteine
MVVSEVDIAKADPAAASHPLLLNGDAXVAQKNPGSVAENNLCSQYEEKVRPCIDLIDSLRALGVEQDLALPAIAVIGDQSSGKSSVLEALSGVALPRGSGIVXRCPLVLKLKKLVNEDKWRGKVSYQDYEIEISDASEVEKEINKAQNAIAGEGMGISHELIXLEISSRDVPDLXLIDLPGIXRVAVGNQPADIGYK

SEQ ID NO: 16868 - protein, 201 aa, Homo sapiens
  MOD_RES (27)..(27): Selenocysteine
  MOD_RES (103)..(103): Selenocysteine
  MOD_RES (163)..(163): Selenocysteine
  MOD_RES (175)..(175): Selenocysteine
  MOD_RES (183)..(183): Selenocysteine
  MOD_RES (200)..(200): Selenocysteine
MVVSEVDIAKADPAAASHPLLLNGDAXVAQKNPGSVAENNLCSQYEEKVRPCIDLIDSLRALGVEQDLALPAIAVIGDQSSGKSSVLEALSGVALPRGSGIVXRCPLVLKLKKLVNEDKWRGKVSYQDYEIEISDASEVEKEINKAQNAIAGEGMGISHELIXLEISSRDVPDLXLIDLPGIXRVAVGNQPADIGYKIKXL

SEQ ID NO: 16869 - protein, 508 aa, Homo sapiens
  MOD_RES (27)..(27): Selenocysteine
  MOD_RES (103)..(103): Selenocysteine
  MOD_RES (163)..(163): Selenocysteine
  MOD_RES (175)..(175): Selenocysteine
  MOD_RES (183)..(183): Selenocysteine
  MOD_RES (200)..(200): Selenocysteine
  MOD_RES (211)..(211): Selenocysteine
  MOD_RES (225)..(226): Selenocysteine
  MOD_RES (242)..(242): Selenocysteine
  MOD_RES (247)..(247): Selenocysteine
  MOD_RES (256)..(256): Selenocysteine
  MOD_RES (319)..(319): Selenocysteine
  MOD_RES (328)..(328): Selenocysteine
  MOD_RES (333)..(333): Selenocysteine
  MOD_RES (349)..(349): Selenocysteine
  MOD_RES (354)..(354): Selenocysteine
  MOD_RES (387)..(387): Selenocysteine
  MOD_RES (395)..(395): Selenocysteine
  MOD_RES (405)..(405): Selenocysteine
  MOD_RES (416)..(416): Selenocysteine
  MOD_RES (487)..(487): Selenocysteine
  MOD_RES (502)..(503): Selenocysteine
MVVSEVDIAKADPAAASHPLLLNGDAXVAQKNPGSVAENNLCSQYEEKVRPCIDLIDSLRALGVEQDLALPAIAVIGDQSSGKSSVLEALSGVALPRGSGIVXRCPLVLKLKKLVNEDKWRGKVSYQDYEIEISDASEVEKEINKAQNAIAGEGMGISHELIXLEISSRDVPDLXLIDLPGIXRVAVGNQPADIGYKIKXLIKKYIQRQEXISLVVVPSNVDIAXXEALSMAQEVDPEGDRXIGILXKPDLVDKGXEDKVVDVVRNLVFHLKKGYMIVKCRGQQEIQDQLSLSEALQREKIFFENHPYFRDLLEEGKAXVPCLAEKLXSELIXHICKSLPLLENQIKEXHQRIXEELQKYGVDIPEDENEKMFFLIDKVNAFNQDIXALMQGEEXVGEEDIRLFXRLRHEFHKWSXIIENNFQEGGQQAHLQPHPFDHPVLHAPDVRPAASEGHAAAPAGQGHLQLAPEGAERHQRQAEVPEGAACXADAGSAPACPVPRLXXLCPAP

SEQ ID NO: 16870 - protein, 662 aa, Homo sapiens
  MOD_RES (27)..(27): Selenocysteine
  MOD_RES (103)..(103): Selenocysteine
  MOD_RES (163)..(163): Selenocysteine
  MOD_RES (175)..(175): Selenocysteine
  MOD_RES (183)..(183): Selenocysteine
  MOD_RES (200)..(200): Selenocysteine
  MOD_RES (211)..(211): Selenocysteine
  MOD_RES (225)..(226): Selenocysteine
  MOD_RES (242)..(242): Selenocysteine
  MOD_RES (247)..(247): Selenocysteine
  MOD_RES (256)..(256): Selenocysteine
  MOD_RES (319)..(319): Selenocysteine
  MOD_RES (328)..(328): Selenocysteine
  MOD_RES (333)..(333): Selenocysteine
  MOD_RES (349)..(349): Selenocysteine
  MOD_RES (354)..(354): Selenocysteine
  MOD_RES (387)..(387): Selenocysteine
  MOD_RES (395)..(395): Selenocysteine
  MOD_RES (405)..(405): Selenocysteine
  MOD_RES (416)..(416): Selenocysteine
  MOD_RES (453)..(453): Selenocysteine
  MOD_RES (456)..(456): Selenocysteine
  MOD_RES (475)..(475): Selenocysteine
  MOD_RES (477)..(477): Selenocysteine
  MOD_RES (485)..(485): Selenocysteine
  MOD_RES (501)..(501): Selenocysteine
  MOD_RES (570)..(570): Selenocysteine
  MOD_RES (607)..(607): Selenocysteine
  MOD_RES (625)..(625): Selenocysteine
  MOD_RES (636)..(636): Selenocysteine
  MOD_RES (651)..(651): Selenocysteine
MVVSEVDIAKADPAAASHPLLLNGDAXVAQKNPGSVAENNLCSQYEEKVRPCIDLIDSLRALGVEQDLALPAIAVIGDQSSGKSSVLEALSGVALPRGSGIVXRCPLVLKLKKLVNEDKWRGKVSYQDYEIEISDASEVEKEINKAQNAIAGEGMGISHELIXLEISSRDVPDLXLIDLPGIXRVAVGNQPADIGYKIKXLIKKYIQRQEXISLVVVPSNVDIAXXEALSMAQEVDPEGDRXIGILXKPDLVDKGXEDKVVDVVRNLVFHLKKGYMIVKCRGQQEIQDQLSLSEALQREKIFFENHPYFRDLLEEGKAXVPCLAEKLXSELIXHICKSLPLLENQIKEXHQRIXEELQKYGVDIPEDENEKMFFLIDKVNAFNQDIXALMQGEEXVGEEDIRLFXRLRHEFHKWSXIIENNFQEGHKILSRKIQKFENQYRGRELPGFVNYRXFEXIVKQQIKALEEPAVDMLHXVXDMVRLAFXDVSIKNFEEFFNLHRXAKSKIEDIRAEQEREGEKLIRLHFQMEQIVYCQDQVYRGALQKVREKELEEEKKKKSWDFGAFQSSSAXDSSMEEIFQHLMAYHQEASKRISSHIPLIIQFFMLQXYGQQLQKAMLQLLQDKDXYSWLLKERSDXSDKRKFLKERLARLXQARRRLAQFPG

SEQ ID NO: 16871 - protein, 639 aa, Homo sapiens
  MOD_RES (27)..(27): Selenocysteine
  MOD_RES (80)..(80): Selenocysteine
  MOD_RES (140)..(140): Selenocysteine
  MOD_RES (152)..(152): Selenocysteine
  MOD_RES (160)..(160): Selenocysteine
  MOD_RES (177)..(177): Selenocysteine
  MOD_RES (188)..(188): Selenocysteine
  MOD_RES (202)..(203): Selenocysteine
  MOD_RES (219)..(219): Selenocysteine
  MOD_RES (224)..(224): Selenocysteine
  MOD_RES (233)..(233): Selenocysteine
  MOD_RES (296)..(296): Selenocysteine
  MOD_RES (305)..(305): Selenocysteine
  MOD_RES (310)..(310): Selenocysteine
  MOD_RES (326)..(326): Selenocysteine
  MOD_RES (331)..(331): Selenocysteine
  MOD_RES (364)..(364): Selenocysteine
  MOD_RES (372)..(372): Selenocysteine
  MOD_RES (382)..(382): Selenocysteine
  MOD_RES (393)..(393): Selenocysteine
  MOD_RES (430)..(430): Selenocysteine
  MOD_RES (433)..(433): Selenocysteine
  MOD_RES (452)..(452): Selenocysteine
  MOD_RES (454)..(454): Selenocysteine
  MOD_RES (462)..(462): Selenocysteine
  MOD_RES (478)..(478): Selenocysteine
  MOD_RES (547)..(547): Selenocysteine
  MOD_RES (584)..(584): Selenocysteine
  MOD_RES (602)..(602): Selenocysteine
  MOD_RES (613)..(613): Selenocysteine
  MOD_RES (628)..(628): Selenocysteine
MVVSEVDIAKADPAAASHPLLLNGDAXVAQKNPGSVAENNLCSQYEEKVRPCIDLIDSLRALGVEQDLALPAIAVIGIVXRCPLVLKLKKLVNEDKWRGKVSYQDYEIEISDASEVEKEINKAQNAIAGEGMGISHELIXLEISSRDVPDLXLIDLPGIXRVAVGNQPADIGYKIKXLIKKYIQRQEXISLVVVPSNVDIAXXEALSMAQEVDPEGDRXIGILXKPDLVDKGXEDKVVDVVRNLVFHLKKGYMIVKCRGQQEIQDQLSLSEALQREKIFFENHPYFRDLLEEGKAXVPCLAEKLXSELIXHICKSLPLLENQIKEXHQRIXEELQKYGVDIPEDENEKMFFLIDKVNAFNQDIXALMQGEEXVGEEDIRLFXRLRHEFHKWSXIIENNFQEGHKILSRKIQKFENQYRGRELPGFVNYRXFEXIVKQQIKALEEPAVDMLHXVXDMVRLAFXDVSIKNFEEFFNLHRXAKSKIEDIRAEQEREGEKLIRLHFQMEQIVYCQDQVYRGALQKVREKELEEEKKKKSWDFGAFQSSSAXDSSMEEIFQHLMAYHQEASKRISSHIPLIIQFFMLQXYGQQLQKAMLQLLQDKDXYSWLLKERSDXSDKRKFLKERLARLXQARRRLAQFPG

SEQ ID NO: 16872 - protein, 14 aa, Homo sapiens
MSKAHKPWPYRRRS

SEQ ID NO: 16873 - protein, 125 aa, Homo sapiens
  MOD_RES (38)..(38): Selenocysteine
  MOD_RES (67)..(67): Selenocysteine
MSKAHKPWPYRRRSQFSSRKYLKKEMNSFQQQPPPFGXVPPQMMFPPNWQGAEKDAAFLAKDFNFLXLNNQPPPGNRSQPRAMGPENNLYSQYEQKVRPCIDLIDSLRALGVEQDLALPAIAVIG

SEQ ID NO: 16874 - protein, 129 aa, Homo sapiens
  MOD_RES (38)..(38): Selenocysteine
  MOD_RES (67)..(67): Selenocysteine
MSKAHKPWPYRRRSQFSSRKYLKKEMNSFQQQPPPFGXVPPQMMFPPNWQGAEKDAAFLAKDFNFLXLNNQPPPGNRSQPRAMGPENNLYSQYEQKVRPCIDLIDSLRALGVEQDLALPAIAVIGDQSS

SEQ ID NO: 16875 - protein, 134 aa, Homo sapiens
  MOD_RES (38)..(38): Selenocysteine
  MOD_RES (67)..(67): Selenocysteine
MSKAHKPWPYRRRSQFSSRKYLKKEMNSFQQQPPPFGXVPPQMMFPPNWQGAEKDAAFLAKDFNFLXLNNQPPPGNRSQPRAMGPENNLYSQYEQKVRPCIDLIDSLRALGVEQDLALPAIAVIGDQSSGKSSV

SEQ ID NO: 16876 - protein, 715 aa, Homo sapiens
  MOD_RES (38)..(38): Selenocysteine
  MOD_RES (67)..(67): Selenocysteine
  MOD_RES (151)..(151): Selenocysteine
  MOD_RES (176)..(176): Selenocysteine
  MOD_RES (214)..(214): Selenocysteine
  MOD_RES (222)..(222): Selenocysteine
  MOD_RES (230)..(230): Selenocysteine
  MOD_RES (258)..(258): Selenocysteine
  MOD_RES (272)..(273): Selenocysteine
  MOD_RES (289)..(289): Selenocysteine
  MOD_RES (294)..(294): Selenocysteine
  MOD_RES (303)..(303): Selenocysteine
  MOD_RES (315)..(315): Selenocysteine
  MOD_RES (334)..(334): Selenocysteine
  MOD_RES (343)..(343): Selenocysteine
  MOD_RES (348)..(348): Selenocysteine
  MOD_RES (352)..(352): Selenocysteine
  MOD_RES (366)..(366): Selenocysteine
  MOD_RES (375)..(376): Selenocysteine
  MOD_RES (401)..(401): Selenocysteine
  MOD_RES (448)..(448): Selenocysteine
  MOD_RES (467)..(467): Selenocysteine
  MOD_RES (469)..(469): Selenocysteine
  MOD_RES (500)..(500): Selenocysteine
  MOD_RES (548)..(548): Selenocysteine
  MOD_RES (552)..(552): Selenocysteine
  MOD_RES (561)..(561): Selenocysteine
  MOD_RES (602)..(602): Selenocysteine
  MOD_RES (624)..(624): Selenocysteine
  MOD_RES (637)..(637): Selenocysteine
  MOD_RES (685)..(685): Selenocysteine
  MOD_RES (687)..(687): Selenocysteine
  MOD_RES (700)..(700): Selenocysteine
MSKAHKPWPYRRRSQFSSRKYLKKEMNSFQQQPPPFGXVPPQMMFPPNWQGAEKDAAFLAKDFNFLXLNNQPPPGNRSQPRAMGPENNLYSQYEQKVRPCIDLIDSLRALGVEQDLALPAIAVIGDQSSGKSSVLEALSGVALPRGSGIVXRCPLVLKLKKQPCEAWAGRISYRNXELELQDPGQVEKEIHKAQNVMAGNGRGISHELISLEIXSPEVPDLXIIDLPGIXRVAVDNQPRDIGLQIKALIKKYIQRQQXINLVVVPCNVDIAXXEALSMAHEVDPEGDRXIGILXKPDLMDRGXEKSVMNVVRNLXYPLKKGYMIVKCRGQQEIXNRLSLAEAXKKEIXFFQXHPYFRVLLEEGSAXVPRLAERLXXELIMHIQKSLPLLEGQIRESHQKAXEELRRCGADIPSQEADKMFFLIEKIKMFNQDIEKLVEGEEVVRENEXRLYNKIREDFKNWVGILAXNXQKVKNIIHEEVEKYEKQYRGKELLGFVNYKXFEIIVHQYIQQLVEPALSMLQKAMEIIQQAFINVAKKHFGEFFNLNQXVQSXIEDIKVKHXAKAENMIQLQFRMEQMVFCQDQIYSVVLKKVREEIFNPLGXPSQNMKLNSHFPSNESSVSSFXEIGIHLNAYFLEXSKRLANQIPFIIQYFMLRENGDSLQKAMMQILQEKNRYSWLLQEQSEXAXKRRILKERIYRLXQARHALCQFSSKEIH

SEQ ID NO: 16877 - protein, 211 aa, Homo sapiens
  MOD_RES (83)..(84): Selenocysteine
  MOD_RES (89)..(89): Selenocysteine
  MOD_RES (139)..(139): Selenocysteine
  MOD_RES (159)..(159): Selenocysteine
  MOD_RES (163)..(163): Selenocysteine
  MOD_RES (194)..(194): Selenocysteine
MAAAVRMNIQMLLEAADYLERREREAEHGYASMLPYNNKDRDALKRRNKSKKNNSSSRRAHLRLCLEKLKGLVPLGPESSRHXXLSLLXKAKLHIKKLEDCDRKAVHQIDQLQREQRHLKRQLEKLGIERIRMDSIGSXVSSERSDSDREEIDVDVESXDYLXGDLDWSSSSVSDSDERGSMQSLGSDEGYSSXSIKRIKLQDSHKACLGL

SEQ ID NO: 16878 - protein, 221 aa, Homo sapiens
  MOD_RES (60)..(60): Selenocysteine
  MOD_RES (93)..(94): Selenocysteine
  MOD_RES (99)..(99): Selenocysteine
  MOD_RES (149)..(149): Selenocysteine
  MOD_RES (169)..(169): Selenocysteine
  MOD_RES (173)..(173): Selenocysteine
  MOD_RES (204)..(204): Selenocysteine
MAAAVRMNIQMLLEAADYLERREREAEHGYASMLPYNNKDRDALKRRNKSKKNNSSSRSXHNEMEKNRRAHLRLCLEKLKGLVPLGPESSRHXXLSLLXKAKLHIKKLEDCDRKAVHQIDQLQREQRHLKRQLEKLGIERIRMDSIGSXVSSERSDSDREEIDVDVESXDYLXGDLDWSSSSVSDSDERGSMQSLGSDEGYSSXSIKRIKLQDSHKACLGL

SEQ ID NO: 16879 - protein, 73 aa, Homo sapiens
  MOD_RES (51)..(52): Selenocysteine
  MOD_RES (57)..(57): Selenocysteine
MLPYNNKDRDALKRRNKSKKNNSSSRRAHLRLCLEKLKGLVPLGPESSRHXXLSLLXKAKLHIKDKYPQHWRC

SEQ ID NO: 16880 - protein, 181 aa, Homo sapiens
  MOD_RES (28)..(28): Selenocysteine
  MOD_RES (61)..(62): Selenocysteine
  MOD_RES (67)..(67): Selenocysteine
  MOD_RES (117)..(117): Selenocysteine
  MOD_RES (137)..(137): Selenocysteine
  MOD_RES (141)..(141): Selenocysteine
  MOD_RES (172)..(172): Selenocysteine
MLPYNNKDRDALKRRNKSKKNNSSSRSXHNEMEKNRRAHLRLCLEKLKGLVPLGPESSRHXXLSLLXKAKLHIKKLEDCDRKAVHQIDQLQREQRHLKRQLEKLGIERIRMDSIGSXVSSERSDSDREEIDVDVESXDYLXGDLDWSSSSVSDSDERGSMQSLGSDEGYSSXSIKRIKLQD

SEQ ID NO: 16881 - protein, 124 aa, Homo sapiens
  MOD_RES (84)..(85): Selenocysteine
MEPLASNIQVLLQAAEFLERREREAEHGYASLCPHRSPGPIHRRKKRPPQAPGAQDSGRRAQLKRCLERLKQQMPLGADCARYXXLSLLRRARMHIQKLEDQEQRARQLKERLRSKQQSLQRQL

SEQ ID NO: 16882 - protein, 206 aa, Homo sapiens
  MOD_RES (94)..(95): Selenocysteine
MEPLASNIQVLLQAAEFLERREREAEHGYASLCPHRSPGPIHRRKKRPPQAPGAQDSGRSVHNELEKRRRAQLKRCLERLKQQMPLGADCARYXXLSLLRRARMHIQKLEDQEQRARQLKERLRSKQQSLQRQLEQLRGLAGAAERERLRADSLDSSGLSSERSDSDQEELEVDVESLVFGGEAELLRGFVAGQEHSYSHGGGAWL

SEQ ID NO: 16883 - protein, 388 aa, Homo sapiens
  MOD_RES (94)..(95): Selenocysteine
  MOD_RES (188)..(188): Selenocysteine
  MOD_RES (222)..(222): Selenocysteine
  MOD_RES (224)..(224): Selenocysteine
  MOD_RES (226)..(226): Selenocysteine
  MOD_RES (270)..(270): Selenocysteine
  MOD_RES (273)..(273): Selenocysteine
  MOD_RES (306)..(306): Selenocysteine
  MOD_RES (327)..(327): Selenocysteine
  MOD_RES (338)..(338): Selenocysteine
  MOD_RES (372)..(372): Selenocysteine
  MOD_RES (378)..(378): Selenocysteine
MEPLASNIQVLLQAAEFLERREREAEHGYASLCPHRSPGPIHRRKKRPPQAPGAQDSGRSVHNELEKRRRAQLKRCLERLKQQMPLGADCARYXXLSLLRRARMHIQKLEDQEQRARQLKERLRSKQQSLQRQLEQLRGLAGAAERERLRADSLDSSGLSSERSDSDQGECPEAEGLCGPRGEPGLLXGPLPAQRSWRWMWRAWCLGVRPSCCGASSPARSXAXRXAAAPGYDVPHPGRASALYSCQAHLPGRSPPQAFRAARSHLLEWXKRXLVWEQVLPKHPAAGCQAGPLEGKGQDSSGPPWXPAGQAAWARAQAFGSAAPKGXGSLLGLFPSWXRPPAFASHKLYSIFIKSLFHNFPSIVLPNENGGXPNHRPXGRGNNISSHH

SEQ ID NO: 16884 - protein, 193 aa, Homo sapiens
  MOD_RES (94)..(95): Selenocysteine
  MOD_RES (177)..(177): Selenocysteine
  MOD_RES (183)..(183): Selenocysteine
MEPLASNIQVLLQAAEFLERREREAEHGYASLCPHRSPGPIHRRKKRPPQAPGAQDSGRSVHNELEKRRRAQLKRCLERLKQQMPLGADCARYXXLSLLRRARMHIQKLEDQEQRARQLKERLRSKQQSLQRQLEQLRGLAGAAERERLRADSLDSSGLSSERSDSDQVLPNENGGXPNHRPXGRGNNISSHH

SEQ ID NO: 16885 - protein, 75 aa, Homo sapiens
  MOD_RES (11)..(12): Selenocysteine
MPLGADCARYXXLSLLRRARMHIQKLEDQEQRARQLKERLRSKQQSLQRQLEQLRGLAGAAERERLRADSLDSSG

SEQ ID NO: 16886 - protein, 209 aa, Homo sapiens
  MOD_RES (42)..(42): Selenocysteine
  MOD_RES (87)..(87): Selenocysteine
  MOD_RES (90)..(91): Selenocysteine
  MOD_RES (143)..(143): Selenocysteine
  MOD_RES (146)..(146): Selenocysteine
  MOD_RES (152)..(152): Selenocysteine
  MOD_RES (190)..(190): Selenocysteine
MELNSLLILLEAAEYLERRDREAEHGYASVLPFDGDFAREKXKAAGLVRKAPNNRSSHNELEKHRRAKLRLYLEQLKQLVPLGPDSXRHXXLSLLKRAKVHIKKLEEQDRRALSIKEQLQQEHRFLKRRLEQLSVQSVERVRXDSXGSAVSXDDSEQEVDIEGMEFGPGELDSVGSSSDADDHYSLQSGXGGDSGFGPHCRRLGRPALS

SEQ ID NO: 16887 - protein, 107 aa, Homo sapiens
  MOD_RES (42)..(42): Selenocysteine
  MOD_RES (73)..(73): Selenocysteine
  MOD_RES (97)..(97): Selenocysteine
MELNSLLILLEAAEYLERRDREAEHGYASVLPFDGDFAREKXKAAGLVRKAPNNSGILGGPGALAGLWGPAWXRKVAWSWERGPPASLSSRQMLWHXLWCWELCARV

SEQ ID NO: 16888 - protein, 82 aa, Homo sapiens
  MOD_RES (1)..(1): Any amino acid
  MOD_RES (13)..(13): Selenocysteine
  MOD_RES (48)..(48): Selenocysteine
  MOD_RES (61)..(61): Selenocysteine
  MOD_RES (76)..(76): Selenocysteine
XLPFDGDFAREKXKAAGLVRKAPNNRSSHNELEKHRCSVISKAVCSRXSPAPHPRDRIPGXQRLSHILHCSPRALXLPMRLG

SEQ ID NO: 16889 - protein, 218 aa, Homo sapiens
  MOD_RES (64)..(64): Selenocysteine
  MOD_RES (66)..(66): Selenocysteine
  MOD_RES (91)..(91): Selenocysteine
  MOD_RES (94)..(95): Selenocysteine
  MOD_RES (154)..(154): Selenocysteine
  MOD_RES (174)..(174): Selenocysteine
  MOD_RES (186)..(187): Selenocysteine
  MOD_RES (217)..(217): Selenocysteine
MERVKMINVQRLLEAAEFLERRERECEHGYASSFPSMPSPRLQHSKPPRRLSRAQKHSSGSSNXSXANRRAHLRLCLERLKVLIPLGPDCXRHXXLGLLNKAKAHIKKLEEAERKSQHQLENLEREQRFLKWRLEQLQGPQEMERIRMDSIGSXISSDRSDSEREEIEVDVESXEFSHGEVDNISXXSISDIDDHSSLPSIGSDEGYSSASVKLSFXS

SEQ ID NO: 16890 - protein, 228 aa, Homo sapiens
  MOD_RES (64)..(64): Selenocysteine
  MOD_RES (66)..(66): Selenocysteine
  MOD_RES (71)..(71): Selenocysteine
  MOD_RES (101)..(101): Selenocysteine
  MOD_RES (104)..(105): Selenocysteine
  MOD_RES (164)..(164): Selenocysteine
  MOD_RES (184)..(184): Selenocysteine
  MOD_RES (196)..(197): Selenocysteine
  MOD_RES (227)..(227): Selenocysteine
MERVKMINVQRLLEAAEFLERRERECEHGYASSFPSMPSPRLQHSKPPRRLSRAQKHSSGSSNXSXANRSXHNELEKNRRAHLRLCLERLKVLIPLGPDCXRHXXLGLLNKAKAHIKKLEEAERKSQHQLENLEREQRFLKWRLEQLQGPQEMERIRMDSIGSXISSDRSDSEREEIEVDVESXEFSHGEVDNISXXSISDIDDHSSLPSIGSDEGYSSASVKLSFXS

SEQ ID NO: 16891 - protein, 226 aa, Homo sapiens
  MOD_RES (57)..(57): Selenocysteine
  MOD_RES (68)..(68): Selenocysteine
  MOD_RES (131)..(131): Selenocysteine
  MOD_RES (133)..(133): Selenocysteine
  MOD_RES (158)..(158): Selenocysteine
  MOD_RES (161)..(162): Selenocysteine
  MOD_RES (221)..(221): Selenocysteine
MGKRGRPRKEARCEGAGLAPAAPPAVPPAVAAPQPPALPEDPAGAKPRCPFSDIFNXSENSMEKHINXFLQNVQILLEAASYLEQIEKENKKCEHGYASSFPSMPSPRLQHSKPPRRLSRAQKHSSGSSNXSXANRRAHLRLCLERLKVLIPLGPDCXRHXXLGLLNKAKAHIKKLEEAERKSQHQLENLEREQRFLKWRLEQLQGPQEMERIRMDSIGSXISSDR

SEQ ID NO: 16892 - protein, 295 aa, Homo sapiens
  MOD_RES (57)..(57): Selenocysteine
  MOD_RES (68)..(68): Selenocysteine
  MOD_RES (131)..(131): Selenocysteine
  MOD_RES (133)..(133): Selenocysteine
  MOD_RES (138)..(138): Selenocysteine
  MOD_RES (168)..(168): Selenocysteine
  MOD_RES (171)..(172): Selenocysteine
  MOD_RES (231)..(231): Selenocysteine
  MOD_RES (251)..(251): Selenocysteine
  MOD_RES (263)..(264): Selenocysteine
  MOD_RES (294)..(294): Selenocysteine
MGKRGRPRKEARCEGAGLAPAAPPAVPPAVAAPQPPALPEDPAGAKPRCPFSDIFNXSENSMEKHINXFLQNVQILLEAASYLEQIEKENKKCEHGYASSFPSMPSPRLQHSKPPRRLSRAQKHSSGSSNXSXANRSXHNELEKNRRAHLRLCLERLKVLIPLGPDCXRHXXLGLLNKAKAHIKKLEEAERKSQHQLENLEREQRFLKWRLEQLQGPQEMERIRMDSIGSXISSDRSDSEREEIEVDVESXEFSHGEVDNISXXSISDIDDHSSLPSIGSDEGYSSASVKLSFXS

SEQ ID NO: 16893 - protein, 182 aa, Homo sapiens
  MOD_RES (28)..(28): Selenocysteine
  MOD_RES (30)..(30): Selenocysteine
  MOD_RES (55)..(55): Selenocysteine
  MOD_RES (58)..(59): Selenocysteine
  MOD_RES (118)..(118): Selenocysteine
  MOD_RES (138)..(138): Selenocysteine
  MOD_RES (150)..(151): Selenocysteine
  MOD_RES (181)..(181): Selenocysteine
MPSPRLQHSKPPRRLSRAQKHSSGSSNXSXANRRAHLRLCLERLKVLIPLGPDCXRHXXLGLLNKAKAHIKKLEEAERKSQHQLENLEREQRFLKWRLEQLQGPQEMERIRMDSIGSXISSDRSDSEREEIEVDVESXEFSHGEVDNISXXSISDIDDHSSLPSIGSDEGYSSASVKLSFXS

SEQ ID NO: 16894 - protein, 118 aa, Homo sapiens
  MOD_RES (28)..(28): Selenocysteine
  MOD_RES (30)..(30): Selenocysteine
  MOD_RES (35)..(35): Selenocysteine
  MOD_RES (65)..(65): Selenocysteine
  MOD_RES (68)..(69): Selenocysteine
MPSPRLQHSKPPRRLSRAQKHSSGSSNXSXANRSXHNELEKNRRAHLRLCLERLKVLIPLGPDCXRHXXLGLLNKAKAHIKKLEEAERKSQHQLENLEREQRFLKWRLEQLQGPQEME

SEQ ID NO: 16895 - protein, 192 aa, Homo sapiens
  MOD_RES (28)..(28): Selenocysteine
  MOD_RES (30)..(30): Selenocysteine
  MOD_RES (35)..(35): Selenocysteine
  MOD_RES (65)..(65): Selenocysteine
  MOD_RES (68)..(69): Selenocysteine
  MOD_RES (128)..(128): Selenocysteine
  MOD_RES (148)..(148): Selenocysteine
  MOD_RES (160)..(161): Selenocysteine
  MOD_RES (191)..(191): Selenocysteine
MPSPRLQHSKPPRRLSRAQKHSSGSSNXSXANRSXHNELEKNRRAHLRLCLERLKVLIPLGPDCXRHXXLGLLNKAKAHIKKLEEAERKSQHQLENLEREQRFLKWRLEQLQGPQEMERIRMDSIGSXISSDRSDSEREEIEVDVESXEFSHGEVDNISXXSISDIDDHSSLPSIGSDEGYSSASVKLSFXS

SEQ ID NO: 16896 - protein, 147 aa, Homo sapiens
  MOD_RES (4)..(4): Selenocysteine
  MOD_RES (6)..(6): Selenocysteine
  MOD_RES (8)..(9): Selenocysteine
  MOD_RES (11)..(15): Selenocysteine
  MOD_RES (33)..(33): Selenocysteine
  MOD_RES (47)..(47): Selenocysteine
  MOD_RES (61)..(61): Selenocysteine
  MOD_RES (71)..(71): Selenocysteine
  MOD_RES (79)..(79): Selenocysteine
  MOD_RES (104)..(104): Selenocysteine
  MOD_RES (122)..(123): Selenocysteine
  MOD_RES (141)..(141): Selenocysteine
MPVXVXRXXIXXXXXSSSGLGSPMIVGSPRALXQPLGLLRLLQLVSXCVAFSLVASVGAWXGSMGNWSMFXWCFCFSVXLIILIVELCGLQARFPLSWRNFPIXFACYAALFCLSASIIYPXXYVQFLSHGRSRDHAIAAXFFSCIA

SEQ ID NO: 16897 - protein, 188 aa, Homo sapiens
  MOD_RES (4)..(4): Selenocysteine
  MOD_RES (6)..(6): Selenocysteine
  MOD_RES (8)..(9): Selenocysteine
  MOD_RES (11)..(15): Selenocysteine
  MOD_RES (33)..(33): Selenocysteine
  MOD_RES (47)..(47): Selenocysteine
  MOD_RES (61)..(61): Selenocysteine
  MOD_RES (71)..(71): Selenocysteine
  MOD_RES (79)..(79): Selenocysteine
  MOD_RES (104)..(104): Selenocysteine
  MOD_RES (122)..(123): Selenocysteine
  MOD_RES (141)..(141): Selenocysteine
  MOD_RES (153)..(153): Selenocysteine
  MOD_RES (158)..(158): Selenocysteine
  MOD_RES (166)..(166): Selenocysteine
  MOD_RES (171)..(171): Selenocysteine
  MOD_RES (181)..(181): Selenocysteine
MPVXVXRXXIXXXXXSSSGLGSPMIVGSPRALXQPLGLLRLLQLVSXCVAFSLVASVGAWXGSMGNWSMFXWCFCFSVXLIILIVELCGLQARFPLSWRNFPIXFACYAALFCLSASIIYPXXYVQFLSHGRSRDHAIAAXFFSCIACVAYAXEVAWXRARPGEIXGYMAXVPGLLKVLEXFVACIIF

SEQ ID NO: 16898 - protein, 242 aa, Homo sapiens
  MOD_RES (4)..(4): Selenocysteine
  MOD_RES (6)..(6): Selenocysteine
  MOD_RES (8)..(9): Selenocysteine
  MOD_RES (11)..(15): Selenocysteine
  MOD_RES (33)..(33): Selenocysteine
  MOD_RES (47)..(47): Selenocysteine
  MOD_RES (61)..(61): Selenocysteine
  MOD_RES (71)..(71): Selenocysteine
  MOD_RES (79)..(79): Selenocysteine
  MOD_RES (104)..(104): Selenocysteine
  MOD_RES (122)..(123): Selenocysteine
  MOD_RES (141)..(141): Selenocysteine
  MOD_RES (153)..(153): Selenocysteine
  MOD_RES (158)..(158): Selenocysteine
  MOD_RES (166)..(166): Selenocysteine
  MOD_RES (171)..(171): Selenocysteine
  MOD_RES (181)..(181): Selenocysteine
  MOD_RES (229)..(229): Selenocysteine
MPVXVXRXXIXXXXXSSSGLGSPMIVGSPRALXQPLGLLRLLQLVSXCVAFSLVASVGAWXGSMGNWSMFXWCFCFSVXLIILIVELCGLQARFPLSWRNFPIXFACYAALFCLSASIIYPXXYVQFLSHGRSRDHAIAAXFFSCIACVAYAXEVAWXRARPGEIXGYMAXVPGLLKVLEXFVACIIFAFISDPNLYQHQPALEWCVAVYAICFILAAIAILLNLGECXNVLPIPFPSFLSG

SEQ ID NO: 16899 - protein, 259 aa, Homo sapiens
  MOD_RES (4)..(4): Selenocysteine
  MOD_RES (6)..(6): Selenocysteine
  MOD_RES (8)..(9): Selenocysteine
  MOD_RES (11)..(15): Selenocysteine
  MOD_RES (33)..(33): Selenocysteine
  MOD_RES (47)..(47): Selenocysteine
  MOD_RES (61)..(61): Selenocysteine
  MOD_RES (71)..(71): Selenocysteine
  MOD_RES (79)..(79): Selenocysteine
  MOD_RES (104)..(104): Selenocysteine
  MOD_RES (122)..(123): Selenocysteine
  MOD_RES (141)..(141): Selenocysteine
  MOD_RES (153)..(153): Selenocysteine
  MOD_RES (158)..(158): Selenocysteine
  MOD_RES (166)..(166): Selenocysteine
  MOD_RES (171)..(171): Selenocysteine
  MOD_RES (181)..(181): Selenocysteine
  MOD_RES (229)..(229): Selenocysteine
  MOD_RES (253)..(253): Selenocysteine
MPVXVXRXXIXXXXXSSSGLGSPMIVGSPRALXQPLGLLRLLQLVSXCVAFSLVASVGAWXGSMGNWSMFXWCFCFSVXLIILIVELCGLQARFPLSWRNFPIXFACYAALFCLSASIIYPXXYVQFLSHGRSRDHAIAAXFFSCIACVAYAXEVAWXRARPGEIXGYMAXVPGLLKVLEXFVACIIFAFISDPNLYQHQPALEWCVAVYAICFILAAIAILLNLGECXNVLPIPFPSFLSGLALLSVLLYAXALVLWP

SEQ ID NO: 16900 - protein, 322 aa, Homo sapiens
  MOD_RES (4)..(4): Selenocysteine
  MOD_RES (6)..(6): Selenocysteine
  MOD_RES (8)..(9): Selenocysteine
  MOD_RES (11)..(15): Selenocysteine
  MOD_RES (33)..(33): Selenocysteine
  MOD_RES (47)..(47): Selenocysteine
  MOD_RES (61)..(61): Selenocysteine
  MOD_RES (71)..(71): Selenocysteine
  MOD_RES (79)..(79): Selenocysteine
  MOD_RES (104)..(104): Selenocysteine
  MOD_RES (122)..(123): Selenocysteine
  MOD_RES (141)..(141): Selenocysteine
  MOD_RES (153)..(153): Selenocysteine
  MOD_RES (158)..(158): Selenocysteine
  MOD_RES (166)..(166): Selenocysteine
  MOD_RES (171)..(171): Selenocysteine
  MOD_RES (181)..(181): Selenocysteine
  MOD_RES (229)..(229): Selenocysteine
  MOD_RES (253)..(253): Selenocysteine
  MOD_RES (300)..(300): Selenocysteine
MPVXVXRXXIXXXXXSSSGLGSPMIVGSPRALXQPLGLLRLLQLVSXCVAFSLVASVGAWXGSMGNWSMFXWCFCFSVXLIILIVELCGLQARFPLSWRNFPIXFACYAALFCLSASIIYPXXYVQFLSHGRSRDHAIAAXFFSCIACVAYAXEVAWXRARPGEIXGYMAXVPGLLKVLEXFVACIIFAFISDPNLYQHQPALEWCVAVYAICFILAAIAILLNLGECXNVLPIPFPSFLSGLALLSVLLYAXALVLWPLYQFDEKYGGQPRRSRDVSCSRSHAYYVCAWDRRLAVAILXAINLLAYVADLVHSAHLVFVKV

SEQ ID NO: 16901 - protein, 277 aa, Homo sapiens
  MOD_RES (14)..(14): Selenocysteine
  MOD_RES (28)..(28): Selenocysteine
  MOD_RES (50)..(50): Selenocysteine
  MOD_RES (99)..(99): Selenocysteine
  MOD_RES (102)..(102): Selenocysteine
  MOD_RES (131)..(131): Selenocysteine
  MOD_RES (142)..(142): Selenocysteine
  MOD_RES (166)..(166): Selenocysteine
  MOD_RES (183)..(183): Selenocysteine
  MOD_RES (189)..(189): Selenocysteine
  MOD_RES (193)..(193): Selenocysteine
  MOD_RES (259)..(259): Selenocysteine
EDEKLKKLVEQNGXDDWKVIANYLPNRXDVQCQHRWQKVLNPELIKGPWXKEEDQRVIELVQKYGPKRWSVIAKHLKGRIGKQCRERWHNHLNPEVKKXSWXEEEDRIIYQAHKRLGNRWAEIAKLLPGRXDNAIKNHWNSXMRRKVEQEGYLQESSKASQPAVAXSFQKNSHLMGFAQAPPXAQLPAXGQPXVNNDYSYYHISEAQNVSSHVPYPVALHVNIVNVPQPAAAAIQRHYNDEDPEKEKRIKELELLLMSXENELKGQQVLPVRLSSCA

SEQ ID NO: 16902 - protein, 103 aa, Homo sapiens
  MOD_RES (41)..(41): Selenocysteine
  MOD_RES (44)..(44): Selenocysteine
  MOD_RES (60)..(60): Selenocysteine
  MOD_RES (74)..(74): Selenocysteine
  MOD_RES (96)..(96): Selenocysteine
MARRPRHSIYSSDEDDEDFEMCDHDYDGLLPKSGKRHLGKXRWXREEDEKLKKLVEQNGXDDWKVIANYLPNRXDVQCQHRWQKVLNPELIKGPWXKEEDQRN

SEQ ID NO: 16903 - protein, 347 aa, Homo sapiens
  MOD_RES (41)..(41): Selenocysteine
  MOD_RES (44)..(44): Selenocysteine
  MOD_RES (60)..(60): Selenocysteine
  MOD_RES (74)..(74): Selenocysteine
  MOD_RES (96)..(96): Selenocysteine
  MOD_RES (145)..(145): Selenocysteine
  MOD_RES (148)..(148): Selenocysteine
  MOD_RES (177)..(177): Selenocysteine
  MOD_RES (188)..(188): Selenocysteine
  MOD_RES (212)..(212): Selenocysteine
  MOD_RES (229)..(229): Selenocysteine
  MOD_RES (235)..(235): Selenocysteine
  MOD_RES (239)..(239): Selenocysteine
  MOD_RES (305)..(305): Selenocysteine
  MOD_RES (339)..(339): Selenocysteine
MARRPRHSIYSSDEDDEDFEMCDHDYDGLLPKSGKRHLGKXRWXREEDEKLKKLVEQNGXDDWKVIANYLPNRXDVQCQHRWQKVLNPELIKGPWXKEEDQRVIELVQKYGPKRWSVIAKHLKGRIGKQCRERWHNHLNPEVKKXSWXEEEDRIIYQAHKRLGNRWAEIAKLLPGRXDNAIKNHWNSXMRRKVEQEGYLQESSKASQPAVAXSFQKNSHLMGFAQAPPXAQLPAXGQPXVNNDYSYYHISEAQNVSSHVPYPVALHVNIVNVPQPAAAAIQRHYNDEDPEKEKRIKELELLLMSXENELKGQQLCGPLLNSDIFSDWAANWDGSLCFAXYIVNQQRQ

SEQ ID NO: 16904 - protein, 350 aa, Homo sapiens
  MOD_RES (41)..(41): Selenocysteine
  MOD_RES (44)..(44): Selenocysteine
  MOD_RES (60)..(60): Selenocysteine
  MOD_RES (74)..(74): Selenocysteine
  MOD_RES (96)..(96): Selenocysteine
  MOD_RES (145)..(145): Selenocysteine
  MOD_RES (148)..(148): Selenocysteine
  MOD_RES (177)..(177): Selenocysteine
  MOD_RES (188)..(188): Selenocysteine
  MOD_RES (212)..(212): Selenocysteine
  MOD_RES (229)..(229): Selenocysteine
  MOD_RES (235)..(235): Selenocysteine
  MOD_RES (239)..(239): Selenocysteine
  MOD_RES (305)..(305): Selenocysteine
  MOD_RES (342)..(342): Selenocysteine
MARRPRHSIYSSDEDDEDFEMCDHDYDGLLPKSGKRHLGKXRWXREEDEKLKKLVEQNGXDDWKVIANYLPNRXDVQCQHRWQKVLNPELIKGPWXKEEDQRVIELVQKYGPKRWSVIAKHLKGRIGKQCRERWHNHLNPEVKKXSWXEEEDRIIYQAHKRLGNRWAEIAKLLPGRXDNAIKNHWNSXMRRKVEQEGYLQESSKASQPAVAXSFQKNSHLMGFAQAPPXAQLPAXGQPXVNNDYSYYHISEAQNVSSHVPYPVALHVNIVNVPQPAAAAIQRHYNDEDPEKEKRIKELELLLMSXENELKGQQVLPLCGPLLNSDIFSDWAANWDGSLCFAXYIVNQQRQ

SEQ ID NO: 16905 - protein, 364 aa, Homo sapiens
  MOD_RES (41)..(41): Selenocysteine
  MOD_RES (44)..(44): Selenocysteine
  MOD_RES (60)..(60): Selenocysteine
  MOD_RES (74)..(74): Selenocysteine
  MOD_RES (96)..(96): Selenocysteine
  MOD_RES (145)..(145): Selenocysteine
  MOD_RES (148)..(148): Selenocysteine
  MOD_RES (177)..(177): Selenocysteine
  MOD_RES (188)..(188): Selenocysteine
  MOD_RES (212)..(212): Selenocysteine
  MOD_RES (229)..(229): Selenocysteine
  MOD_RES (235)..(235): Selenocysteine
  MOD_RES (239)..(239): Selenocysteine
  MOD_RES (305)..(305): Selenocysteine
  MOD_RES (320)..(320): Selenocysteine
  MOD_RES (335)..(335): Selenocysteine
  MOD_RES (337)..(337): Selenocysteine
  MOD_RES (345)..(345): Selenocysteine
  MOD_RES (347)..(348): Selenocysteine
  MOD_RES (355)..(355): Selenocysteine
  MOD_RES (358)..(358): Selenocysteine
  MOD_RES (363)..(363): Selenocysteine
MARRPRHSIYSSDEDDEDFEMCDHDYDGLLPKSGKRHLGKXRWXREEDEKLKKLVEQNGXDDWKVIANYLPNRXDVQCQHRWQKVLNPELIKGPWXKEEDQRVIELVQKYGPKRWSVIAKHLKGRIGKQCRERWHNHLNPEVKKXSWXEEEDRIIYQAHKRLGNRWAEIAKLLPGRXDNAIKNHWNSXMRRKVEQEGYLQESSKASQPAVAXSFQKNSHLMGFAQAPPXAQLPAXGQPXVNNDYSYYHISEAQNVSSHVPYPVALHVNIVNVPQPAAAAIQRHYNDEDPEKEKRIKELELLLMSXENELKGQQVLPFLNXSSNHENSDLEMPSLXSXPLIGHKLXVXXPFHRDQXVKXQKENXV

SEQ ID NO: 16906 - protein, 374 aa, Homo sapiens
  MOD_RES (41)..(41): Selenocysteine
  MOD_RES (44)..(44): Selenocysteine
  MOD_RES (60)..(60): Selenocysteine
  MOD_RES (74)..(74): Selenocysteine
  MOD_RES (96)..(96): Selenocysteine
  MOD_RES (145)..(145): Selenocysteine
  MOD_RES (148)..(148): Selenocysteine
  MOD_RES (177)..(177): Selenocysteine
  MOD_RES (188)..(188): Selenocysteine
  MOD_RES (212)..(212): Selenocysteine
  MOD_RES (229)..(229): Selenocysteine
  MOD_RES (235)..(235): Selenocysteine
  MOD_RES (239)..(239): Selenocysteine
  MOD_RES (305)..(305): Selenocysteine
  MOD_RES (317)..(317): Selenocysteine
  MOD_RES (321)..(321): Selenocysteine
  MOD_RES (330)..(331): Selenocysteine
  MOD_RES (336)..(336): Selenocysteine
  MOD_RES (354)..(354): Selenocysteine
MARRPRHSIYSSDEDDEDFEMCDHDYDGLLPKSGKRHLGKXRWXREEDEKLKKLVEQNGXDDWKVIANYLPNRXDVQCQHRWQKVLNPELIKGPWXKEEDQRVIELVQKYGPKRWSVIAKHLKGRIGKQCRERWHNHLNPEVKKXSWXEEEDRIIYQAHKRLGNRWAEIAKLLPGRXDNAIKNHWNSXMRRKVEQEGYLQESSKASQPAVAXSFQKNSHLMGFAQAPPXAQLPAXGQPXVNNDYSYYHISEAQNVSSHVPYPVALHVNIVNVPQPAAAAIQRHYNDEDPEKEKRIKELELLLMSXENELKGQQVLPXQNHXCSYPGWHSXXIADHXRPHGDSAPVSCLGEHHSXPSLPADPGSLPEESASPASS

SEQ ID NO: 16907 - protein, 385 aa, Homo sapiens
  MOD_RES (41)..(41): Selenocysteine
  MOD_RES (44)..(44): Selenocysteine
  MOD_RES (60)..(60): Selenocysteine
  MOD_RES (74)..(74): Selenocysteine
  MOD_RES (96)..(96): Selenocysteine
  MOD_RES (145)..(145): Selenocysteine
  MOD_RES (148)..(148): Selenocysteine
  MOD_RES (177)..(177): Selenocysteine
  MOD_RES (188)..(188): Selenocysteine
  MOD_RES (212)..(212): Selenocysteine
  MOD_RES (229)..(229): Selenocysteine
  MOD_RES (235)..(235): Selenocysteine
  MOD_RES (239)..(239): Selenocysteine
  MOD_RES (305)..(305): Selenocysteine
  MOD_RES (314)..(314): Selenocysteine
  MOD_RES (318)..(318): Selenocysteine
  MOD_RES (327)..(328): Selenocysteine
  MOD_RES (333)..(333): Selenocysteine
  MOD_RES (351)..(351): Selenocysteine
  MOD_RES (380)..(380): Selenocysteine
MARRPRHSIYSSDEDDEDFEMCDHDYDGLLPKSGKRHLGKXRWXREEDEKLKKLVEQNGXDDWKVIANYLPNRXDVQCQHRWQKVLNPELIKGPWXKEEDQRVIELVQKYGPKRWSVIAKHLKGRIGKQCRERWHNHLNPEVKKXSWXEEEDRIIYQAHKRLGNRWAEIAKLLPGRXDNAIKNHWNSXMRRKVEQEGYLQESSKASQPAVAXSFQKNSHLMGFAQAPPXAQLPAXGQPXVNNDYSYYHISEAQNVSSHVPYPVALHVNIVNVPQPAAAAIQRHYNDEDPEKEKRIKELELLLMSXENELKGQQXQNHXCSYPGWHSXXIADHXRPHGDSAPVSCLGEHHSXPSLPADPGSLPEESASPARCRVSGGPCSXSEGQP

SEQ ID NO: 16908 - protein, 388 aa, Homo sapiens
  MOD_RES (41)..(41): Selenocysteine
  MOD_RES (44)..(44): Selenocysteine
  MOD_RES (60)..(60): Selenocysteine
  MOD_RES (74)..(74): Selenocysteine
  MOD_RES (96)..(96): Selenocysteine
  MOD_RES (145)..(145): Selenocysteine
  MOD_RES (148)..(148): Selenocysteine
  MOD_RES (177)..(177): Selenocysteine
  MOD_RES (188)..(188): Selenocysteine
  MOD_RES (212)..(212): Selenocysteine
  MOD_RES (229)..(229): Selenocysteine
  MOD_RES (235)..(235): Selenocysteine
  MOD_RES (239)..(239): Selenocysteine
  MOD_RES (305)..(305): Selenocysteine
  MOD_RES (317)..(317): Selenocysteine
  MOD_RES (321)..(321): Selenocysteine
  MOD_RES (330)..(331): Selenocysteine
  MOD_RES (336)..(336): Selenocysteine
  MOD_RES (354)..(354): Selenocysteine
  MOD_RES (383)..(383): Selenocysteine
MARRPRHSIYSSDEDDEDFEMCDHDYDGLLPKSGKRHLGKXRWXREEDEKLKKLVEQNGXDDWKVIANYLPNRXDVQCQHRWQKVLNPELIKGPWXKEEDQRVIELVQKYGPKRWSVIAKHLKGRIGKQCRERWHNHLNPEVKKXSWXEEEDRIIYQAHKRLGNRWAEIAKLLPGRXDNAIKNHWNSXMRRKVEQEGYLQESSKASQPAVAXSFQKNSHLMGFAQAPPXAQLPAXGQPXVNNDYSYYHISEAQNVSSHVPYPVALHVNIVNVPQPAAAAIQRHYNDEDPEKEKRIKELELLLMSXENELKGQQVLPXQNHXCSYPGWHSXXIADHXRPHGDSAPVSCLGEHHSXPSLPADPGSLPEESASPARCRVSGGPCSXSEGQP

SEQ ID NO: 16909 - protein, 402 aa, Homo sapiens
  MOD_RES (41)..(41): Selenocysteine
  MOD_RES (44)..(44): Selenocysteine
  MOD_RES (60)..(60): Selenocysteine
  MOD_RES (74)..(74): Selenocysteine
  MOD_RES (96)..(96): Selenocysteine
  MOD_RES (145)..(145): Selenocysteine
  MOD_RES (148)..(148): Selenocysteine
  MOD_RES (177)..(177): Selenocysteine
  MOD_RES (188)..(188): Selenocysteine
  MOD_RES (212)..(212): Selenocysteine
  MOD_RES (229)..(229): Selenocysteine
  MOD_RES (235)..(235): Selenocysteine
  MOD_RES (239)..(239): Selenocysteine
  MOD_RES (305)..(305): Selenocysteine
  MOD_RES (317)..(317): Selenocysteine
  MOD_RES (321)..(321): Selenocysteine
  MOD_RES (330)..(331): Selenocysteine
  MOD_RES (336)..(336): Selenocysteine
  MOD_RES (354)..(354): Selenocysteine
  MOD_RES (381)..(381): Selenocysteine
  MOD_RES (395)..(395): Selenocysteine
MARRPRHSIYSSDEDDEDFEMCDHDYDGLLPKSGKRHLGKXRWXREEDEKLKKLVEQNGXDDWKVIANYLPNRXDVQCQHRWQKVLNPELIKGPWXKEEDQRVIELVQKYGPKRWSVIAKHLKGRIGKQCRERWHNHLNPEVKKXSWXEEEDRIIYQAHKRLGNRWAEIAKLLPGRXDNAIKNHWNSXMRRKVEQEGYLQESSKASQPAVAXSFQKNSHLMGFAQAPPXAQLPAXGQPXVNNDYSYYHISEAQNVSSHVPYPVALHVNIVNVPQPAAAAIQRHYNDEDPEKEKRIKELELLLMSXENELKGQQVLPXQNHXCSYPGWHSXXIADHXRPHGDSAPVSCLGEHHSXPSLPADPGSLPEESASPARCMIVHQGXILDNVKNLLEFAEXLQFIDSM

SEQ ID NO: 16910 - protein, 419 aa, Homo sapiens
  MOD_RES (41)..(41): Selenocysteine
  MOD_RES (44)..(44): Selenocysteine
  MOD_RES (60)..(60): Selenocysteine
  MOD_RES (74)..(74): Selenocysteine
  MOD_RES (96)..(96): Selenocysteine
  MOD_RES (145)..(145): Selenocysteine
  MOD_RES (148)..(148): Selenocysteine
  MOD_RES (177)..(177): Selenocysteine
  MOD_RES (188)..(188): Selenocysteine
  MOD_RES (212)..(212): Selenocysteine
  MOD_RES (229)..(229): Selenocysteine
  MOD_RES (235)..(235): Selenocysteine
  MOD_RES (239)..(239): Selenocysteine
  MOD_RES (305)..(305): Selenocysteine
  MOD_RES (314)..(314): Selenocysteine
  MOD_RES (318)..(318): Selenocysteine
  MOD_RES (327)..(328): Selenocysteine
  MOD_RES (333)..(333): Selenocysteine
  MOD_RES (351)..(351): Selenocysteine
  MOD_RES (395)..(395): Selenocysteine
MARRPRHSIYSSDEDDEDFEMCDHDYDGLLPKSGKRHLGKXRWXREEDEKLKKLVEQNGXDDWKVIANYLPNRXDVQCQHRWQKVLNPELIKGPWXKEEDQRVIELVQKYGPKRWSVIAKHLKGRIGKQCRERWHNHLNPEVKKXSWXEEEDRIIYQAHKRLGNRWAEIAKLLPGRXDNAIKNHWNSXMRRKVEQEGYLQESSKASQPAVAXSFQKNSHLMGFAQAPPXAQLPAXGQPXVNNDYSYYHISEAQNVSSHVPYPVALHVNIVNVPQPAAAAIQRHYNDEDPEKEKRIKELELLLMSXENELKGQQXQNHXCSYPGWHSXXIADHXRPHGDSAPVSCLGEHHSXPSLPADPGSLPEESASPARILHHGVISAVLNSLKKQIFHLANIXQAKPYSFSKERAMGLNLQENLAQG

SEQ ID NO: 16911 - protein, 422 aa, Homo sapiens
  MOD_RES (41)..(41): Selenocysteine
  MOD_RES (44)..(44): Selenocysteine
  MOD_RES (60)..(60): Selenocysteine
  MOD_RES (74)..(74): Selenocysteine
  MOD_RES (96)..(96): Selenocysteine
  MOD_RES (145)..(145): Selenocysteine
  MOD_RES (148)..(148): Selenocysteine
  MOD_RES (177)..(177): Selenocysteine
  MOD_RES (188)..(188): Selenocysteine
  MOD_RES (212)..(212): Selenocysteine
  MOD_RES (229)..(229): Selenocysteine
  MOD_RES (235)..(235): Selenocysteine
  MOD_RES (239)..(239): Selenocysteine
  MOD_RES (305)..(305): Selenocysteine
  MOD_RES (317)..(317): Selenocysteine
  MOD_RES (321)..(321): Selenocysteine
  MOD_RES (330)..(331): Selenocysteine
  MOD_RES (336)..(336): Selenocysteine
  MOD_RES (354)..(354): Selenocysteine
  MOD_RES (398)..(398): Selenocysteine
MARRPRHSIYSSDEDDEDFEMCDHDYDGLLPKSGKRHLGKXRWXREEDEKLKKLVEQNGXDDWKVIANYLPNRXDVQCQHRWQKVLNPELIKGPWXKEEDQRVIELVQKYGPKRWSVIAKHLKGRIGKQCRERWHNHLNPEVKKXSWXEEEDRIIYQAHKRLGNRWAEIAKLLPGRXDNAIKNHWNSXMRRKVEQEGYLQESSKASQPAVAXSFQKNSHLMGFAQAPPXAQLPAXGQPXVNNDYSYYHISEAQNVSSHVPYPVALHVNIVNVPQPAAAAIQRHYNDEDPEKEKRIKELELLLMSXENELKGQQVLPXQNHXCSYPGWHSXXIADHXRPHGDSAPVSCLGEHHSXPSLPADPGSLPEESASPARILHHGVISAVLNSLKKQIFHLANIXQAKPYSFSKERAMGLNLQENLAQG

SEQ ID NO: 16912 - protein, 446 aa, Homo sapiens
  MOD_RES (41)..(41): Selenocysteine
  MOD_RES (44)..(44): Selenocysteine
  MOD_RES (60)..(60): Selenocysteine
  MOD_RES (74)..(74): Selenocysteine
  MOD_RES (96)..(96): Selenocysteine
  MOD_RES (145)..(145): Selenocysteine
  MOD_RES (148)..(148): Selenocysteine
  MOD_RES (177)..(177): Selenocysteine
  MOD_RES (188)..(188): Selenocysteine
  MOD_RES (212)..(212): Selenocysteine
  MOD_RES (229)..(229): Selenocysteine
  MOD_RES (235)..(235): Selenocysteine
  MOD_RES (239)..(239): Selenocysteine
  MOD_RES (305)..(305): Selenocysteine
  MOD_RES (314)..(314): Selenocysteine
  MOD_RES (318)..(318): Selenocysteine
  MOD_RES (327)..(328): Selenocysteine
  MOD_RES (333)..(333): Selenocysteine
  MOD_RES (351)..(351): Selenocysteine
  MOD_RES (378)..(378): Selenocysteine
  MOD_RES (392)..(392): Selenocysteine
  MOD_RES (402)..(402): Selenocysteine
  MOD_RES (417)..(417): Selenocysteine
  MOD_RES (419)..(419): Selenocysteine
  MOD_RES (427)..(427): Selenocysteine
  MOD_RES (429)..(430): Selenocysteine
  MOD_RES (437)..(437): Selenocysteine
  MOD_RES (440)..(440): Selenocysteine
  MOD_RES (445)..(445): Selenocysteine
MARRPRHSIYSSDEDDEDFEMCDHDYDGLLPKSGKRHLGKXRWXREEDEKLKKLVEQNGXDDWKVIANYLPNRXDVQCQHRWQKVLNPELIKGPWXKEEDQRVIELVQKYGPKRWSVIAKHLKGRIGKQCRERWHNHLNPEVKKXSWXEEEDRIIYQAHKRLGNRWAEIAKLLPGRXDNAIKNHWNSXMRRKVEQEGYLQESSKASQPAVAXSFQKNSHLMGFAQAPPXAQLPAXGQPXVNNDYSYYHISEAQNVSSHVPYPVALHVNIVNVPQPAAAAIQRHYNDEDPEKEKRIKELELLLMSXENELKGQQXQNHXCSYPGWHSXXIADHXRPHGDSAPVSCLGEHHSXPSLPADPGSLPEESASPARCMIVHQGXILDNVKNLLEFAEXLQFIDSFLNXSSNHENSDLEMPSLXSXPLIGHKLXVXXPFHRDQXVKXQKENXV

SEQ ID NO: 16913 - protein, 449 aa, Homo sapiens
  MOD_RES (41)..(41): Selenocysteine
  MOD_RES (44)..(44): Selenocysteine
  MOD_RES (60)..(60): Selenocysteine
  MOD_RES (74)..(74): Selenocysteine
  MOD_RES (96)..(96): Selenocysteine
  MOD_RES (145)..(145): Selenocysteine
  MOD_RES (148)..(148): Selenocysteine
  MOD_RES (177)..(177): Selenocysteine
  MOD_RES (188)..(188): Selenocysteine
  MOD_RES (212)..(212): Selenocysteine
  MOD_RES (229)..(229): Selenocysteine
  MOD_RES (235)..(235): Selenocysteine
  MOD_RES (239)..(239): Selenocysteine
  MOD_RES (305)..(305): Selenocysteine
  MOD_RES (317)..(317): Selenocysteine
  MOD_RES (321)..(321): Selenocysteine
  MOD_RES (330)..(331): Selenocysteine
  MOD_RES (336)..(336): Selenocysteine
  MOD_RES (354)..(354): Selenocysteine
  MOD_RES (381)..(381): Selenocysteine
  MOD_RES (395)..(395): Selenocysteine
  MOD_RES (405)..(405): Selenocysteine
  MOD_RES (420)..(420): Selenocysteine
  MOD_RES (422)..(422): Selenocysteine
  MOD_RES (430)..(430): Selenocysteine
  MOD_RES (432)..(433): Selenocysteine
  MOD_RES (440)..(440): Selenocysteine
  MOD_RES (443)..(443): Selenocysteine
  MOD_RES (448)..(448): Selenocysteine
MARRPRHSIYSSDEDDEDFEMCDHDYDGLLPKSGKRHLGKXRWXREEDEKLKKLVEQNGXDDWKVIANYLPNRXDVQCQHRWQKVLNPELIKGPWXKEEDQRVIELVQKYGPKRWSVIAKHLKGRIGKQCRERWHNHLNPEVKKXSWXEEEDRIIYQAHKRLGNRWAEIAKLLPGRXDNAIKNHWNSXMRRKVEQEGYLQESSKASQPAVAXSFQKNSHLMGFAQAPPXAQLPAXGQPXVNNDYSYYHISEAQNVSSHVPYPVALHVNIVNVPQPAAAAIQRHYNDEDPEKEKRIKELELLLMSXENELKGQQVLPXQNHXCSYPGWHSXXIADHXRPHGDSAPVSCLGEHHSXPSLPADPGSLPEESASPARCMIVHQGXILDNVKNLLEFAEXLQFIDSFLNXSSNHENSDLEMPSLXSXPLIGHKLXVXXPFHRDQXVKXQKENXV

SEQ ID NO: 16914 - protein, 554 aa, Homo sapiens
  MOD_RES (41)..(41): Selenocysteine
  MOD_RES (44)..(44): Selenocysteine
  MOD_RES (60)..(60): Selenocysteine
  MOD_RES (74)..(74): Selenocysteine
  MOD_RES (96)..(96): Selenocysteine
  MOD_RES (145)..(145): Selenocysteine
  MOD_RES (148)..(148): Selenocysteine
  MOD_RES (177)..(177): Selenocysteine
  MOD_RES (188)..(188): Selenocysteine
  MOD_RES (212)..(212): Selenocysteine
  MOD_RES (229)..(229): Selenocysteine
  MOD_RES (235)..(235): Selenocysteine
  MOD_RES (239)..(239): Selenocysteine
  MOD_RES (305)..(305): Selenocysteine
  MOD_RES (317)..(317): Selenocysteine
  MOD_RES (321)..(321): Selenocysteine
  MOD_RES (330)..(331): Selenocysteine
  MOD_RES (336)..(336): Selenocysteine
  MOD_RES (354)..(354): Selenocysteine
  MOD_RES (381)..(381): Selenocysteine
  MOD_RES (411)..(411): Selenocysteine
  MOD_RES (425)..(425): Selenocysteine
  MOD_RES (458)..(458): Selenocysteine
  MOD_RES (476)..(476): Selenocysteine
  MOD_RES (491)..(491): Selenocysteine
  MOD_RES (510)..(510): Selenocysteine
  MOD_RES (525)..(525): Selenocysteine
  MOD_RES (527)..(527): Selenocysteine
  MOD_RES (535)..(535): Selenocysteine
  MOD_RES (537)..(538): Selenocysteine
  MOD_RES (545)..(545): Selenocysteine
  MOD_RES (548)..(548): Selenocysteine
  MOD_RES (553)..(553): Selenocysteine
MARRPRHSIYSSDEDDEDFEMCDHDYDGLLPKSGKRHLGKXRWXREEDEKLKKLVEQNGXDDWKVIANYLPNRXDVQCQHRWQKVLNPELIKGPWXKEEDQRVIELVQKYGPKRWSVIAKHLKGRIGKQCRERWHNHLNPEVKKXSWXEEEDRIIYQAHKRLGNRWAEIAKLLPGRXDNAIKNHWNSXMRRKVEQEGYLQESSKASQPAVAXSFQKNSHLMGFAQAPPXAQLPAXGQPXVNNDYSYYHISEAQNVSSHVPYPVALHVNIVNVPQPAAAAIQRHYNDEDPEKEKRIKELELLLMSXENELKGQQVLPXQNHXCSYPGWHSXXIADHXRPHGDSAPVSCLGEHHSXPSLPADPGSLPEESASPARCMIVHQGXILDNDSSSWCDLSSFEFFEEADFSPSQHHXGKALQLQQREGNGXKPAGEPSPRVNKRMLSESSLDPPKVLPPARHSXIPLVILRKKRGQASPLAXGDCSSFIFADVSSSXPKRSPVKSLPFSPSQFLNXSSNHENSDLEMPSLXSXPLIGHKLXVXXPFHRDQXVKXQKENXV

SEQ ID NO: 16915 - protein, 555 aa, Homo sapiens
  MOD_RES (41)..(41): Selenocysteine
  MOD_RES (44)..(44): Selenocysteine
  MOD_RES (60)..(60): Selenocysteine
  MOD_RES (74)..(74): Selenocysteine
  MOD_RES (96)..(96): Selenocysteine
  MOD_RES (145)..(145): Selenocysteine
  MOD_RES (148)..(148): Selenocysteine
  MOD_RES (177)..(177): Selenocysteine
  MOD_RES (188)..(188): Selenocysteine
  MOD_RES (212)..(212): Selenocysteine
  MOD_RES (229)..(229): Selenocysteine
  MOD_RES (235)..(235): Selenocysteine
  MOD_RES (239)..(239): Selenocysteine
  MOD_RES (305)..(305): Selenocysteine
  MOD_RES (320)..(320): Selenocysteine
  MOD_RES (335)..(335): Selenocysteine
  MOD_RES (337)..(337): Selenocysteine
  MOD_RES (345)..(345): Selenocysteine
  MOD_RES (347)..(348): Selenocysteine
  MOD_RES (355)..(355): Selenocysteine
  MOD_RES (358)..(358): Selenocysteine
  MOD_RES (363)..(363): Selenocysteine
  MOD_RES (367)..(367): Selenocysteine
  MOD_RES (381)..(381): Selenocysteine
  MOD_RES (383)..(383): Selenocysteine
  MOD_RES (405)..(405): Selenocysteine
  MOD_RES (449)..(449): Selenocysteine
  MOD_RES (468)..(468): Selenocysteine
  MOD_RES (472)..(472): Selenocysteine
  MOD_RES (474)..(474): Selenocysteine
  MOD_RES (485)..(485): Selenocysteine
  MOD_RES (505)..(505): Selenocysteine
  MOD_RES (522)..(522): Selenocysteine
  MOD_RES (536)..(536): Selenocysteine
  MOD_RES (552)..(552): Selenocysteine
MARRPRHSIYSSDEDDEDFEMCDHDYDGLLPKSGKRHLGKXRWXREEDEKLKKLVEQNGXDDWKVIANYLPNRXDVQCQHRWQKVLNPELIKGPWXKEEDQRVIELVQKYGPKRWSVIAKHLKGRIGKQCRERWHNHLNPEVKKXSWXEEEDRIIYQAHKRLGNRWAEIAKLLPGRXDNAIKNHWNSXMRRKVEQEGYLQESSKASQPAVAXSFQKNSHLMGFAQAPPXAQLPAXGQPXVNNDYSYYHISEAQNVSSHVPYPVALHVNIVNVPQPAAAAIQRHYNDEDPEKEKRIKELELLLMSXENELKGQQVLPFLNXSSNHENSDLEMPSLXSXPLIGHKLXVXXPFHRDQXVKXQKENXVFRXPAIKRSILESSPRXPXPFKHALAAQEIKYGPLKMLPQXPSHLVEDLQDVIKQESDESGIVAEFQENGPPLLKKIKQEVESPXDKSGNFFCSHHWEGDSLNXQLFXQXSPVADAPNILXSSVLMAPASEDEDNVLKAFXVPKNRSLASPLQPCSSXWEPASCGKMEEQMXSSSQARKYVNAFSARXLVM

SEQ ID NO: 16916 - protein, 581 aa, Homo sapiens
  MOD_RES (41)..(41): Selenocysteine
  MOD_RES (44)..(44): Selenocysteine
  MOD_RES (60)..(60): Selenocysteine
  MOD_RES (74)..(74): Selenocysteine
  MOD_RES (96)..(96): Selenocysteine
  MOD_RES (145)..(145): Selenocysteine
  MOD_RES (148)..(148): Selenocysteine
  MOD_RES (177)..(177): Selenocysteine
  MOD_RES (188)..(188): Selenocysteine
  MOD_RES (212)..(212): Selenocysteine
  MOD_RES (229)..(229): Selenocysteine
  MOD_RES (235)..(235): Selenocysteine
  MOD_RES (239)..(239): Selenocysteine
  MOD_RES (305)..(305): Selenocysteine
  MOD_RES (317)..(317): Selenocysteine
  MOD_RES (321)..(321): Selenocysteine
  MOD_RES (330)..(331): Selenocysteine
  MOD_RES (336)..(336): Selenocysteine
  MOD_RES (354)..(354): Selenocysteine
  MOD_RES (381)..(381): Selenocysteine
  MOD_RES (395)..(395): Selenocysteine
  MOD_RES (405)..(405): Selenocysteine
  MOD_RES (420)..(420): Selenocysteine
  MOD_RES (422)..(422): Selenocysteine
  MOD_RES (430)..(430): Selenocysteine
  MOD_RES (432)..(433): Selenocysteine
  MOD_RES (440)..(440): Selenocysteine
  MOD_RES (443)..(443): Selenocysteine
  MOD_RES (448)..(448): Selenocysteine
  MOD_RES (452)..(452): Selenocysteine
  MOD_RES (466)..(466): Selenocysteine
  MOD_RES (468)..(468): Selenocysteine
  MOD_RES (490)..(490): Selenocysteine
  MOD_RES (532)..(532): Selenocysteine
  MOD_RES (562)..(564): Selenocysteine
  MOD_RES (578)..(578): Selenocysteine
MARRPRHSIYSSDEDDEDFEMCDHDYDGLLPKSGKRHLGKXRWXREEDEKLKKLVEQNGXDDWKVIANYLPNRXDVQCQHRWQKVLNPELIKGPWXKEEDQRVIELVQKYGPKRWSVIAKHLKGRIGKQCRERWHNHLNPEVKKXSWXEEEDRIIYQAHKRLGNRWAEIAKLLPGRXDNAIKNHWNSXMRRKVEQEGYLQESSKASQPAVAXSFQKNSHLMGFAQAPPXAQLPAXGQPXVNNDYSYYHISEAQNVSSHVPYPVALHVNIVNVPQPAAAAIQRHYNDEDPEKEKRIKELELLLMSXENELKGQQVLPXQNHXCSYPGWHSXXIADHXRPHGDSAPVSCLGEHHSXPSLPADPGSLPEESASPARCMIVHQGXILDNVKNLLEFAEXLQFIDSFLNXSSNHENSDLEMPSLXSXPLIGHKLXVXXPFHRDQXVKXQKENXVFRXPAIKRSILESSPRXPXPFKHALAAQEIKYGPLKMLPQXPSHLVEDLQDVIKQESDESGIVAEFQENGPPLLKKIKQEVNXQPFGSNKLRILPPLFLVCSLMCLPLALCNXXXFRARFSYKVQRKGXARL

SEQ ID NO: 16917 - protein, 581 aa, Homo sapiens
  MOD_RES (41)..(41): Selenocysteine
  MOD_RES (44)..(44): Selenocysteine
  MOD_RES (60)..(60): Selenocysteine
  MOD_RES (74)..(74): Selenocysteine
  MOD_RES (96)..(96): Selenocysteine
  MOD_RES (145)..(145): Selenocysteine
  MOD_RES (148)..(148): Selenocysteine
  MOD_RES (177)..(177): Selenocysteine
  MOD_RES (188)..(188): Selenocysteine
  MOD_RES (212)..(212): Selenocysteine
  MOD_RES (229)..(229): Selenocysteine
  MOD_RES (235)..(235): Selenocysteine
  MOD_RES (239)..(239): Selenocysteine
  MOD_RES (305)..(305): Selenocysteine
  MOD_RES (317)..(317): Selenocysteine
  MOD_RES (321)..(321): Selenocysteine
  MOD_RES (330)..(331): Selenocysteine
  MOD_RES (336)..(336): Selenocysteine
  MOD_RES (354)..(354): Selenocysteine
  MOD_RES (381)..(381): Selenocysteine
  MOD_RES (395)..(395): Selenocysteine
  MOD_RES (405)..(405): Selenocysteine
  MOD_RES (420)..(420): Selenocysteine
  MOD_RES (422)..(422): Selenocysteine
  MOD_RES (430)..(430): Selenocysteine
  MOD_RES (432)..(433): Selenocysteine
  MOD_RES (440)..(440): Selenocysteine
  MOD_RES (443)..(443): Selenocysteine
  MOD_RES (448)..(448): Selenocysteine
  MOD_RES (452)..(452): Selenocysteine
  MOD_RES (466)..(466): Selenocysteine
  MOD_RES (468)..(468): Selenocysteine
  MOD_RES (490)..(490): Selenocysteine
  MOD_RES (532)..(532): Selenocysteine
  MOD_RES (562)..(564): Selenocysteine
MARRPRHSIYSSDEDDEDFEMCDHDYDGLLPKSGKRHLGKXRWXREEDEKLKKLVEQNGXDDWKVIANYLPNRXDVQCQHRWQKVLNPELIKGPWXKEEDQRVIELVQKYGPKRWSVIAKHLKGRIGKQCRERWHNHLNPEVKKXSWXEEEDRIIYQAHKRLGNRWAEIAKLLPGRXDNAIKNHWNSXMRRKVEQEGYLQESSKASQPAVAXSFQKNSHLMGFAQAPPXAQLPAXGQPXVNNDYSYYHISEAQNVSSHVPYPVALHVNIVNVPQPAAAAIQRHYNDEDPEKEKRIKELELLLMSXENELKGQQVLPXQNHXCSYPGWHSXXIADHXRPHGDSAPVSCLGEHHSXPSLPADPGSLPEESASPARCMIVHQGXILDNVKNLLEFAEXLQFIDSFLNXSSNHENSDLEMPSLXSXPLIGHKLXVXXPFHRDQXVKXQKENXVFRXPAIKRSILESSPRXPXPFKHALAAQEIKYGPLKMLPQXPSHLVEDLQDVIKQESDESGIVAEFQENGPPLLKKIKQEVNXQPFGSNKLRILPPLFLVCSLMCLPLALCNXXXFRARFSYKVQRKGGISN

SEQ ID NO: 16918 - protein, 603 aa, Homo sapiens
  MOD_RES (41)..(41): Selenocysteine
  MOD_RES (44)..(44): Selenocysteine
  MOD_RES (60)..(60): Selenocysteine
  MOD_RES (74)..(74): Selenocysteine
  MOD_RES (96)..(96): Selenocysteine
  MOD_RES (145)..(145): Selenocysteine
  MOD_RES (148)..(148): Selenocysteine
  MOD_RES (177)..(177): Selenocysteine
  MOD_RES (188)..(188): Selenocysteine
  MOD_RES (212)..(212): Selenocysteine
  MOD_RES (229)..(229): Selenocysteine
  MOD_RES (235)..(235): Selenocysteine
  MOD_RES (239)..(239): Selenocysteine
  MOD_RES (305)..(305): Selenocysteine
  MOD_RES (317)..(317): Selenocysteine
  MOD_RES (321)..(321): Selenocysteine
  MOD_RES (330)..(331): Selenocysteine
  MOD_RES (336)..(336): Selenocysteine
  MOD_RES (354)..(354): Selenocysteine
  MOD_RES (381)..(381): Selenocysteine
  MOD_RES (395)..(395): Selenocysteine
  MOD_RES (405)..(405): Selenocysteine
  MOD_RES (420)..(420): Selenocysteine
  MOD_RES (422)..(422): Selenocysteine
  MOD_RES (430)..(430): Selenocysteine
  MOD_RES (432)..(433): Selenocysteine
  MOD_RES (440)..(440): Selenocysteine
  MOD_RES (443)..(443): Selenocysteine
  MOD_RES (448)..(448): Selenocysteine
  MOD_RES (452)..(452): Selenocysteine
  MOD_RES (466)..(466): Selenocysteine
  MOD_RES (468)..(468): Selenocysteine
  MOD_RES (490)..(490): Selenocysteine
  MOD_RES (533)..(533): Selenocysteine
  MOD_RES (553)..(553): Selenocysteine
  MOD_RES (570)..(570): Selenocysteine
  MOD_RES (584)..(584): Selenocysteine
  MOD_RES (600)..(600): Selenocysteine
MARRPRHSIYSSDEDDEDFEMCDHDYDGLLPKSGKRHLGKXRWXREEDEKLKKLVEQNGXDDWKVIANYLPNRXDVQCQHRWQKVLNPELIKGPWXKEEDQRVIELVQKYGPKRWSVIAKHLKGRIGKQCRERWHNHLNPEVKKXSWXEEEDRIIYQAHKRLGNRWAEIAKLLPGRXDNAIKNHWNSXMRRKVEQEGYLQESSKASQPAVAXSFQKNSHLMGFAQAPPXAQLPAXGQPXVNNDYSYYHISEAQNVSSHVPYPVALHVNIVNVPQPAAAAIQRHYNDEDPEKEKRIKELELLLMSXENELKGQQVLPXQNHXCSYPGWHSXXIADHXRPHGDSAPVSCLGEHHSXPSLPADPGSLPEESASPARCMIVHQGXILDNVKNLLEFAEXLQFIDSFLNXSSNHENSDLEMPSLXSXPLIGHKLXVXXPFHRDQXVKXQKENXVFRXPAIKRSILESSPRXPXPFKHALAAQEIKYGPLKMLPQXPSHLVEDLQDVIKQESDESGIVAEFQENGPPLLKKIKQENILXSSVLMAPASEDEDNVLKAFXVPKNRSLASPLQPCSSXWEPASCGKMEEQMXSSSQARKYVNAFSARXLVM

SEQ ID NO: 16919 - protein, 605 aa, Homo sapiens
  MOD_RES (41)..(41): Selenocysteine
  MOD_RES (44)..(44): Selenocysteine
  MOD_RES (60)..(60): Selenocysteine
  MOD_RES (74)..(74): Selenocysteine
  MOD_RES (96)..(96): Selenocysteine
  MOD_RES (145)..(145): Selenocysteine
  MOD_RES (148)..(148): Selenocysteine
  MOD_RES (177)..(177): Selenocysteine
  MOD_RES (188)..(188): Selenocysteine
  MOD_RES (212)..(212): Selenocysteine
  MOD_RES (229)..(229): Selenocysteine
  MOD_RES (235)..(235): Selenocysteine
  MOD_RES (239)..(239): Selenocysteine
  MOD_RES (282)..(282): Selenocysteine
  MOD_RES (286)..(286): Selenocysteine
  MOD_RES (295)..(296): Selenocysteine
  MOD_RES (301)..(301): Selenocysteine
  MOD_RES (319)..(319): Selenocysteine
  MOD_RES (346)..(346): Selenocysteine
  MOD_RES (360)..(360): Selenocysteine
  MOD_RES (370)..(370): Selenocysteine
  MOD_RES (385)..(385): Selenocysteine
  MOD_RES (387)..(387): Selenocysteine
  MOD_RES (395)..(395): Selenocysteine
  MOD_RES (397)..(398): Selenocysteine
  MOD_RES (405)..(405): Selenocysteine
  MOD_RES (408)..(408): Selenocysteine
  MOD_RES (413)..(413): Selenocysteine
  MOD_RES (417)..(417): Selenocysteine
  MOD_RES (431)..(431): Selenocysteine
  MOD_RES (433)..(433): Selenocysteine
  MOD_RES (455)..(455): Selenocysteine
  MOD_RES (499)..(499): Selenocysteine
  MOD_RES (518)..(518): Selenocysteine
  MOD_RES (522)..(522): Selenocysteine
  MOD_RES (524)..(524): Selenocysteine
  MOD_RES (535)..(535): Selenocysteine
  MOD_RES (555)..(555): Selenocysteine
  MOD_RES (572)..(572): Selenocysteine
  MOD_RES (586)..(586): Selenocysteine
  MOD_RES (602)..(602): Selenocysteine
MARRPRHSIYSSDEDDEDFEMCDHDYDGLLPKSGKRHLGKXRWXREEDEKLKKLVEQNGXDDWKVIANYLPNRXDVQCQHRWQKVLNPELIKGPWXKEEDQRVIELVQKYGPKRWSVIAKHLKGRIGKQCRERWHNHLNPEVKKXSWXEEEDRIIYQAHKRLGNRWAEIAKLLPGRXDNAIKNHWNSXMRRKVEQEGYLQESSKASQPAVAXSFQKNSHLMGFAQAPPXAQLPAXGQPXVNNDYSYYHISEAQNVSSHVPYPVALHVNIVNVPQPAAAAIQXQNHXCSYPGWHSXXIADHXRPHGDSAPVSCLGEHHSXPSLPADPGSLPEESASPARCMIVHQGXILDNVKNLLEFAEXLQFIDSFLNXSSNHENSDLEMPSLXSXPLIGHKLXVXXPFHRDQXVKXQKENXVFRXPAIKRSILESSPRXPXPFKHALAAQEIKYGPLKMLPQXPSHLVEDLQDVIKQESDESGIVAEFQENGPPLLKKIKQEVESPXDKSGNFFCSHHWEGDSLNXQLFXQXSPVADAPNILXSSVLMAPASEDEDNVLKAFXVPKNRSLASPLQPCSSXWEPASCGKMEEQMXSSSQARKYVNAFSARXLVM

SEQ ID NO: 16920 - protein, 611 aa, Homo sapiens
  MOD_RES (41)..(41): Selenocysteine
  MOD_RES (44)..(44): Selenocysteine
  MOD_RES (60)..(60): Selenocysteine
  MOD_RES (74)..(74): Selenocysteine
  MOD_RES (96)..(96): Selenocysteine
  MOD_RES (145)..(145): Selenocysteine
  MOD_RES (148)..(148): Selenocysteine
  MOD_RES (177)..(177): Selenocysteine
  MOD_RES (188)..(188): Selenocysteine
  MOD_RES (212)..(212): Selenocysteine
  MOD_RES (229)..(229): Selenocysteine
  MOD_RES (235)..(235): Selenocysteine
  MOD_RES (239)..(239): Selenocysteine
  MOD_RES (305)..(305): Selenocysteine
  MOD_RES (317)..(317): Selenocysteine
  MOD_RES (321)..(321): Selenocysteine
  MOD_RES (330)..(331): Selenocysteine
  MOD_RES (336)..(336): Selenocysteine
  MOD_RES (354)..(354): Selenocysteine
  MOD_RES (381)..(381): Selenocysteine
  MOD_RES (395)..(395): Selenocysteine
  MOD_RES (405)..(405): Selenocysteine
  MOD_RES (420)..(420): Selenocysteine
  MOD_RES (422)..(422): Selenocysteine
  MOD_RES (430)..(430): Selenocysteine
  MOD_RES (432)..(433): Selenocysteine
  MOD_RES (440)..(440): Selenocysteine
  MOD_RES (443)..(443): Selenocysteine
  MOD_RES (448)..(448): Selenocysteine
  MOD_RES (452)..(452): Selenocysteine
  MOD_RES (466)..(466): Selenocysteine
  MOD_RES (468)..(468): Selenocysteine
  MOD_RES (490)..(490): Selenocysteine
  MOD_RES (534)..(534): Selenocysteine
  MOD_RES (553)..(553): Selenocysteine
  MOD_RES (557)..(557): Selenocysteine
  MOD_RES (559)..(559): Selenocysteine
  MOD_RES (570)..(570): Selenocysteine
  MOD_RES (590)..(590): Selenocysteine
  MOD_RES (605)..(605): Selenocysteine
  MOD_RES (608)..(608): Selenocysteine
MARRPRHSIYSSDEDDEDFEMCDHDYDGLLPKSGKRHLGKXRWXREEDEKLKKLVEQNGXDDWKVIANYLPNRXDVQCQHRWQKVLNPELIKGPWXKEEDQRVIELVQKYGPKRWSVIAKHLKGRIGKQCRERWHNHLNPEVKKXSWXEEEDRIIYQAHKRLGNRWAEIAKLLPGRXDNAIKNHWNSXMRRKVEQEGYLQESSKASQPAVAXSFQKNSHLMGFAQAPPXAQLPAXGQPXVNNDYSYYHISEAQNVSSHVPYPVALHVNIVNVPQPAAAAIQRHYNDEDPEKEKRIKELELLLMSXENELKGQQVLPXQNHXCSYPGWHSXXIADHXRPHGDSAPVSCLGEHHSXPSLPADPGSLPEESASPARCMIVHQGXILDNVKNLLEFAEXLQFIDSFLNXSSNHENSDLEMPSLXSXPLIGHKLXVXXPFHRDQXVKXQKENXVFRXPAIKRSILESSPRXPXPFKHALAAQEIKYGPLKMLPQXPSHLVEDLQDVIKQESDESGIVAEFQENGPPLLKKIKQEVESPXDKSGNFFCSHHWEGDSLNXQLFXQXSPVADAPNILXSSVLMAPASEDEDNVLKAFXVPKNRSLASPLQVIXIPXLVF

SEQ ID NO: 16921 - protein, 612 aa, Homo sapiens
  MOD_RES (41)..(41): Selenocysteine
  MOD_RES (44)..(44): Selenocysteine
  MOD_RES (60)..(60): Selenocysteine
  MOD_RES (74)..(74): Selenocysteine
  MOD_RES (96)..(96): Selenocysteine
  MOD_RES (145)..(145): Selenocysteine
  MOD_RES (148)..(148): Selenocysteine
  MOD_RES (177)..(177): Selenocysteine
  MOD_RES (188)..(188): Selenocysteine
  MOD_RES (212)..(212): Selenocysteine
  MOD_RES (229)..(229): Selenocysteine
  MOD_RES (235)..(235): Selenocysteine
  MOD_RES (239)..(239): Selenocysteine
  MOD_RES (305)..(305): Selenocysteine
  MOD_RES (317)..(317): Selenocysteine
  MOD_RES (321)..(321): Selenocysteine
  MOD_RES (330)..(331): Selenocysteine
  MOD_RES (336)..(336): Selenocysteine
  MOD_RES (354)..(354): Selenocysteine
  MOD_RES (381)..(381): Selenocysteine
  MOD_RES (395)..(395): Selenocysteine
  MOD_RES (405)..(405): Selenocysteine
  MOD_RES (420)..(420): Selenocysteine
  MOD_RES (422)..(422): Selenocysteine
  MOD_RES (430)..(430): Selenocysteine
  MOD_RES (432)..(433): Selenocysteine
  MOD_RES (440)..(440): Selenocysteine
  MOD_RES (443)..(443): Selenocysteine
  MOD_RES (448)..(448): Selenocysteine
  MOD_RES (452)..(452): Selenocysteine
  MOD_RES (466)..(466): Selenocysteine
  MOD_RES (468)..(468): Selenocysteine
  MOD_RES (490)..(490): Selenocysteine
  MOD_RES (534)..(534): Selenocysteine
  MOD_RES (553)..(553): Selenocysteine
  MOD_RES (557)..(557): Selenocysteine
  MOD_RES (559)..(559): Selenocysteine
  MOD_RES (570)..(570): Selenocysteine
  MOD_RES (590)..(590): Selenocysteine
  MOD_RES (604)..(604): Selenocysteine
MARRPRHSIYSSDEDDEDFEMCDHDYDGLLPKSGKRHLGKXRWXREEDEKLKKLVEQNGXDDWKVIANYLPNRXDVQCQHRWQKVLNPELIKGPWXKEEDQRVIELVQKYGPKRWSVIAKHLKGRIGKQCRERWHNHLNPEVKKXSWXEEEDRIIYQAHKRLGNRWAEIAKLLPGRXDNAIKNHWNSXMRRKVEQEGYLQESSKASQPAVAXSFQKNSHLMGFAQAPPXAQLPAXGQPXVNNDYSYYHISEAQNVSSHVPYPVALHVNIVNVPQPAAAAIQRHYNDEDPEKEKRIKELELLLMSXENELKGQQVLPXQNHXCSYPGWHSXXIADHXRPHGDSAPVSCLGEHHSXPSLPADPGSLPEESASPARCMIVHQGXILDNVKNLLEFAEXLQFIDSFLNXSSNHENSDLEMPSLXSXPLIGHKLXVXXPFHRDQXVKXQKENXVFRXPAIKRSILESSPRXPXPFKHALAAQEIKYGPLKMLPQXPSHLVEDLQDVIKQESDESGIVAEFQENGPPLLKKIKQEVESPXDKSGNFFCSHHWEGDSLNXQLFXQXSPVADAPNILXSSVLMAPASEDEDNVLKAFXVPKNRSLASPLQAXKAQRLFQF

SEQ ID NO: 16922 - protein, 637 aa, Homo sapiens
  MOD_RES (41)..(41): Selenocysteine
  MOD_RES (44)..(44): Selenocysteine
  MOD_RES (60)..(60): Selenocysteine
  MOD_RES (74)..(74): Selenocysteine
  MOD_RES (96)..(96): Selenocysteine
  MOD_RES (145)..(145): Selenocysteine
  MOD_RES (148)..(148): Selenocysteine
  MOD_RES (177)..(177): Selenocysteine
  MOD_RES (188)..(188): Selenocysteine
  MOD_RES (212)..(212): Selenocysteine
  MOD_RES (229)..(229): Selenocysteine
  MOD_RES (235)..(235): Selenocysteine
  MOD_RES (239)..(239): Selenocysteine
  MOD_RES (305)..(305): Selenocysteine
  MOD_RES (314)..(314): Selenocysteine
  MOD_RES (318)..(318): Selenocysteine
  MOD_RES (327)..(328): Selenocysteine
  MOD_RES (333)..(333): Selenocysteine
  MOD_RES (351)..(351): Selenocysteine
  MOD_RES (378)..(378): Selenocysteine
  MOD_RES (392)..(392): Selenocysteine
  MOD_RES (402)..(402): Selenocysteine
  MOD_RES (417)..(417): Selenocysteine
  MOD_RES (419)..(419): Selenocysteine
  MOD_RES (427)..(427): Selenocysteine
  MOD_RES (429)..(430): Selenocysteine
  MOD_RES (437)..(437): Selenocysteine
  MOD_RES (440)..(440): Selenocysteine
  MOD_RES (445)..(445): Selenocysteine
  MOD_RES (449)..(449): Selenocysteine
  MOD_RES (463)..(463): Selenocysteine
  MOD_RES (465)..(465): Selenocysteine
  MOD_RES (487)..(487): Selenocysteine
  MOD_RES (531)..(531): Selenocysteine
  MOD_RES (550)..(550): Selenocysteine
  MOD_RES (554)..(554): Selenocysteine
  MOD_RES (556)..(556): Selenocysteine
  MOD_RES (567)..(567): Selenocysteine
  MOD_RES (587)..(587): Selenocysteine
  MOD_RES (604)..(604): Selenocysteine
  MOD_RES (618)..(618): Selenocysteine
  MOD_RES (634)..(634): Selenocysteine
MARRPRHSIYSSDEDDEDFEMCDHDYDGLLPKSGKRHLGKXRWXREEDEKLKKLVEQNGXDDWKVIANYLPNRXDVQCQHRWQKVLNPELIKGPWXKEEDQRVIELVQKYGPKRWSVIAKHLKGRIGKQCRERWHNHLNPEVKKXSWXEEEDRIIYQAHKRLGNRWAEIAKLLPGRXDNAIKNHWNSXMRRKVEQEGYLQESSKASQPAVAXSFQKNSHLMGFAQAPPXAQLPAXGQPXVNNDYSYYHISEAQNVSSHVPYPVALHVNIVNVPQPAAAAIQRHYNDEDPEKEKRIKELELLLMSXENELKGQQXQNHXCSYPGWHSXXIADHXRPHGDSAPVSCLGEHHSXPSLPADPGSLPEESASPARCMIVHQGXILDNVKNLLEFAEXLQFIDSFLNXSSNHENSDLEMPSLXSXPLIGHKLXVXXPFHRDQXVKXQKENXVFRXPAIKRSILESSPRXPXPFKHALAAQEIKYGPLKMLPQXPSHLVEDLQDVIKQESDESGIVAEFQENGPPLLKKIKQEVESPXDKSGNFFCSHHWEGDSLNXQLFXQXSPVADAPNILXSSVLMAPASEDEDNVLKAFXVPKNRSLASPLQPCSSXWEPASCGKMEEQMXSSSQARKYVNAFSARXLVM

SEQ ID NO: 16923 - protein, 640 aa, Homo sapiens
  MOD_RES (41)..(41): Selenocysteine
  MOD_RES (44)..(44): Selenocysteine
  MOD_RES (60)..(60): Selenocysteine
  MOD_RES (74)..(74): Selenocysteine
  MOD_RES (96)..(96): Selenocysteine
  MOD_RES (145)..(145): Selenocysteine
  MOD_RES (148)..(148): Selenocysteine
  MOD_RES (177)..(177): Selenocysteine
  MOD_RES (188)..(188): Selenocysteine
  MOD_RES (212)..(212): Selenocysteine
  MOD_RES (229)..(229): Selenocysteine
  MOD_RES (235)..(235): Selenocysteine
  MOD_RES (239)..(239): Selenocysteine
  MOD_RES (305)..(305): Selenocysteine
  MOD_RES (317)..(317): Selenocysteine
  MOD_RES (321)..(321): Selenocysteine
  MOD_RES (330)..(331): Selenocysteine
  MOD_RES (336)..(336): Selenocysteine
  MOD_RES (354)..(354): Selenocysteine
  MOD_RES (381)..(381): Selenocysteine
  MOD_RES (395)..(395): Selenocysteine
  MOD_RES (405)..(405): Selenocysteine
  MOD_RES (420)..(420): Selenocysteine
  MOD_RES (422)..(422): Selenocysteine
  MOD_RES (430)..(430): Selenocysteine
  MOD_RES (432)..(433): Selenocysteine
  MOD_RES (440)..(440): Selenocysteine
  MOD_RES (443)..(443): Selenocysteine
  MOD_RES (448)..(448): Selenocysteine
  MOD_RES (452)..(452): Selenocysteine
  MOD_RES (466)..(466): Selenocysteine
  MOD_RES (468)..(468): Selenocysteine
  MOD_RES (490)..(490): Selenocysteine
  MOD_RES (534)..(534): Selenocysteine
  MOD_RES (553)..(553): Selenocysteine
  MOD_RES (557)..(557): Selenocysteine
  MOD_RES (559)..(559): Selenocysteine
  MOD_RES (570)..(570): Selenocysteine
  MOD_RES (590)..(590): Selenocysteine
  MOD_RES (607)..(607): Selenocysteine
  MOD_RES (621)..(621): Selenocysteine
  MOD_RES (637)..(637): Selenocysteine
MARRPRHSIYSSDEDDEDFEMCDHDYDGLLPKSGKRHLGKXRWXREEDEKLKKLVEQNGXDDWKVIANYLPNRXDVQCQHRWQKVLNPELIKGPWXKEEDQRVIELVQKYGPKRWSVIAKHLKGRIGKQCRERWHNHLNPEVKKXSWXEEEDRIIYQAHKRLGNRWAEIAKLLPGRXDNAIKNHWNSXMRRKVEQEGYLQESSKASQPAVAXSFQKNSHLMGFAQAPPXAQLPAXGQPXVNNDYSYYHISEAQNVSSHVPYPVALHVNIVNVPQPAAAAIQRHYNDEDPEKEKRIKELELLLMSXENELKGQQVLPXQNHXCSYPGWHSXXIADHXRPHGDSAPVSCLGEHHSXPSLPADPGSLPEESASPARCMIVHQGXILDNVKNLLEFAEXLQFIDSFLNXSSNHENSDLEMPSLXSXPLIGHKLXVXXPFHRDQXVKXQKENXVFRXPAIKRSILESSPRXPXPFKHALAAQEIKYGPLKMLPQXPSHLVEDLQDVIKQESDESGIVAEFQENGPPLLKKIKQEVESPXDKSGNFFCSHHWEGDSLNXQLFXQXSPVADAPNILXSSVLMAPASEDEDNVLKAFXVPKNRSLASPLQPCSSXWEPASCGKMEEQMXSSSQARKYVNAFSARXLVM

SEQ ID NO: 16924 - protein, 660 aa, Homo sapiens
  MOD_RES (41)..(41): Selenocysteine
  MOD_RES (44)..(44): Selenocysteine
  MOD_RES (60)..(60): Selenocysteine
  MOD_RES (74)..(74): Selenocysteine
  MOD_RES (96)..(96): Selenocysteine
  MOD_RES (145)..(145): Selenocysteine
  MOD_RES (148)..(148): Selenocysteine
  MOD_RES (177)..(177): Selenocysteine
  MOD_RES (188)..(188): Selenocysteine
  MOD_RES (212)..(212): Selenocysteine
  MOD_RES (229)..(229): Selenocysteine
  MOD_RES (235)..(235): Selenocysteine
  MOD_RES (239)..(239): Selenocysteine
  MOD_RES (305)..(305): Selenocysteine
  MOD_RES (317)..(317): Selenocysteine
  MOD_RES (321)..(321): Selenocysteine
  MOD_RES (330)..(331): Selenocysteine
  MOD_RES (336)..(336): Selenocysteine
  MOD_RES (354)..(354): Selenocysteine
  MOD_RES (381)..(381): Selenocysteine
  MOD_RES (395)..(395): Selenocysteine
  MOD_RES (405)..(405): Selenocysteine
  MOD_RES (420)..(420): Selenocysteine
  MOD_RES (422)..(422): Selenocysteine
  MOD_RES (430)..(430): Selenocysteine
  MOD_RES (432)..(433): Selenocysteine
  MOD_RES (440)..(440): Selenocysteine
  MOD_RES (443)..(443): Selenocysteine
  MOD_RES (448)..(448): Selenocysteine
  MOD_RES (452)..(452): Selenocysteine
  MOD_RES (466)..(466): Selenocysteine
  MOD_RES (468)..(468): Selenocysteine
  MOD_RES (490)..(490): Selenocysteine
  MOD_RES (534)..(534): Selenocysteine
  MOD_RES (553)..(553): Selenocysteine
  MOD_RES (557)..(557): Selenocysteine
  MOD_RES (559)..(559): Selenocysteine
  MOD_RES (567)..(567): Selenocysteine
  MOD_RES (614)..(614): Selenocysteine
  MOD_RES (628)..(628): Selenocysteine
  MOD_RES (643)..(643): Selenocysteine
MARRPRHSIYSSDEDDEDFEMCDHDYDGLLPKSGKRHLGKXRWXREEDEKLKKLVEQNGXDDWKVIANYLPNRXDVQCQHRWQKVLNPELIKGPWXKEEDQRVIELVQKYGPKRWSVIAKHLKGRIGKQCRERWHNHLNPEVKKXSWXEEEDRIIYQAHKRLGNRWAEIAKLLPGRXDNAIKNHWNSXMRRKVEQEGYLQESSKASQPAVAXSFQKNSHLMGFAQAPPXAQLPAXGQPXVNNDYSYYHISEAQNVSSHVPYPVALHVNIVNVPQPAAAAIQRHYNDEDPEKEKRIKELELLLMSXENELKGQQVLPXQNHXCSYPGWHSXXIADHXRPHGDSAPVSCLGEHHSXPSLPADPGSLPEESASPARCMIVHQGXILDNVKNLLEFAEXLQFIDSFLNXSSNHENSDLEMPSLXSXPLIGHKLXVXXPFHRDQXVKXQKENXVFRXPAIKRSILESSPRXPXPFKHALAAQEIKYGPLKMLPQXPSHLVEDLQDVIKQESDESGIVAEFQENGPPLLKKIKQEVESPXDKSGNFFCSHHWEGDSLNXQLFXQXSPVADAPXGVQWHDFGSLQPLPPGFKRFSCLSLPRSWDYRHPPPRPANFEFLVEXGFLHVGQAGLELLXSGDLPASASQSARIXGVSHRARPGGIFLQAPF

SEQ ID NO: 16925 - protein, 666 aa, Homo sapiens
  MOD_RES (41)..(41): Selenocysteine
  MOD_RES (44)..(44): Selenocysteine
  MOD_RES (60)..(60): Selenocysteine
  MOD_RES (74)..(74): Selenocysteine
  MOD_RES (96)..(96): Selenocysteine
  MOD_RES (145)..(145): Selenocysteine
  MOD_RES (148)..(148): Selenocysteine
  MOD_RES (177)..(177): Selenocysteine
  MOD_RES (188)..(188): Selenocysteine
  MOD_RES (212)..(212): Selenocysteine
  MOD_RES (229)..(229): Selenocysteine
  MOD_RES (235)..(235): Selenocysteine
  MOD_RES (239)..(239): Selenocysteine
  MOD_RES (305)..(305): Selenocysteine
  MOD_RES (317)..(317): Selenocysteine
  MOD_RES (321)..(321): Selenocysteine
  MOD_RES (330)..(331): Selenocysteine
  MOD_RES (336)..(336): Selenocysteine
  MOD_RES (354)..(354): Selenocysteine
  MOD_RES (381)..(381): Selenocysteine
  MOD_RES (395)..(395): Selenocysteine
  MOD_RES (405)..(405): Selenocysteine
  MOD_RES (420)..(420): Selenocysteine
  MOD_RES (422)..(422): Selenocysteine
  MOD_RES (430)..(430): Selenocysteine
  MOD_RES (432)..(433): Selenocysteine
  MOD_RES (440)..(440): Selenocysteine
  MOD_RES (443)..(443): Selenocysteine
  MOD_RES (448)..(448): Selenocysteine
  MOD_RES (452)..(452): Selenocysteine
  MOD_RES (466)..(466): Selenocysteine
  MOD_RES (468)..(468): Selenocysteine
  MOD_RES (490)..(490): Selenocysteine
  MOD_RES (534)..(534): Selenocysteine
  MOD_RES (553)..(553): Selenocysteine
  MOD_RES (557)..(557): Selenocysteine
  MOD_RES (559)..(559): Selenocysteine
  MOD_RES (567)..(567): Selenocysteine
  MOD_RES (614)..(614): Selenocysteine
  MOD_RES (628)..(628): Selenocysteine
  MOD_RES (643)..(643): Selenocysteine
  MOD_RES (662)..(662): Selenocysteine
MARRPRHSIYSSDEDDEDFEMCDHDYDGLLPKSGKRHLGKXRWXREEDEKLKKLVEQNGXDDWKVIANYLPNRXDVQCQHRWQKVLNPELIKGPWXKEEDQRVIELVQKYGPKRWSVIAKHLKGRIGKQCRERWHNHLNPEVKKXSWXEEEDRIIYQAHKRLGNRWAEIAKLLPGRXDNAIKNHWNSXMRRKVEQEGYLQESSKASQPAVAXSFQKNSHLMGFAQAPPXAQLPAXGQPXVNNDYSYYHISEAQNVSSHVPYPVALHVNIVNVPQPAAAAIQRHYNDEDPEKEKRIKELELLLMSXENELKGQQVLPXQNHXCSYPGWHSXXIADHXRPHGDSAPVSCLGEHHSXPSLPADPGSLPEESASPARCMIVHQGXILDNVKNLLEFAEXLQFIDSFLNXSSNHENSDLEMPSLXSXPLIGHKLXVXXPFHRDQXVKXQKENXVFRXPAIKRSILESSPRXPXPFKHALAAQEIKYGPLKMLPQXPSHLVEDLQDVIKQESDESGIVAEFQENGPPLLKKIKQEVESPXDKSGNFFCSHHWEGDSLNXQLFXQXSPVADAPXGVQWHDFGSLQPLPPGFKRFSCLSLPRSWDYRHPPPRPANFEFLVEXGFLHVGQAGLELLXSGDLPASASQSARIXGVSHRARPEYSYKLRFNGXSIRR

SEQ ID NO: 16926 - protein, 726 aa, Homo sapiens
  MOD_RES (41)..(41): Selenocysteine
  MOD_RES (44)..(44): Selenocysteine
  MOD_RES (60)..(60): Selenocysteine
  MOD_RES (74)..(74): Selenocysteine
  MOD_RES (96)..(96): Selenocysteine
  MOD_RES (145)..(145): Selenocysteine
  MOD_RES (148)..(148): Selenocysteine
  MOD_RES (177)..(177): Selenocysteine
  MOD_RES (188)..(188): Selenocysteine
  MOD_RES (212)..(212): Selenocysteine
  MOD_RES (229)..(229): Selenocysteine
  MOD_RES (235)..(235): Selenocysteine
  MOD_RES (239)..(239): Selenocysteine
  MOD_RES (305)..(305): Selenocysteine
  MOD_RES (317)..(317): Selenocysteine
  MOD_RES (321)..(321): Selenocysteine
  MOD_RES (330)..(331): Selenocysteine
  MOD_RES (336)..(336): Selenocysteine
  MOD_RES (354)..(354): Selenocysteine
  MOD_RES (381)..(381): Selenocysteine
  MOD_RES (395)..(395): Selenocysteine
  MOD_RES (405)..(405): Selenocysteine
  MOD_RES (420)..(420): Selenocysteine
  MOD_RES (422)..(422): Selenocysteine
  MOD_RES (430)..(430): Selenocysteine
  MOD_RES (432)..(433): Selenocysteine
  MOD_RES (440)..(440): Selenocysteine
  MOD_RES (443)..(443): Selenocysteine
  MOD_RES (448)..(448): Selenocysteine
  MOD_RES (452)..(452): Selenocysteine
  MOD_RES (466)..(466): Selenocysteine
  MOD_RES (468)..(468): Selenocysteine
  MOD_RES (490)..(490): Selenocysteine
  MOD_RES (534)..(534): Selenocysteine
  MOD_RES (553)..(553): Selenocysteine
  MOD_RES (557)..(557): Selenocysteine
  MOD_RES (559)..(559): Selenocysteine
  MOD_RES (567)..(567): Selenocysteine
  MOD_RES (614)..(614): Selenocysteine
  MOD_RES (628)..(628): Selenocysteine
  MOD_RES (643)..(643): Selenocysteine
  MOD_RES (656)..(656): Selenocysteine
  MOD_RES (676)..(676): Selenocysteine
  MOD_RES (693)..(693): Selenocysteine
  MOD_RES (707)..(707): Selenocysteine
  MOD_RES (723)..(723): Selenocysteine
MARRPRHSIYSSDEDDEDFEMCDHDYDGLLPKSGKRHLGKXRWXREEDEKLKKLVEQNGXDDWKVIANYLPNRXDVQCQHRWQKVLNPELIKGPWXKEEDQRVIELVQKYGPKRWSVIAKHLKGRIGKQCRERWHNHLNPEVKKXSWXEEEDRIIYQAHKRLGNRWAEIAKLLPGRXDNAIKNHWNSXMRRKVEQEGYLQESSKASQPAVAXSFQKNSHLMGFAQAPPXAQLPAXGQPXVNNDYSYYHISEAQNVSSHVPYPVALHVNIVNVPQPAAAAIQRHYNDEDPEKEKRIKELELLLMSXENELKGQQVLPXQNHXCSYPGWHSXXIADHXRPHGDSAPVSCLGEHHSXPSLPADPGSLPEESASPARCMIVHQGXILDNVKNLLEFAEXLQFIDSFLNXSSNHENSDLEMPSLXSXPLIGHKLXVXXPFHRDQXVKXQKENXVFRXPAIKRSILESSPRXPXPFKHALAAQEIKYGPLKMLPQXPSHLVEDLQDVIKQESDESGIVAEFQENGPPLLKKIKQEVESPXDKSGNFFCSHHWEGDSLNXQLFXQXSPVADAPXGVQWHDFGSLQPLPPGFKRFSCLSLPRSWDYRHPPPRPANFEFLVEXGFLHVGQAGLELLXSGDLPASASQSARIXGVSHRARPDNILXSSVLMAPASEDEDNVLKAFXVPKNRSLASPLQPCSSXWEPASCGKMEEQMXSSSQARKYVNAFSARXLVM

SEQ ID NO: 16927 - protein, 745 aa, Homo sapiens
  MOD_RES (41)..(41): Selenocysteine
  MOD_RES (44)..(44): Selenocysteine
  MOD_RES (60)..(60): Selenocysteine
  MOD_RES (74)..(74): Selenocysteine
  MOD_RES (96)..(96): Selenocysteine
  MOD_RES (145)..(145): Selenocysteine
  MOD_RES (148)..(148): Selenocysteine
  MOD_RES (177)..(177): Selenocysteine
  MOD_RES (188)..(188): Selenocysteine
  MOD_RES (212)..(212): Selenocysteine
  MOD_RES (229)..(229): Selenocysteine
  MOD_RES (235)..(235): Selenocysteine
  MOD_RES (239)..(239): Selenocysteine
  MOD_RES (305)..(305): Selenocysteine
  MOD_RES (317)..(317): Selenocysteine
  MOD_RES (321)..(321): Selenocysteine
  MOD_RES (330)..(331): Selenocysteine
  MOD_RES (336)..(336): Selenocysteine
  MOD_RES (354)..(354): Selenocysteine
  MOD_RES (381)..(381): Selenocysteine
  MOD_RES (411)..(411): Selenocysteine
  MOD_RES (425)..(425): Selenocysteine
  MOD_RES (458)..(458): Selenocysteine
  MOD_RES (476)..(476): Selenocysteine
  MOD_RES (491)..(491): Selenocysteine
  MOD_RES (510)..(510): Selenocysteine
  MOD_RES (525)..(525): Selenocysteine
  MOD_RES (527)..(527): Selenocysteine
  MOD_RES (535)..(535): Selenocysteine
  MOD_RES (537)..(538): Selenocysteine
  MOD_RES (545)..(545): Selenocysteine
  MOD_RES (548)..(548): Selenocysteine
  MOD_RES (553)..(553): Selenocysteine
  MOD_RES (557)..(557): Selenocysteine
  MOD_RES (571)..(571): Selenocysteine
  MOD_RES (573)..(573): Selenocysteine
  MOD_RES (595)..(595): Selenocysteine
  MOD_RES (639)..(639): Selenocysteine
  MOD_RES (658)..(658): Selenocysteine
  MOD_RES (662)..(662): Selenocysteine
  MOD_RES (664)..(664): Selenocysteine
  MOD_RES (675)..(675): Selenocysteine
  MOD_RES (695)..(695): Selenocysteine
  MOD_RES (712)..(712): Selenocysteine
  MOD_RES (726)..(726): Selenocysteine
  MOD_RES (742)..(742): Selenocysteine
MARRPRHSIYSSDEDDEDFEMCDHDYDGLLPKSGKRHLGKXRWXREEDEKLKKLVEQNGXDDWKVIANYLPNRXDVQCQHRWQKVLNPELIKGPWXKEEDQRVIELVQKYGPKRWSVIAKHLKGRIGKQCRERWHNHLNPEVKKXSWXEEEDRIIYQAHKRLGNRWAEIAKLLPGRXDNAIKNHWNSXMRRKVEQEGYLQESSKASQPAVAXSFQKNSHLMGFAQAPPXAQLPAXGQPXVNNDYSYYHISEAQNVSSHVPYPVALHVNIVNVPQPAAAAIQRHYNDEDPEKEKRIKELELLLMSXENELKGQQVLPXQNHXCSYPGWHSXXIADHXRPHGDSAPVSCLGEHHSXPSLPADPGSLPEESASPARCMIVHQGXILDNDSSSWCDLSSFEFFEEADFSPSQHHXGKALQLQQREGNGXKPAGEPSPRVNKRMLSESSLDPPKVLPPARHSXIPLVILRKKRGQASPLAXGDCSSFIFADVSSSXPKRSPVKSLPFSPSQFLNXSSNHENSDLEMPSLXSXPLIGHKLXVXXPFHRDQXVKXQKENXVFRXPAIKRSILESSPRXPXPFKHALAAQEIKYGPLKMLPQXPSHLVEDLQDVIKQESDESGIVAEFQENGPPLLKKIKQEVESPXDKSGNFFCSHHWEGDSLNXQLFXQXSPVADAPNILXSSVLMAPASEDEDNVLKAFXVPKNRSLASPLQPCSSXWEPASCGKMEEQMXSSSQARKYVNAFSARXLVM

SEQ ID NO: 16928 - protein, 758 aa, Homo sapiens
  MOD_RES (41)..(41): Selenocysteine
  MOD_RES (44)..(44): Selenocysteine
  MOD_RES (60)..(60): Selenocysteine
  MOD_RES (74)..(74): Selenocysteine
  MOD_RES (96)..(96): Selenocysteine
  MOD_RES (145)..(145): Selenocysteine
  MOD_RES (148)..(148): Selenocysteine
  MOD_RES (177)..(177): Selenocysteine
  MOD_RES (188)..(188): Selenocysteine
  MOD_RES (212)..(212): Selenocysteine
  MOD_RES (229)..(229): Selenocysteine
  MOD_RES (235)..(235): Selenocysteine
  MOD_RES (239)..(239): Selenocysteine
  MOD_RES (305)..(305): Selenocysteine
  MOD_RES (314)..(314): Selenocysteine
  MOD_RES (318)..(318): Selenocysteine
  MOD_RES (327)..(328): Selenocysteine
  MOD_RES (333)..(333): Selenocysteine
  MOD_RES (351)..(351): Selenocysteine
  MOD_RES (378)..(378): Selenocysteine
  MOD_RES (392)..(392): Selenocysteine
  MOD_RES (424)..(424): Selenocysteine
  MOD_RES (438)..(438): Selenocysteine
  MOD_RES (471)..(471): Selenocysteine
  MOD_RES (489)..(489): Selenocysteine
  MOD_RES (504)..(504): Selenocysteine
  MOD_RES (523)..(523): Selenocysteine
  MOD_RES (538)..(538): Selenocysteine
  MOD_RES (540)..(540): Selenocysteine
  MOD_RES (548)..(548): Selenocysteine
  MOD_RES (550)..(551): Selenocysteine
  MOD_RES (558)..(558): Selenocysteine
  MOD_RES (561)..(561): Selenocysteine
  MOD_RES (566)..(566): Selenocysteine
  MOD_RES (570)..(570): Selenocysteine
  MOD_RES (584)..(584): Selenocysteine
  MOD_RES (586)..(586): Selenocysteine
  MOD_RES (608)..(608): Selenocysteine
  MOD_RES (652)..(652): Selenocysteine
  MOD_RES (671)..(671): Selenocysteine
  MOD_RES (675)..(675): Selenocysteine
  MOD_RES (677)..(677): Selenocysteine
  MOD_RES (688)..(688): Selenocysteine
  MOD_RES (708)..(708): Selenocysteine
  MOD_RES (725)..(725): Selenocysteine
  MOD_RES (739)..(739): Selenocysteine
  MOD_RES (755)..(755): Selenocysteine
MARRPRHSIYSSDEDDEDFEMCDHDYDGLLPKSGKRHLGKXRWXREEDEKLKKLVEQNGXDDWKVIANYLPNRXDVQCQHRWQKVLNPELIKGPWXKEEDQRVIELVQKYGPKRWSVIAKHLKGRIGKQCRERWHNHLNPEVKKXSWXEEEDRIIYQAHKRLGNRWAEIAKLLPGRXDNAIKNHWNSXMRRKVEQEGYLQESSKASQPAVAXSFQKNSHLMGFAQAPPXAQLPAXGQPXVNNDYSYYHISEAQNVSSHVPYPVALHVNIVNVPQPAAAAIQRHYNDEDPEKEKRIKELELLLMSXENELKGQQXQNHXCSYPGWHSXXIADHXRPHGDSAPVSCLGEHHSXPSLPADPGSLPEESASPARCMIVHQGXILDNVKNLLEFAEXLQFIDSDSSSWCDLSSFEFFEEADFSPSQHHXGKALQLQQREGNGXKPAGEPSPRVNKRMLSESSLDPPKVLPPARHSXIPLVILRKKRGQASPLAXGDCSSFIFADVSSSXPKRSPVKSLPFSPSQFLNXSSNHENSDLEMPSLXSXPLIGHKLXVXXPFHRDQXVKXQKENXVFRXPAIKRSILESSPRXPXPFKHALAAQEIKYGPLKMLPQXPSHLVEDLQDVIKQESDESGIVAEFQENGPPLLKKIKQEVESPXDKSGNFFCSHHWEGDSLNXQLFXQXSPVADAPNILXSSVLMAPASEDEDNVLKAFXVPKNRSLASPLQPCSSXWEPASCGKMEEQMXSSSQARKYVNAFSARXLVM

SEQ ID NO: 16929 - protein, 761 aa, Homo sapiens
  MOD_RES (41)..(41): Selenocysteine
  MOD_RES (44)..(44): Selenocysteine
  MOD_RES (60)..(60): Selenocysteine
  MOD_RES (74)..(74): Selenocysteine
  MOD_RES (96)..(96): Selenocysteine
  MOD_RES (145)..(145): Selenocysteine
  MOD_RES (148)..(148): Selenocysteine
  MOD_RES (177)..(177): Selenocysteine
  MOD_RES (188)..(188): Selenocysteine
  MOD_RES (212)..(212): Selenocysteine
  MOD_RES (229)..(229): Selenocysteine
  MOD_RES (235)..(235): Selenocysteine
  MOD_RES (239)..(239): Selenocysteine
  MOD_RES (305)..(305): Selenocysteine
  MOD_RES (317)..(317): Selenocysteine
  MOD_RES (321)..(321): Selenocysteine
  MOD_RES (330)..(331): Selenocysteine
  MOD_RES (336)..(336): Selenocysteine
  MOD_RES (354)..(354): Selenocysteine
  MOD_RES (381)..(381): Selenocysteine
  MOD_RES (395)..(395): Selenocysteine
  MOD_RES (427)..(427): Selenocysteine
  MOD_RES (441)..(441): Selenocysteine
  MOD_RES (474)..(474): Selenocysteine
  MOD_RES (492)..(492): Selenocysteine
  MOD_RES (507)..(507): Selenocysteine
  MOD_RES (526)..(526): Selenocysteine
  MOD_RES (541)..(541): Selenocysteine
  MOD_RES (543)..(543): Selenocysteine
  MOD_RES (551)..(551): Selenocysteine
  MOD_RES (553)..(554): Selenocysteine
  MOD_RES (561)..(561): Selenocysteine
  MOD_RES (564)..(564): Selenocysteine
  MOD_RES (569)..(569): Selenocysteine
  MOD_RES (573)..(573): Selenocysteine
  MOD_RES (587)..(587): Selenocysteine
  MOD_RES (589)..(589): Selenocysteine
  MOD_RES (611)..(611): Selenocysteine
  MOD_RES (655)..(655): Selenocysteine
  MOD_RES (674)..(674): Selenocysteine
  MOD_RES (678)..(678): Selenocysteine
  MOD_RES (680)..(680): Selenocysteine
  MOD_RES (691)..(691): Selenocysteine
  MOD_RES (711)..(711): Selenocysteine
  MOD_RES (728)..(728): Selenocysteine
  MOD_RES (742)..(742): Selenocysteine
  MOD_RES (758)..(758): Selenocysteine
MARRPRHSIYSSDEDDEDFEMCDHDYDGLLPKSGKRHLGKXRWXREEDEKLKKLVEQNGXDDWKVIANYLPNRXDVQCQHRWQKVLNPELIKGPWXKEEDQRVIELVQKYGPKRWSVIAKHLKGRIGKQCRERWHNHLNPEVKKXSWXEEEDRIIYQAHKRLGNRWAEIAKLLPGRXDNAIKNHWNSXMRRKVEQEGYLQESSKASQPAVAXSFQKNSHLMGFAQAPPXAQLPAXGQPXVNNDYSYYHISEAQNVSSHVPYPVALHVNIVNVPQPAAAAIQRHYNDEDPEKEKRIKELELLLMSXENELKGQQVLPXQNHXCSYPGWHSXXIADHXRPHGDSAPVSCLGEHHSXPSLPADPGSLPEESASPARCMIVHQGXILDNVKNLLEFAEXLQFIDSDSSSWCDLSSFEFFEEADFSPSQHHXGKALQLQQREGNGXKPAGEPSPRVNKRMLSESSLDPPKVLPPARHSXIPLVILRKKRGQASPLAXGDCSSFIFADVSSSXPKRSPVKSLPFSPSQFLNXSSNHENSDLEMPSLXSXPLIGHKLXVXXPFHRDQXVKXQKENXVFRXPAIKRSILESSPRXPXPFKHALAAQEIKYGPLKMLPQXPSHLVEDLQDVIKQESDESGIVAEFQENGPPLLKKIKQEVESPXDKSGNFFCSHHWEGDSLNXQLFXQXSPVADAPNILXSSVLMAPASEDEDNVLKAFXVPKNRSLASPLQPCSSXWEPASCGKMEEQMXSSSQARKYVNAFSARXLVM

SEQ ID NO: 16930 - protein, 79 aa, Homo sapiens
  MOD_RES (41)..(41): Selenocysteine
  MOD_RES (44)..(44): Selenocysteine
  MOD_RES (50)..(50): Selenocysteine
  MOD_RES (72)..(72): Selenocysteine
MARRPRHSIYSSDEDDEDFEMCDHDYDGLLPKSGKRHLGKXRWXREENRXDVQCQHRWQKVLNPELIKGPWXKEEDQRN

SEQ ID NO: 16931 - protein, 299 aa, Homo sapiens
  MOD_RES (41)..(41): Selenocysteine
  MOD_RES (44)..(44): Selenocysteine
  MOD_RES (50)..(50): Selenocysteine
  MOD_RES (72)..(72): Selenocysteine
  MOD_RES (121)..(121): Selenocysteine
  MOD_RES (124)..(124): Selenocysteine
  MOD_RES (153)..(153): Selenocysteine
  MOD_RES (164)..(164): Selenocysteine
  MOD_RES (188)..(188): Selenocysteine
  MOD_RES (205)..(205): Selenocysteine
  MOD_RES (211)..(211): Selenocysteine
  MOD_RES (215)..(215): Selenocysteine
  MOD_RES (281)..(281): Selenocysteine
MARRPRHSIYSSDEDDEDFEMCDHDYDGLLPKSGKRHLGKXRWXREENRXDVQCQHRWQKVLNPELIKGPWXKEEDQRVIELVQKYGPKRWSVIAKHLKGRIGKQCRERWHNHLNPEVKKXSWXEEEDRIIYQAHKRLGNRWAEIAKLLPGRXDNAIKNHWNSXMRRKVEQEGYLQESSKASQPAVAXSFQKNSHLMGFAQAPPXAQLPAXGQPXVNNDYSYYHISEAQNVSSHVPYPVALHVNIVNVPQPAAAAIQRHYNDEDPEKEKRIKELELLLMSXENELKGQQVLPVRLSSCA

SEQ ID NO: 16932 - protein, 326 aa, Homo sapiens
  MOD_RES (41)..(41): Selenocysteine
  MOD_RES (44)..(44): Selenocysteine
  MOD_RES (50)..(50): Selenocysteine
  MOD_RES (72)..(72): Selenocysteine
  MOD_RES (121)..(121): Selenocysteine
  MOD_RES (124)..(124): Selenocysteine
  MOD_RES (153)..(153): Selenocysteine
  MOD_RES (164)..(164): Selenocysteine
  MOD_RES (188)..(188): Selenocysteine
  MOD_RES (205)..(205): Selenocysteine
  MOD_RES (211)..(211): Selenocysteine
  MOD_RES (215)..(215): Selenocysteine
  MOD_RES (281)..(281): Selenocysteine
  MOD_RES (318)..(318): Selenocysteine
MARRPRHSIYSSDEDDEDFEMCDHDYDGLLPKSGKRHLGKXRWXREENRXDVQCQHRWQKVLNPELIKGPWXKEEDQRVIELVQKYGPKRWSVIAKHLKGRIGKQCRERWHNHLNPEVKKXSWXEEEDRIIYQAHKRLGNRWAEIAKLLPGRXDNAIKNHWNSXMRRKVEQEGYLQESSKASQPAVAXSFQKNSHLMGFAQAPPXAQLPAXGQPXVNNDYSYYHISEAQNVSSHVPYPVALHVNIVNVPQPAAAAIQRHYNDEDPEKEKRIKELELLLMSXENELKGQQVLPLCGPLLNSDIFSDWAANWDGSLCFAXYIVNQQRQ

SEQ ID NO: 16933 - protein, 86 aa, Homo sapiens
  MOD_RES (1)..(1): Selenocysteine
  MOD_RES (5)..(5): Selenocysteine
  MOD_RES (14)..(15): Selenocysteine
  MOD_RES (20)..(20): Selenocysteine
  MOD_RES (38)..(38): Selenocysteine
  MOD_RES (65)..(65): Selenocysteine
  MOD_RES (79)..(79): Selenocysteine
XQNHXCSYPGWHSXXIADHXRPHGDSAPVSCLGEHHSXPSLPADPGSLPEESASPARCMIVHQGXILDNVKNLLEFAEXLQFIDSM

SEQ ID NO: 16934 - protein, 1328 aa, Homo sapiens
  MOD_RES (16)..(16): Selenocysteine
  MOD_RES (49)..(49): Selenocysteine
  MOD_RES (54)..(54): Selenocysteine
  MOD_RES (79)..(79): Selenocysteine
  MOD_RES (87)..(87): Selenocysteine
  MOD_RES (192)..(192): Selenocysteine
  MOD_RES (317)..(317): Selenocysteine
  MOD_RES (339)..(339): Selenocysteine
  MOD_RES (358)..(358): Selenocysteine
  MOD_RES (381)..(381): Selenocysteine
  MOD_RES (388)..(388): Selenocysteine
  MOD_RES (390)..(390): Selenocysteine
  MOD_RES (427)..(427): Selenocysteine
  MOD_RES (472)..(472): Selenocysteine
  MOD_RES (487)..(487): Selenocysteine
  MOD_RES (491)..(491): Selenocysteine
  MOD_RES (497)..(497): Selenocysteine
  MOD_RES (523)..(523): Selenocysteine
  MOD_RES (526)..(526): Selenocysteine
  MOD_RES (535)..(535): Selenocysteine
  MOD_RES (542)..(542): Selenocysteine
  MOD_RES (560)..(561): Selenocysteine
  MOD_RES (563)..(563): Selenocysteine
  MOD_RES (566)..(566): Selenocysteine
  MOD_RES (579)..(579): Selenocysteine
  MOD_RES (622)..(622): Selenocysteine
  MOD_RES (637)..(637): Selenocysteine
  MOD_RES (639)..(639): Selenocysteine
  MOD_RES (682)..(682): Selenocysteine
  MOD_RES (697)..(697): Selenocysteine
  MOD_RES (708)..(708): Selenocysteine
  MOD_RES (762)..(762): Selenocysteine
  MOD_RES (837)..(837): Selenocysteine
  MOD_RES (875)..(875): Selenocysteine
  MOD_RES (880)..(880): Selenocysteine
  MOD_RES (919)..(919): Selenocysteine
  MOD_RES (938)..(938): Selenocysteine
  MOD_RES (946)..(946): Selenocysteine
  MOD_RES (954)..(954): Selenocysteine
  MOD_RES (961)..(961): Selenocysteine
  MOD_RES (975)..(975): Selenocysteine
  MOD_RES (980)..(980): Selenocysteine
  MOD_RES (987)..(987): Selenocysteine
  MOD_RES (994)..(994): Selenocysteine
  MOD_RES (1021)..(1021): Selenocysteine
  MOD_RES (1037)..(1037): Selenocysteine
  MOD_RES (1064)..(1064): Selenocysteine
  MOD_RES (1075)..(1075): Selenocysteine
  MOD_RES (1095)..(1095): Selenocysteine
  MOD_RES (1102)..(1102): Selenocysteine
  MOD_RES (1106)..(1106): Selenocysteine
  MOD_RES (1126)..(1126): Selenocysteine
  MOD_RES (1141)..(1141): Selenocysteine
  MOD_RES (1161)..(1161): Selenocysteine
  MOD_RES (1178)..(1178): Selenocysteine
  MOD_RES (1190)..(1190): Selenocysteine
  MOD_RES (1196)..(1196): Selenocysteine
  MOD_RES (1200)..(1200): Selenocysteine
  MOD_RES (1216)..(1216): Selenocysteine
  MOD_RES (1227)..(1227): Selenocysteine
  MOD_RES (1229)..(1230): Selenocysteine
  MOD_RES (1239)..(1239): Selenocysteine
  MOD_RES (1244)..(1244): Selenocysteine
  MOD_RES (1269)..(1269): Selenocysteine
MESRDPAQPMSPGEAXQSGARPADRYGLLKHSREFLDFFWDIAKPEQEXRLAAXEKLLEYLRGRPKGSEMKYALKRLIXGLGVGREXARPCYSLALAQLLQSFEDLPLCSILQQIQEKYDLHQVKKAMLRPALFANLFGVLALFQSGRLVKDQEALMKSVKLLQALAQYQNHLQEQPRKALVDILSEVSKAXLQEILPEVLKADLNIILSSPEQLELFLLAQQKVPSKLKKLVGSVNLFSDENVPRLVNVLKMAASSVKKDRKLPAIALDLLRLALKEDKFPRFWKEVVEQGLLKMQFWPASYLCFRLLGAALPLLXKEQLHLVMQGDVIRHYGEHVCXAKLPKQFKFAPEMDDYVGXFLEGCQDDPERQLAVLVAFSSVXNQGLPVXPXFWRVVRFLSPPALQGYVAWLRAMFLQPDLDSLVDFSXNNQKKAQDSSLHMPERAVFRLRKWIIFRLVSIVDSLHLEMEEALXEQVARFCLFHSFFVXKKPXSQIPEXKHPFSFPLENQAREAVSSAFFSLLQXLSXQFKQAPGQXQGGQPWXYHLVQFADLLLNHSHNVXXVXPFXAQQRQAWDRMLQXLKELEAHSAEARAAAFQHLLLLVGIHLLKSPAESCDLLGDIQXCIRKSLGEKPRRSRXKXIDPQEPPWVEVLVEILLALLAQPSHLMRQVARSVFGHICSHLXPRALQLILDVLNPEXSEDENDRVVVXDDSDERRLKGAEDKSEEGEDNRSSESEEESEGEESEEEERDGDVDQGFREQLMXVLQAGKALGGEDSENEEELGDEAMMALDQSLASLFAEQKLRIQARRDEKNKLQKEKALRRDFQIRVLDLVEVLVXKQPENALVLELLEPLLSIIRRSLRSSSSKQEQDLLHKXARIFXHHLCRARRYCHDLGERAGALHAQVERLVQQAGRQPDSPXALYHFNASLYLLRVLKGNXAEGCVHEXQEKQKAGXDPSHMPXGPQAASCLDLNLVXRVYSXALSSFLXKRNSPLXVPMFLSLFSRHPVLCQSLLPILVQHIXGPVRPRHQACLLLQKXLSMREVRSCFEDPEWKQLMGQVLAKVXENLRVLGEAQXKAQHQQALSSLELLNVLFRXCKHEKLXLDLXVLLGVLQGQQQSLQQGAHSXGSSRLHDLYWQAMKXLGVQRPKLEKKDAKEIPSAXQSPISKKRKKKGFLPEXKKRKKRKSEDGXPAEDGXPAAXGGSQPPSMGRKKRNRXKAKVPAQANGXPXXKSPAPGAPXRSPSXPAKSPKLQKKNQKPSQVNGAPGSPXEPAGQKQHQKALPKKGVLGKSPLSALARKKARLSLVIRSPSLLQSGAKKKAQVRKAGKP
